United States Patent Application Publication US 2013/0096032 A1 - sequence listing, part 8

SEQ ID NO: 227 - DNA, 114041 bp, Arabidopsis thaliana
aagcttataccacctcaccatctttggtctacgcgtttcccatctctcccaacttcttctttatttatttatttatttgttttaatagcatcttagctgaattaccatagagagaaactaaattcggagagtggtagtagcgactattttactcttgagttaatgtggttcgtggaagagcttattatacgctttgttcttcgtgactaataagattacaaaacactttttatgatatcaaacacagaacacacacctctgcattaatccggcttacaaaatagtccgatcatctccactaattgatggtctagaaaataaaacaaaattatcaaaatagctaaaagaacattatttggagagtgtaatgaattctttcaagattaatggttagaaaatccactatctcgatgaagattttggagaagaattttatatcaaaaagatgataaaggatttaaatagtatataagggacatggatcaatctactcattgtcaattgattatgagttaggttctcatgaacttaatcaaaatcttataaaattctttagtattgtttctatgtttactccaaacaattaagggtagattctctgattagtaattggctaagcataatgctgagttaaatggtggcaaaagtttcttggttaaggttatttgatcaagaaaaccttttcgtaacaattttgaaattgcaccaaaaacatttgatgattttctgaaaaatagcaaagttttctgaaaatagcacaattttcttcactcttccacatttgtttttcaaacaactttaaatattttaagtttagtaataaatatagcatgaaaacatgtgttggatagtgtacgccaatttttgctatctgaattctacaatgtgcaatggaaaaaaattataagtctacttcgtatatttgaaattctaataattatatactattctatgactatatatagatagaattaaggttatgttttatttatttaatgatgcacgatagtcactatttatgtgagctatattctgttctagaatatatagaattgagttcttagtaattttctctatatatatatatataatttgataaaatctattcatcagtatgccctagaggttacttaatctgttcacactacgtcaattgtaaatttcacacaataatatattaatatcctatacttttagtttgctatggtttaagtaattattcttattacagggacaaaaggacattaaattaaaaagattggagaggaacgagaaacgcggggcctgacaaaagggaagtctgttgccgtgttggtggtcgaaagcaatggtctaatgggcacgtgagacaaatgcctaaattccatgtatgcatgttttttttttatatcaatgttaagtatttatatggttttcaaattttaaatttttttttatagaattatactaatagcggaaaagaccgaaaaactaaataaggaaaaaaataaaataaaaaaatagagcaaccacaattactactagcaggtaaaaacaaccgtctattgaaatggatttaacggggaatagatcttcttaaaggacatgcacgctttcttgcctcgccatttccactagtaaagatagattagttctctatttggtatagtttggaggaatatgtctcgcttcacaaaactcaatagttcctgcttccaagaagtgcttcacaacataaccaccttattttggaaaattaacaagtaaatctatatattttaaattctaagaactcataagacccatatatatgttcaagtgttatttagttgttacattatttaatgttattttccttaaaaatatataaatatttttcttttataaagtgaacaaaagatataataattggtgaaagcatttttaatcttgccgtcctgaccttgggtctcagccacagcataaatagggtaatcattcgtttggtcagtggttgcaagtcgttaatttttagacgtccgtaaaacaaatcttctgttctcaggatcacctcattttaagtttaaaattttgcattttgaacaaaaccatgtagaatgatacactttttcgttaaaattaatacatatatctactaggtagctcacaagtaaaataacggaaagatatcataaacctgtgcatatattatctaaatactgatgcgtttaataggaaacgtaacgaagttcatgatacggttgaaaggtatttcatttaatatgaatttaactttatttttaatctacatttttgatttggctatggacaattcgaaaaacccttgccgagttggacacataaatcggattccttatgttgtaaacatttaatattacaaatcttgctgtcaaaagtgacatgactctttgcatatgaatcatatgatatgactaagtatatgttagcgttagtttagtgtttttgtttgtgtatatatactataggtttttgttttacaacatatggaagccgatttgtgtgttaaactaaacgataacataatattagctagcttaataacttaagaaagttagctctccaattactagaaataacctgctagctatagctttcttttctgttttcttgccacaaatgttaattatttagttatgacttaaaatttacactacaaaaaaagtcttcatcgttagcgcaaaccatctgctatcgtatgtaatatacagcgaattcacaaatgctatatttgcggcaggtatagtaggtgtcacccctatgacagcatcgttttgtacgctatggtatattttgctacgatagcaacgatataacgccattatagagttttgatatagcactttaatttcttgttataaattactaatctttctaatttcgtatcataataccctcacctaacaggacaactaattattgctctctaatataagttttgtagctttgtgttttatgctatcatatataattttttgacaatgacatcgaagaattgctatagtaaacagaattagtgcgtttaattatgctgtaatataatctactatagttgaaaacaacaaccaatttttgctataatatccaatctcaaagaactatcttttgtgattaattctaaacttgttttgcataacataaacatacaatataacaatagttgttatattataaataagtctgattccaatccaagagacaccattcaaaagttaaacataatcatccaaaataagtttaagctaagccaaatacataacaacacaaatctgattccaaatttcataacagaagtagattagtctagtcttaacctaatcagaaaactagctaatctggaccatagattcttcactccctgcaataatcaacaatgtttcatatcagttcctacataaaaccaaagcacaagcatcacaacaatttcaaaacttaccctagattctgcaaagtcagtaggtcaccaacttatcctttggccatgcaattgatgaaccaagtgaatctctcatatactcgatttcatctgatggcctccagactgctgtatcatctacattcactacatctacccaaactctagctgcattctctcccaaacgaacatggtgtaccttttgatctgggtctattgaatgcactcgtcctgcaccaaccacccgcttctttccacttatatccattaacttgcacttctgattagccttcaaaccttcagatgttttttggcgctgacatgttacattataaaccaggattaaacgcatgtagaaattttattagtcaatatgtcaaaccaaatacaaacttaccggagatctccgtagagcggtttgtgatgctagctgagttttcttcacatgagactttggaactactgttggttgcttctcaccaagagattttgcaattgttcctgcagattctgaacccttggctgcagatacctgaatagaagaattatgacctgactttccttttgttgctccattttgttgcttctcaccaagagatttctctgttgctccattttgttgacttgctgctgctgactttccttttgaggctgatgttgttggataagttgattgagaactctgaagaggagctttctgaactgctgaatctgtggtgttttcataggaaactttgtgggcaggccatgctacaaaagactgtaaacagtcctcaaggtatgtcacatccatcgttggcctccatatgaacgtctcaggttgaagtattacatccacaaatactttcactgcagcaggtccgaaggaagcccattaactaatgcagattggtcttctgtctgccaacgtccttctgcaacaataacgtcattggaagacaaatccagtagtttgcacttgtttccataagtgggtcttggtccctgtcaaacacattaaaccaatgtcttagtatgactctgaatatattagtatgactctgaatatataacattttacctgtgcaatgtcttctggattgagcttctcctctaggctaacacacatagcaacaggccaagctatcatctgaccaacagctttctccataatttccatgttaattgcgggtctccaaaggtatgcttctggtacaatcgcagtgtcaatcaatactttaacatctgtaggacctaagcgacttccattgactatctcatccggatcagaagatataatacaaccctcaacaacggttgcatcagtaccagcccaatccatcaagatacacttaggttgtgatccttggttcacactctgtataaggaatcaataggctattatcatctaattatgtaccaaaagatcaaaagtatcaaataaaagtgacttactcttgcagctgaggtttcaccaacttcagctgattgtctctgtaccaaaaaaaaaaacaaagtcaaatatatgtactaaccgattgattagctttatgcataagtagacaagtgtttacatggttctttatcttgtcaattacttcttgtaactcattgaccttctgctggagctggtcctgtttctgttgcatttcagccatacatttgctttttacttggaaacaagctagtttggtcttgttcatatttcttcccatcgcccttaatctactaggattgtcaggccctaagagttggctaagtgaatcttgtgcttcattcgtcccatttgattgaggaccactgctaacaatctcagctgcctttttctgcaaaccatcacacacaatcacaaaccagtccacacaatcactggctaagttctggatttattgcctatcacattcatttcaaaaccatcacaaaccagtccaatttctgttccatcactaacctatccaatttaacaaaccatcactaacctaacaatcatcacaaaccaaactgtcacaacttccaaactataacatactcataattttttcagccgcatttgtattcactggtgttccatatttcttggtccgtgacttaacccaaacctttagcctcgtcacttcagttgggtctgcactaccaattttctgaaaaacacaacatgccaatattagtagcaagctaagtgttttaagaatttcaaagcaataaaaaacataacctaacagacacataagattaccatatcttctgcaagtctaaccatccctctgcgactacaagtgtgaggaatctggttgcgccttctctccttgtagctatcgcttataacctaacaatgattgttaattagtaactttctacatagtaaatatacttagtttaatcttctccctcaacataccttaaattcagggctagttttgctcttcacaaattttctccactcaaatggagaaacatttttaggtctcagattcatcctctgctggtttgtctttgcttctctaaacttagttacttgccttgatttccaggatctccacaaacatcccatttgcttaagcactgcaaccttttgatactcctcatctagttcaaactttgccttcaatcaattacagaaaaagtgattattgctgtgataaggaaagatagtcaaatattacaaaaaaataaaaagtgaagtgttacctggacagatttccagagaagtgtcctgatttcttcacctatttttgtccaccgattaattgtgatagggacgtgttcacggaccaatgcgcctgcatatgatgctaacttaactgagcctttaccaataggctctcccatcatggtgtactccactctcactctggcatttggatccttagcaatatctttcatcctagttggtccacgttgcctcttggtcttaggttgaacaacatcttcatctccagataattcaagctcgccttcaggttcttctgctgcttgcaattcagcttcgttttctgtctctccattaatgtcttcagcttcgttttctgtctctccattgatatcttcatcagcttctttttctgtctctccattgatgtcttcagcttctttttctgtctctccattgatgtcttcagcttctttttctgtctctccatcgatgtcttcaacttcctcaatgttttctactggaacaacagtttgttctacagctgttggctcaattgtacccacatactccacctcatcattgcatttcgtagcagcagcttttttaggttgtcttccacgctttttcttctattgtcccattgtaaatcacctcagaaaaaatgataaaattaaatcagcactcaaagcagacacacaattaacactaaaaacagacagacaatcaacaaattaaacacaaaagacagacaatcaacaaacacaacagacagacaatcaacactcaaagttaaaacaaagttctacatttcaaacataaatcccttcacaatcacttctctcattctctgctacttccaagtcaacatcgatgtcaactgttgttggcaatggcccaatgtcaagagtaacatcgtcattctctttctctctaaatcttctcgacggacctctcattgcaacatgccaagatgatgagtcatcttcacgcaggaaaaacacttgttttgcttgagaagccataatatacggatcccttaaaaaggagacttgactatgattcaaattaactagtgtaaacccttcttcttccttagctccattgccctttactgcccagttgcaacgaaataaaggaacatagaagacattatagtccaacagtataatgtctgttatgcagccataatactgcaccaaatccaccacttgttccttatcctttgcactagacctacaaactgatgtggcttcatagaaaacaccactattctgtgttttcctgtcaactgttcttgtgtgaaatcgttgcccattcactatgtaaccagtaaatgatcttgcgcaacaacgcggaccataagccagccatttcagtgtttcaccatgagtacttgaatcaagatgtatctatcaaagaaaaatagaaaaagtcaggctcttatatctattgctagcctgttctttaagctaaactactaagtgaaagacaaatactagcctgttctttaagccaagatgcaaaattttgagtgtgcatactccataacagagacgtatcacgtctgcatctcccattagtgtttagtagaagctgcaggtgctcactagtaaacagagaaaacaaaattcagaatcagcattcatagaagcagaaagtgaaaagcaatatagaaaagcaatagaaagagagatagattgtaacttactctacataaggttcgacgacagccatattctggatcacagccaaatgagctatttttctctccatttctgtaagactaataaaggtgcctgcagagataggacgccctccaaggatagagttgttctcatactcagtatttctatctgccttttcctgaacttttgttgtcttcttcaaaaattcactacagaattggatgcactcttcagctaagtaacattcagcaatacacccttcaggtcttgctgtgtttctcacaaaatctttgaggactttcatatatctctcaaaagggtacatccatctgaaatgaactggtccccctaacagagcttctctccctaaatgaactgtcaagtgcaccatgatgtcaaagaaactgggaggaaaaaaactttcaaacagacaaagggtttcaacaatctcagcttctatttccaaaagctgctccatatcaatcactctctgacataagtgattgaaaaatttgcataagcgtctaattcctaccctaggacatttaggtaacaaccctctcaaagctattggaagaagctactgcattaagacgtgataatcatgtgatttcaatcctgttaccttacagtcttctaaagatacacctcttgctatgtctgaacagtagccatctggtcctttaaaatcaaatagacgtttgcagaatagcttcttctctgacttggagagagaccaaagtgctgcaggaagatatgtccttttccctttggtttgcggatgcaagtccttccttataccaagcacctcgagatctttgcgagcattgacaccatcctttgacttcccacaatgcatcaatgttgatacaatagatgcaaccacatttctctccacatgcatgacgtctaagttatgccttactggtaggtcctgcaaaacagacaaacaaaatgcattggacattttccctttgtttcaatttaaacaataaaacatatttcaagaaaagagaacagatctgccaaataagatagcctgaaaaagattgaccttttcttccatcttgataactcttcctcatctacttctgcctctttttcctcatcctcctccgagtcactagatagatcatcactatctgatcctgatttaacagactccggttgtttcctcttccttgtagattgtttgaaattcccaaaattattttggaaatttttcaagttatgagaaatttccaaaccacttagtattctactctttcttcgatgttcagctttaccatcaaaccaagacttcttatttctaaacctatgtgatggtggcagacccattctatgtcccatatagacatgttttctgctgaatttcaaccacatgctttctgtatgtttaccacataaaagacacgccatttttcccttcactttacaacccgcaagattcccataagcaggaaaatcactaatcgtccaaagcagcatagctttgagagtaaatgatgatttactgaaagcatcatatgtccattccccattgtcccacagatggcataaatcatctataagtggttctaagtatacatcaatactatttccaggctgttgtgaacccggaatcaacaatgtcagcatgatgttctccttcttcatgcataagtcaggaggcagattgtagtttacaagcaaaacaggccagcagctataccttgtgtttttcatgttgaatggattaaacccatttgtggaaagaccaagcctcaagttcctttcctctgatgcaaataaagggtattttgcattcatctgatcccatgttactgaatcaacagggtggcagagctttccatctgtgcttttgttgtgaaaatgccaccttaaatccctagccatttcctcagatctgaacattcttttgaggcgtgggactattgaaaagtaccgcaacactttctgtggaacacctttctttacttcaccagtatgcatgtttgtcttccatcgtgaagcattgcatttaagacaattctggagcttcttgtatttttttctgaataggcagcagtcattaacacatgcatgaattttctgatagcccatatcaaaggatttcaaaaactttttcacctcatacagtgatgtgtgtagcacattatcctctggtagcatctccggcaatgtctctagaagatcgttgaaactcttgtcagaccagccatttttggtcttcagtctaaacagagacacaatcgcggacagcttgctatggttaacacagcttggatatagaggtgtctcagcatctacaagctttgcaagcaactcgtcttctttcttgtcgtcacgttctgcaatctcgcccaattgaaccataacatcaaactcttcgtccaaatactatgcagcctgatacaactcaactacttcatcattccactgactgactttgctttcactttcaccaccagacaccaattctccatgatgataccagtcacaccgcctcttataagccttatccattcctcttgtcacaagatgatcaacaactacacaacctgagtgacgatctatgttacgacaatcattgcaaggacatacaatcatatcatctcttaaagccgcagccacatcccgtacaaacttgatagcccctctctcataagtaggatcagctctttgttgcagaagtagaaagagagaaaaaaagaagaagtaaactccccaaaacccttactgaaacctaaggaatataattataattataattatattccttacctgccaagatgcacccaatccttggccaccattctatgtgctaaccgtaatataaacctttagtaacctaagcaacataccatattgtgtaaagaaaagaatctcctgaataagcaatcacacaataagtagacaacattcacaaataaattcaaacttataaacgtaatcaatcaaagcaattcaggttttaagtacatgctactcgattatagtagcaggttttaaacaaatgtaactcaaaagaatcttcaatataaacaaacacagaatacaacatttacaaatcactctatcaaaacaattcagtagataagtacagttactagattatattagtatgttttaaaataaataaaactgaaaagaattcttctaagtaaacaatcacagaacaagcagacaacattcacaaataactcaaacttatatactaactatgacaagagaaaacaattcacaaaagggagacaatgatactaacctttcctgtgaaaagagagaattgataagcttccaaatgtccattgattcgctcagcaacgcttacaaattaaacaaaatatatagaatgagcaaaatgttttatattcaagaaagtgaatcaatgatagtatgacataacaaaataactaaatcgatgtgacaataacaacacgattcagacaacagacgaagcttaatcaatctcacaatgaaattctcaagttttaccactcaataaaaatttaaacattacagagccaaaatccaaaatttgcaactctaatgcccaaataaatacacaatttcgaatgcaaaattgttcacaagcacctaaagcagttcaggttaacattactaagacgaaattcatatgaattcgcaataaacaaaggcatgcaaagtagacaaaattttaagaatcgataaagaaaacagatctagggtaacgaattctaaaatcacacaaacatcggttattgagtctcagagattgatgaaaacagatctagggtaacgaattgagtgtcaaaagagaaaaaaaaaacatagaaaatgacttgccttcgattcgatctcgaagtggacagatatagagcggattgagtgccggcagaggttccagttgcacgaagagcattcacgacggcgacggagaggcaacggaaggtttaatcggtggccggaataatgagttcgtcggactgacggctgaggactgagagagttttcttttttagggttttcgaaaagttgttttgtgtttgagtttttttctcgaaaatgactaagtgttatttggcggaataagtattttgtgttcccgctcattaaaactttatatcagcgtttataaaatgctgtaatattaaaattatatcttagcgtttatcaactattgtaatataataacgaaaattacatgacatcttcaatagcaattgagtaatccgtgctataatggtatgctgaaaactttttttgtagtgttagcaatctatctaagtaattcgaattcaaggtaccataacggtatttacgttaatccatgcaaaattatactcccaagtagaactacaattgtgcaaggccgattagtcacccgagaccaaaattgttaactcttggaaattttcttaatattacatgtacacataatcacatataagtcataacaagattaaatacatgtgtgttttaaactacctgtcaactatctagttttttaaatgtattattttcatattaatattagcagtccatatatttcagatgaggtcaacgtttagttatagagccggaggtttcctgttgcattacaagcatgttgccgttataaaaaaaccaacaatacgttaccatatgattaatcttgtagatagaaagattaagaacataataatgatcatatatatatgcaataaaaataatattggtgcagacagagaaaataaagaaaggaaccgtcacaccggccataagatcttcggaagatttgaagttcgtggacttcggtgactccttcacgtgcgcttccctttcctctccctttcctcatcattttcttcactctaattttcatttccttaaatataatgcttttcttttttaacacggaattgatttcattaattaagaatggaaagacatacaagaaaaatgtaaagcctcttttgctagagaatcaacataccgattttacggccagagatgatattaaaaacaacattactgaaaaaggaggatagatgaaagatatcgtgaagaatttcatgaaacttcatctcgaaaaggtccgatcttagaggtttgactggtatcaatgagtcagtagcgaaagagacactgaaaaagttcgattctattgcaactttaaccgcagctagagttgtcaaggcttcagccatcaacggggacgcaatagaatttcctcatcgttttcttcactctaattttgatttccttaaatataatgcagtaaaatatttatcttatttccattctctaagaaattaaaaactttgcttgatcttagtcagtactcatttaggtacaacgaaaatgtattggattctagggtaattacttctaatctagcattaaatgcatctaatattcctatgaagaaaatcacaaattattatgcaaaacattacatttcaatcatcaaaccatttcaaataaattactattataattacaaaaatttactaatttaaacttggatggattagcgtatgtcgaggttcatcatttcagttccatatcttggccatttttcctaaaaaaaagtacaaatattagttatgcgtttgccaaaaaaaacaaaacaaagtattttattttcaacaaagaatatttgttatgcgcgtaaagaattcatttggactcaactcttgagattcagcgtaatgatttataaataggagtgaaattgtaggaaacggttcagtattaatatgatatttgagaatattttcatattaacgacgaaacaatgactatgaaaaatacaagatccattgttaagaacttaagatgacgggaacaaaactaaaaactatattcaaatacaaataaaataaagtattggaaaggaataaaacaatgtggtagaagagaatagaggtggcgtgtggtgtgggccgtgtggcagaacttgtttccagttaaagtcgttgctgcttgtttcgtagcaagagcttcccacaaatccaatcccttcatattaatttatattttgctatggtatatgaacatgtataatgatgatcaaatcaatctcctttttcgtcacgtattattatgtaacgatttaaataataggttgaaaactaaaaccagcttatgcccataatcctagaaacctaaacggatcgtatgttcatcgtttttttaataaattttttttaattataaattttatcgattgatccggtcaatttctataaaacagagtggatttctcccttaaggactaccatactgtctgttccgaatttgaaatgccacatgtatttctgactaccaggtaatctaattggggcaaaacccaactaatagacttttcaaacaaatgtgataaaaaaaaaaaaaaatcatcaaatgaggagagactcaatatgagttttcatattacattttatcaaatgaattttaatgtattgtcatctcttattatctaccattatcttttaattctattgttgttgttgtttttaatttgatatccaagagattttgtcagtctcttttgaaatggtaccactcagaagattttgtcaattcctctctactaacattacatttttccaaaatgtaaaaatttgattaataatttgaatggtaaaaaatagcgatcgttttcaaaacctgaacaagtaatatacattcattcctatataaatgaaaaacagatggaatctatactattaattgggaagcattgtgtgaactacaacattgtaagggtagtttaaaactaactaaatgaatttttgcatgggtaatttagtaaattaacaactactactactactaaataaatatcttatatttagttttttttttttaaatccaattaaatcaataaattaataactacccaatattttcagaaattatttaaaaacgttttcataacatatcaggctattttaattcgaattctatatatgtaaacttatttatgttggtaatatgttattagataattcagaaacttcaatctaatttaataacaaattaataattttaacacaattatacaatcttaaacactaaataagaaaaaacaatatttgcatataattgatcaaatttctgacaaaaacaattaatttgtatatacatcaaactaacaaaaatacacagattttccaaatatctctatattattccgcaattcgaaacaaatctaacattcgatttactatgcaaaatacaaataaaatataaataatataaactaattaaaaatttaattattgtatcataaataacactatacaattttctatgcacattataatttatacattacaatatctttcactaaaaatgtattatatattttttaaaatatgaaatcccgcacgtatgtgcaggtcagaatctagttctatttaaattccgtcgcctcgttaacaaataatcaattatttgatattgtttctttagttgaccttattggattaatgcagactttgattataggcaaccaaactgaaagaaacattaaaactgaatctgagggaagtttctgttatatttcgtttgcatgtgcaatatataaaaaaataattaaatgttttaagtacaacgtaaaagattattgaatgttcagaaaatatgaccaatgacgcgaaaagaattttgtacgaaggagtttccgtactcttctaagtttacgtacaaccaggcatcgtaatatttaagaaaaagaatactatatgattcaattaaatatttttacgaaattattgggttgattagttattacacctcccctaatcattcaaagctgttttatgttctttgaccaattgcaactagattggaattttttttatttgttttcgttacaatcaaaatatatgttccctccattattttttatttgatgttttatgataatgcacacatattaaaaaaaaaacatttaatttttgtttatttttaacctaaaacatcattttttatgtacttagatataattcaaccaataaaaaaataatatgcagaatataaaaatcatcgaaccgattaaaaaattaattaattttgattgaaagttgaaaatattatctaattttgacaaaatttcttcctaaaatatcaaatgaaaaagaacagaaagagttgtttcaaattcaaatatattaaacaaaatattttttttcatgtaagcaatactctaaaatttaaatgcaaaatatattagttttgataaaaaaaaatatagcagactgatgatataggtattttgtaacttttcttaatttgtgagtagtatgtctagatatcatttaaaatgaagagatgaagtataaattttgatttcctttagttatgtgaagaaaatattattgcttttatcttctcaatatattgtcggaaaaaacttgatacaataaaccatataactttacttgtattcaaaattataaatgctgattttcgttcttgatttgtttttgttttttttaacaagatgattataatagtacgagccacggtcatgcactcatgcttggagtaaaaaaaaaaaaaaaaaggaggaatattaagataatgatctagaaagataaaacatttcttaagagctaatgaaagtcatccaaatttgtaaagaagactagttattcaaaagacgatgatgccatctacagtttgtagattttcgatcatatcaaaactttcactcagagtctgggaataagccaatgtggcttcaaaaactcctttgtacagattcaagttcattaatataattcagtttgcagaaaaaaaaaaattcatcctctaaaatgaggaagaaaaagagtcttgtggagatttgtaagaccacctcgaacggcgggactatgagagttcctaaaaaaccaaaaaataatattcctaatgtttcttatattttagaaacacaaattctttcaaaaattcaaaaaacttaattttttaggttttttatacactatttattagttattattgatgaattttaaatttcaagaaaaataattgaatattattggtttagaattatagaaaaatctaaatcacaaaaactaatacatttatgataagttttaatatgtttttaatttgtgtatttttttctagaaaatcaattaaaaatgaacatatggagtaatagtttaatcttataattatattctaattttttttaatatagattgactactaaactttgctaaaaaaaaaaaacaaaaaaacaaaaaaaagatggactactaataaaagtttttgagaccgtctcttaaataagagtttttacacctggggcgagtttgatctccttcaagattaactgtcttatgatctcctgtgaattcatcttgtttccttcgcttggctggtccatttagagcattatagacgcaccacttctgatcaaacctaacctccctttaagcatgctcaagagtgaacttactcttgtaagtggtggttatatgttaagtcaaagcattgattacatagagcaatcaatgactagcattagactttaacctaatggtaaaccaaccaaacattcaataaaaagagacttaagtatgatgtagacatcatattttttttacataatctaaacaagttgaaatagttctacttaacatgcatttatcacacttcttgtttatagttagcattcaataaaaatactaactatttacctaatgtacttcaaaacttgtggtgtcttcttgtacaagtgatgtctcaaatcttctagattctataactcaaaactcatttcataaaaccaaacacaagttagaaaacttaaacacaagaacacaacataatacttaaagcataaaacacaacttaaacacttaaattatataaaacacaaactcattaattagcctaaaaacaactgaaacacaacttatcataaaaaccaaactcttttcataaagaccaaactcattagctcaacacacaaagtaataactaaagtacaaactcattagccaaaacacaaagaaataactaaagtctagactcatttcagaaaggccaaactcatgagccgaaacacaaagtaattactaaagtccaaacttatttcataaagaccaaactaattagccgatccacaaagtaataagtaaagtccaaactcatttcataaaaccatactcatttcattcaagaacacaactgaaatagttaaatccaagtattgcactaatcccagcctaagctaatcgaatgaatcatatctttagaagagattggagatgagtatcaataaattctccgatttcgaacttcaaactctccgatttggatcgatgatggatcgacacactatcgccgtcgatggatacggatcgccacacaatcgccgtcttgttctcttcaagctgacaatcgacacagatctatgtcggagagagaaacaatcgccgtcggactctccgatgaagagagaaaccaaatacgcgaatgccaaaaataataaaccacaaacgtgtaagaatttaggtttgtcgacaaaattttaagggccaatcatatttggccacgtatgcgtccctgaagtgtcacaaaatctcttcgattggaagcggccctaatctattttcacattttgtatttaattttggaccttctaaagggcctattacactaagaaacccataagggacatctattagacgtgctcttagagcatcattatcgtggatatataatgaaaatctcttaagagataaaaatactaatattttaattctacagttaaataaaccaataactaaactataaagtgtctcttagtttgttattatgtctcttagctaagagattttttcgtttctctctcttctttctcttaagttttaattatttttctttttttttttaattggtaagaatcaattaagaaattactgataaggttggttttagaacctctctttcctcttactcttaccttttaattattttaattattttttattttattgttagagactctgattattttttattttattttgattaagtgaccacaacaaggatgccatttcattattccataagagtatctccatcgattgggggggtctcttaacaatcaatattgttatttcagtattaattaattaaataacattgaaattttattttaaaaataaataagccaatgaaaagatggtatacggcaggagggtatttagtgagtatactagttttattctctctcctcctttttaatttttaatttttaatttttatttgtttagatatctactaaatagtcaccgatgactaatattttttttataaaaaacttactttattcatttttctgatgccttaaaaacaagttaccatttaaaaattataattttgatccggaaaatgaaaaaggtcaaagaaatcgaaaaacaagacaacaaactaaagcaaagcaatagatgaagatcaatgacgcaaagataggactcgttatcgctgaaaggagcgaaaccatgaagcaagataggtcttaaatgaattagcaggttgaagacggactaattctgttctggataaactgacggtctaggcctgcaagctttgctcgaaataggagttgaatttccttaacaagtaaccgagccagttttgatacaacaatgtgaagccttgaatttctttctctccacaatttgtaaagaaatgcttgaaaaatgatcttacgaatggaccgagtcttcttgtttcgggaagaaaaacgaacccaagcaacaatgtcctcaaaaaaagcaggaggagttaaaccagaattcgtgaaaaaagaaagccatacctcagaagaataggaacaagcgaagaaccgatgactaatatttatatttaaccaaatatcgacatgatttcatataatgttaaccaaaaatgttctctctaaaaccaaggtattgactgattaagattcattggaggatatccacatgaccacatctttcagactcccaaaatttctaattttcaattccctatccaatattagttctacatatttaattcttaatatctacttaacaattaatatatgaaaaatacttgggttcacccctaggggtgaattcttatattcaccccctttattttagccaattaaaatctaacacttaataataataataaaattaatttaattaaaaaaaccataaattttttgaaaaaggaatgcctctctcgaaaggcgactctctgggccattttcgccgttctgtttttctccatcggagatcttttttgaccaggatagatcacggatttgatgtcgggatcttcattggcggttttaatctgtcaaaaatcaatgacagttactctcttccctcttttttgggaagtaaccaccaactaaaaccgccatagcctctcctatataaccactgtgttcatccgattctgttctctctttctttgttctatcaattcgagtttaaaccactatcgatcatgagtgatttcctctgaaaatctattcaagaccttgatttgggtgttgatgatgtcccaattgttctatcgccggagtttgtttcccaagcggcgtcagtgaaccggttctctttgattgttacaacggtgaatccgaggaagcaaaatctgcgtgctttaattggccaaatgccaagggtttggggtcttgttgattcatgtgttgaacggatcgttgggaacgcaaaggttcaattcaagtttcgtaatgaagagtcgatgaatatggttcttcaacgcggtccttggtccttcaatgactggatgctgtctgttcaccgctggtttccaaacatcacggagagtgaaatgaagataataccattttgggttcaaatacaaggtatcccaattctttacttgactaatgcaatggctagggtagttggaagcagactaggccatgttacggatgtggattttgatgaaaatgcaaatcaaatgggttttgtgacggtcaaattggcatggaactttgatgatcctctccgtttccagaggaactttcaattccaggaaaatgagaacaccatcatcaagtttcgatttgaaaggcttcgaaatttatgtacaaagtgtgggtctctcaaacatgatgtgaaggaatgcgatttgtccttcgaagagtatgtccctgtaaacgtgaatgatgacaacgatgatgacaatcatgatcaaggacatgatgaagatgatatggctgcagaggattctttgcctagcattgatcctgccactttgattccgggtttacaaggacacaacgccggtgccacaagtgtgaagcaggagggatcctcaagttctgttccatctgacttggcgagcgcttttgaggacacagagttgactgcagagagactgagatacctccatgccaaacacgttcgggaaacattgatggatcaaagggaggctggacttctagaggaagtatctgacaatgccacaacaggttttccatttgttaagaggaagcgagtcagtttcgaagtgctctacaaccaggctgaagcagcagaagagtcggctgtcctaggacatattcgcaagaaagataagaaagtgagtcttggaacatctgtctcttcaccactttcaatggacggaggcgcggggggcctgatacccccacagcccccatgaggatcgaatcttggaactgtcagggcattggggtgccgctgactcaatcgcgacttagtaatttatgtaaagtatttaagtttgatgttttatttctgattgaaactttaaacaagtgtgaagttattagtaatttagcaagtgtgttagggtttcccaatgtaataaatcaacccccacaaggtcatagtggtggcttggccttgttgtggaaggatagtgtgcgtttgtccaatctttatcaagatgatcgccatatcgatgtacatatctttatcaataatatcagcttctatttgtcttgtgtgtatggtcatccatgtcaaagtgaaagacatagcttatggactcactttgaaaatttaacgcaatcacgcaatgatccatggattttgataggagattttaatgagatattatccaacaatgaaaagattgggggaccgcagagagatgagtggacttttagaggtttcagaaatatgattagcacttgtgatttagaggatattcgttcaataggagactgtttctcatgggtgggggagcggcactctcatacggtgaagtgttgcttaggtagagcgttcatcaactctgaaggagcagccttattcccctttgctgaattggaatttcttgagttcacaggatctgatcacaaaccattattcctatctctcgaaaaaactgaaacaagaaagatgcgaccatttcgttttgacaaacgacttcttgaggtgccacacttcaaaacatatgtcaaagctggatggaataaggcgatcaatggtcagagaaaacaacttccggatcaagtaaggacctgcagacaggcgatggcacaattgaaacataagtctaatttgaattcccgaatccggataaaccaactccaagcggctctagataaagctatgtcaagtgttaatagaacggagagacgaactatatcacatatacagagagagctcaccgttgcttaccgtgatgaagagagatattggcaacaaaaaagtagaaaccaatggatgaaagaaggagattgcaacacagaattttttcatgcttgtaccaaaacaagattttctgtgaatcgtttactgacaattaaggatgaggagggaatgatttatcggggtgacaaagagataggggttcatgctcaggagttctttacaaaggtttatgagagcaatggtcgtcctgtttcaatcattgattttgcggatttcaaacctacagtgacagagcaaataaatgacgatctcacaaaggacttcagtgatttggaaatttataacaccatttgtcatataggagatgacaaagcaccgggtcctgatggtctaacagctcgtttctataagtcttgttgggagattgttggtccggatgtgataaaagaggttaaaaaaaatttcaggacttcatacatgaaacaatcaataaatcacacaaatatatgtatgatacctaaaattacaaaccctgaaacactttctgactatcgccccattgcattatgtaatgttctctacaagattatttctaaatgtcttgtagaacgactaaaaggccatctagatgcaattgtttcagactctcaggctgcctttatcccgagaaggttagttaatgataacgtcatgatcgcacacgaaatgatgcactctcttaaaacaaggaaacgagtctctcaatcctatatagcggttaagacagatgtgagcaaggcgtatgatagagtggagtggaattttttggaaacaacgatgagactatttggtttcagcgagacatggatcaaatggataatgggagcagtgaaatcagtcaactactcagttttagtgaatggcatacctcatggcacaattgaaccacaacgtggaataagacaaggagatcccttatctccagatctcttcattctatgtgctgatatactaagccatcttattaaaaacagagtagcggaaggggatattcgaggtatccgaattggtaatggtgttcctggtgttactcatctacaatttgcggatgactctttttttttctgccaatctaatgtccgaaactgccaagctttaaaggatgtctttgatgtttatgagtactattcgggccaaaaacttaatatgtccaaatcaatgataacgtttggttcacgagtacatggcaccactcaaaatcgtctcaaaaacattcttggtattcaaagtcatggtggaggtggaaaatatcttgggctctcggagcaatttgggcggaaaaaacgagacatgttcaactatatcattgaaagagtaaagaaacgaacatccagttggagtgcgaaatatttatcaccggcaggaaaagaaattatggtaaaatcactggcgatgtcgatgccggtgtatgcaatgtcttgcttcaaattaccattgaatatcgtttcggagattgaagctctcttaatgaatttctggtgggaaaagaatgcaaagaaaaagggaataccatggatagcttggaagagattacaatactcgaaaaaggaaggtggtttagggtttagagatttggctaaattcaatgatgctttacttgcaaaacaagtatggcggatcattaacaacccaaattctttatttgccccaataataaaagcaagatactttagagaagactctattcttgacgctaaaaggcagagatatcaatcttacggatggacttctatgcttgcgggtttggatgtaattaaaaaaggaagcagattcattgtcggagatggcaaaaccattcgaatcagtcaagataattttgttgcgtcgcaccctccacgacctctcaacgtcgtcactcctacattggataccacggtggatacgttaatctcaactcatggttcgcataggtattggaacgtacatctcatttctcagcttgttagtcccgacgaccaccgttttgttatgaaccatcatctttccaggacagtgcatcaagataagatagtttggaactactctccttctggggattatacagttaagtccgggtattggtttctctttaatgacccaacgaatactcaacttagaccagcgatgccttatggttcagtgaaaattaagaacaagctctggaaactccctattattccaaaaatcaagtacatgctttggcgtacaatttgaaaagcattaccaacacgctcgcgacttctcactcgaggaatggacatcgatccacactgccccagatgcccaactgaagaagagacgataaaccatgtattatttacgtgtccttatgctgcgtcaatttggagtctatcaaacttcccttggttaccgggtcatactttctctcaagacacagaggagaatatttctttccttatcaactcgttttcaagcaatactcttaatacagagcaaaggttagccccattttggctcatatggaggttatggaaagcacgcaataatcttgtgtttaataagttcaatgaaagttgctcaagggttgtgacacaaactgaagcagaagtcaatgaatggttacaagatgtgaaccgaagagaggaagcttccgatttaaaacgatcatcacagagggcaaacgtgcggtggaagaaaccggtgtttcctttagtaaagtgcaatttcgatgcgggtttcacgggtaataatactcatagtacaggagggtggatcatacgtgatcatgcgggattagcgaaggcttggggatcatcaatagtccaaaacgttaccactgctttggaagcggagacaaaagcgttattaatcgcaatgcaacaagcatgggtacgagggtataagtgtgttaagttcgaaggtgattgtgagatccttatcaaggcaatcaatggtgcaaattctagatgtgaaataaccagtcttctccgagatgtggatttttgggcatcaagattttctaatgtggttttcacattcaccaatagactttgtaataatactgctcacctcttagcttctccactttattcgtgttacaggtttcaatcgaattctggttatcagccactttggctcaagaactctcttcgtaaagatttactcatataaataaattctgtttgttggaaaaaaaaaaaatatataaaatctaatttaccacaaaaacgaaattatgtatcggtttgggcttatttgaaaaggtcagagtttagattttatgattaaacgaggttaaatatctgtttgggtttagaaagtacgatgagagtttagattttatgattaaacgaggttaaatatcggtttgggtttagaaagtacgattagggtttagattttatgattaaacgggttaaatattggtttaggtttattaacagatttagattttacaattaaacgagatttaatgtcagtttgggtttaaaaaatacgattagggtttagttttttttacgattaaaatgagtttaaatggcggtttgggtttataaagaagaattagggtttagattttgtaattaaacgagattatatatcggtttggattataattataaatttaatttttttacgtatttaagtaggatttgacatggcatatttttattggttaatgcaaaaagaggtgaacaaatggattcacccctaggggtgaacaaatggattcacccctaggggtgaacccaagtcttgttcttaatatatagatcaaaatcttttccaattagagtttagatttgcaaaacattatcctattttacagaacaatgtgcgtgaacattgttagaattgatctctagtgtattttgcagcaagattatggtacgagaagaaaacagagaatgaatcggtaacaacattgtttcagttctgatccaatacacttattaatgctgctatgcatttctccaaaacaaaaaaaggttctctgagaaaaaaccattgtgccaagcatacgaaaagctctacaactaataaatccacacattgtgaaactaaaacttctaaaaaaggcaacacaataagcaagtttttgctgaggtaatcccacaatttcgatctcacatcccttcaaagtactgattcacgcatgcgcagtgaaattacactcttttgcctcttcaagtacctgtgccaagttacaaccaaaattacaaatccaaacaagaccctgagagaagaagattcattcttcttcgccatcattgtgtatcattttacgacttattctctcgttatcgatttcacggaacctaacattcttttcatgataaccaaagacaactcaaaggcagtacaatgaaacaaaaccaaagttgtcgtataaaccatattctatacgaatcaaaagcaacaaatgtgcatcattatgccaaatcaaagtatcaaacagactgtttaaatgaacaaaatgtttgttattcagtgctaagaaaagctttgctttgtctaatccgccaacacaatgcaaaaggaaacagagtctaatcttcatatactgataagaaacctacaatgcagcaccattctcttgccagcgacgtaaaatccgagtgcatcacccatcttttccaattcctatcaatcccaaacccaaaccattcacaaaaacaacttaatccaactcaaacaaagaacggtaacgaccaacatcaatgcacaagaagctccatagtgttaaacaagaaacttagcagactaatctcccaaataatcctataagaaacctaagtaaagtaaaacactcacaaagaggactactagcgatcttgacaagtgcgttggaaggtaccgttagacagctcgcagaaagctcgcaagttaacgttaaggtgagatgtgagttgagaagtagccacaacactgtacagaggcaagaacgactgtgtgcaaccaagtgctcctagattcctgaagaagatattcacaaatcaacatcagattctttccaattagagatctaaggaagctacgaatctcaaaattttcaaaatcgagatacgaagatttttaattctcactgaattgattggattttgttgaaatttgataaagagactgtgaaggagttaggttcacgaacctggaaggtgatgagaaggtgaagcgacggctaggtaaggaggattgaggaggacggaggcgaggaagcgccgtggtgggagaacggagagatggtgatcttgcggtggcggagacgaaagaacgagcggcagatcctgcgttgcgccaagccattgaaggaggagaagtgaattgagagagagagagaggtttttgctagggtttagggaaatgaatagagagaagctctcgatgtgtttggttgtacggaagttcagtatggtgcatcgtagtggatgattatatttattgggctgaagcccatatctataatcgccattctaggcacaatatagtcctgatcgatgtatagtgttatttcataaaatatttttatttttgtggtaagtaagagtgtcaaaatggtacaagattcatgtatcaactcaattcaacttcatctataaaatttacaatttttccgccaaaaaacaaaaattcgtaattttctcgtcaaaaacttaaattcgcaattaatccgtcaaaaaaattcacaaatttaaaccaaaaacgaaatctacaatttttcgctaaaaacgtaaatccgtaatttcccggccagaaatgtaaattcgcaaattccaccaaataatagtaatgatgatcatattattatgaattattgttttatttattatattaatggatcaacccattcaacaatttaacccattaaattaaatgagttcatgggttgtctgaactcatttcttagataaattgagtcaacttataatgaccatctccagtggttgtctctactttttttctaaatataaaaaaaaaatatataaatatctatttttactccactggttcctcaaaaatagagatatctatttgttaaaagaagaaatagatacaaaaatagagtataaagataaaaactagagatgagttgaagatgccactgtaaactcatttggtaatgagtagagttgggttgggtaaccattttgacacccataggtgtaacttttaaaacagaagtggtgttttgggaattttagactttctctcatgcatctcttgccaagaacatcgatggaaacgttaaggttttgttttgctccacgacgacgaatcaactatgtcttcttcggcttctctcgtatgtaagggtttgatgttacttgtgtttcatttctcctcgtatggcttcctttctcttcctttttattccatttggaaatctggacatcgacctgaaatttgtgcatgaatggtatgagtggatgaaatttgttcattattagtatatagaggatgtatatttttgaagttgtaaccaacggatacatatttccaatttcttccgaattttgtaaaactaaacgtagccacaaaaaccatgttactaaatttagaataatgaaacgaacaacaacctgcggtaacgtttgccgcaactgcaagaggcgaacaaacgaacagattagttgtctaaatttaaactttcttttacatcaagtttaattattgggacaataatccaaattctagagttttctctaaaatatcaacatctccggctccttaaaaagtctacaaattctctaaaaccattttccacctctttaaacataaaaaaaaatctaaagtatttttatagaattagttgattataatattgtaacctagatattatgtaagaactctcaaaacatataattaaaatattttatatatttgtagtgatgtagtgaagttgtcttcaagttaaaatcaaagtaataaaaattatatatgctctagaaaaaccatttttttttgtttgctctataaaattgacatgataataaagttaatttggtctagttaaacaaattaaggagttggagattcagtttccgattagggaagctcggtgtagtcgaaaataataacatccatttccttttcatcgagtgagagatcggcaaattagacactcgaactaagcttcaactaaattttccaaaaaaaaaaagatactagagaaacgccattaaattaaaaaaatgggtaggtgcatagtaaattggtcagccatgcatgtgacagttatcgtgtagactctatagagagccctacataaatgaagcttgtcgtggcaaattctagaagtagtattttaagtcagtctagttttgaccaatacatagcttataactaaaagactaaaagtgttttctctaaatatacactttgttatcaaattacaagtaatcaatcaaaagatggaaggcaaaactgtgatattcagtgtactcgtaatgggtctggtcatctcgcaaattcaagtagaagcacaaaaaacttgctgcccgagccagtcaactaggaaggagtttgaagattgcatttcagaaggaaatttgcagatactttgttcagctgaaagtggatgccgagacacttacgtgggttattgcccttcgggttttccttacgggagtctcacaaactctggtaaaaactgaactcacttggttatatgctttattaagttacatttgttagaggatggatcaagatttcatttttgatgcaaggtgatgttgtcaatgtatattgtaagttggggtgtgtatcctctctgtgtggtgccttaacgagtctccaaaaacttggtaaagcaagctctccaaatgcatagttgctactactattattactattattactaaagaaatcattctagttttgtttcggtgatcagacacaagtggaaaagtgaatgtcgcggttgaacgatgtaccaaggcatgttctactatatgcactaaaggatctaaaaccgcagttgaaactgtgtaaaaaagcagtcaagcataaacaagtaaaggggtggtcatgatcactaaaagtgtaaaagtgttgttttcatacaataattgtcgtgtatgtgtcaaacgtgctagactatggtgctagtactgtttaataaattgtttccggtttttttacgtatcgtagagagttatcgatatctaaattatatctctcttctacttgttattacctaagcggtattcaattcatgtgtacgtggagaagtatctttttggagtaagactagtaaatccctagtttaaaagggtcagcaaaaaagatactcttctaaaagatattcccaaaagatacctttattccctttttgtttgattgtttagaaaaaaaaattgtttttaaaagattgattttttaaattttccatgtaatatttattggttagtattggtgaattgtaatttttatgaaaaatagttaattatcattggtttagagttataaaaaattgtaaaatattaaaaataatacatttataatcgacatttaatatgttttcttaatatgtgttttttttttctaaacaattaaacaaaaaagaaatactcatttgtggaatatatggatgcagatgtagtccacacgtgcattcacttttatgtagttctcgtgggccctaatggagtattcgaacgcacgagtatttgggcttgtttgtgcgacaaagcgtaacatatgaccatctctctttttgttgaatgctgatgaatgttttcttgaaagaaaattacgagaagcatacaaaaagtgttcgataaggggaaagcgctagcaaatataactaaaaagaaaattacaaagcctctcaaaatgtaagattgctctacgaatgaaattttttttggaaaaatgagttctttggtcaaacgtcattaataatacacaatgttttttctaactttgcatgacatttagcatcatataatttcaacacctgccctcgtctcccaattacttctcaattaatatatttaatcaatttttatgaatctaatattttgtcaattacttctcaattaatatattcaatcaattttcatggatcaaatctcttctgtaacgtttttgtattagtacttgattagatacaacttatatgatttaaatccaacttaaatgctattgcaataaagactttgctctaacatacgagtttattgagtgaaacaaacatcttaaaagaaaataattagtccctcttcattttaaccaaaaagccaaaccagaaaaaaaacctcttttcatctccctcaaaacttaaaatatagtgaagatgactattcaagatacatcctatataaggtatcgacaatgttttatttttatcattgcatgaagattagtttgttagaatcttaaactctgtttgacctcatgtgtatagcgaaaatcaacgacatcgttaattgactcatacgatgcacaatgttgtaagtgtctcaaagtgagatctatagagttacaagaagattacaaagagattcgaaataaaaaaaccgaaaaagtcttttgaatgcaagagatgtgtagaacttggagatatggttataaacttttattctcctactattcgttggttccaatgtactgtcattttagagaatttttattttttatggatctaatttaattaacacaaatctttattgagaatttgttggtattcacgaaatccaaaggaggtaattactccctcttcacttcaaccaaaaagccaaaccacaaaaaaaactctcttcatctccctcaaaatttgaaatatgatgaagacgactactcaagctacatctcacaaggtatcgacaatgttttatttttatcattgcatgaaaattcgtttgtcagaatcttaatctttgtttgatctcatgtgtgtagtgaaaaccaacgacatcattaattgactcatactctgcacaatattgtaagtgtctcaaagtgagatctctagagtcagaagaagattacaaagagattcgaagtaaaacaccgaaaaagtcttttaaatgcaagagatgtgtagaacttggagatatggtcatgaagttttattctcctactgttcgatggttccaatgtactattattttagagaattttcattttttatggatctaatttgatttacacaaatcattattgagaatttgttggtatttacaaaattcaaaggagataattactctctcttcacttcaaccaaaaagccaaaccacaaaaaaaactttcttcatctccctcaaaacttgaaatacggtgaagacgactactcaagctacatcccacaaggtatcgagaatgttttatttttatcattgcattaagattcgtttgtcagaatcttaatctctgtttgatctcatgagtgtagcgaaaaccaacgacatcgttaattgactcatacgctacaaaatgttgtaagtgtctcaaagtgagatctatagagtcacaagaagattacgaagagattcgaagtaaaacaccaaaaaagtctgttgaatgcaagggatgtgaagaacttggagatatggatatgaactttcattccctactgtgcattggtttcaatatactattattttagaggattttcattttgtatggatctaatttaatttacacaaatcattattgagaagttgttggtgttcacgaaatccaaaagagataattagtccctcttcacttcaaccaaaaagtcaaaccacaaaaaaaactctcttcatctccctcaaaacttgaaatatggtgaagacgactactcaagctacatcccacaaggtattgacaatgttttattttcatcattgaatgaagattcgtttgtcataatcttaatctctgtttgatctcatgtgtatagtgaaaaccaacgacatcattaattgactcatacgctgcacaatgttgtaagtgtctcaaagtgagatgtatagagtcacaagaagattacaaagagattcgaagtaaaacaccaaagaagtctttcgaatgcaagagatgtgaagaacttggatatatggttatgaactttgattccctactgtgtattggttccaatgtattattattttagagaattttcattttatggatcttatttgatttacacaaatcattatttagaatttgttggtgttcacgaaatccaaagaaaataatgattccctcttcacttcaaccaaaaagccaaaacaaaaaaaaaactctcttcatcttcctcaaaacttaaaatatggtgaagacgactacttaagctacatcccacaaggtatcgagaatgttttatttttatcattgcattaagattcgtttgtcagaatcttaatctctgtttgatctcatgtgtgtagcgaaaaccaacgacatcgttaattgactcatacgctgcacaatgttgtaagtgtctcaaagtgagatttatagagtcacaagaagattacgaagagattcgaagtaaaacaccaaaaaagtctgttaaatgtaagagatgtaaagaacattgagatatgggtatgaactttgattccctactgtccgttggtttcaatgtactattattttagagaatttttattttttatgtatctaatttgatttacacaaatcattattgagaatttgttggggttcacgaaatccaaaggagataattactctctcttcacttcaaccaaaaagccaaaaccacaaaaaaaaaacacttttcatctccctcaaaacttgaaatatggtgaagacgactactcaagctacatcccacaaggtatcgacaatgttttatttttatatttgcattaagattcgtttgtcaaaatcttaatctatgtttgatctcatgtgtgtacaaaaaccaacgacatcgttaattgactcatacgctgcacaatgttgtaagtgtctcaaagtgagatctatagaatcacagaagattacgaagagatccgaagtaaaacacgagaaaagtcttttgaatgcaagaggtgtgaagaacttggagatatggttatgaacttttttttcctactgtgtgttggttccaatgtactattatttcctacgagattatcctgatactgatgttagcggatagaagcttatcgcgatacggttgttatcagaaagtgttattagttttgattctttttgtaaaacacaaggagacaacctgtagcatcgtcagtattatttttcttatctgatagaagttatatcgactaacattattaccatttaaactcgtaggctattgtttgaggattatttttaaaaggctacaaacaaatatgctcgcgtttagcggataagagatttttgtgattatgttattattagaatttgttactagctttgattcttgttgtaaaagggacaacatgtggcattgtaattattatcttaattatctgctagtagttatatcgactaacattgctaccttttaaactcgtagtctattgattgtggactttctttataaagttaacggaaatatcatcgtttttagcatatacgagattatcgcgatactatttgttatcagaatgttgcttatagtcaatgagtccacataatttctatttaaacttgtggtttattgtttgaggattatttttaaaggccatacatatcaataatgattacaatatgtttatgtttttaatgttggtgggagatatctttcaggatatttttagcatccagcatttatgctataaactttgttttggttttataggggctttttcgtgagaaattatattggggaagagagaagattaattactcaattttcatgcatagatacttaatattctgatcatctaggcataaatattaatatagcccataaataattaaatcattttagctatattaaatgtgttttagagaagaaaaaaaaaaaaacctctctcctccaactttcctctcttctcttctttcagaaaggaaggatatggcgtagtttcttttggttccggtgtaatctggatcgtatatattctcgttttcgagatcaataaattccgatttactgtcggatctttataccggttaaatccgcttttttctctcgcttttagcgggattcgatctccctccatcctcgcttttcatcgattcaccggtttctcttcaaagatttctctattttctccaattgatcgaggagtaacatcttcatcgcgtcttttgctctaaacgagagatcaacgttggattcagatctacatcaagatgggtgtagtcggtggtggagcttccccggagttggtgttttacagaaactttttgaagttgtgattgtctctcaatccgagagattcgatgtccttttgggttggattcgaggtcggcagaagacaagcggatactcatcgctgcatgactcattggcggcggctaatcgaagtttcagcgatgtccggcgagtttgacggcgatgcgacaatcctcgccacgtagttaggcgaagacacatcctatacacgtgtcgttacttacttaatcataatttgtgtttaattattatttaatatgggccgtttattgtcgttgtatccactgggctcaaactttctgtacttgcctttgggctttgcttaatgcaagatttggtcgacaaaaaacaaaaatgtgtttagatatctcaactagctgtaaaatatcacctcattagtcatttactaaacaaaaactacactaatagtaaattacatcatatttttatggacttaatcgaaaaaatattatgttaataattttttaatttacggtaaagattagaaaaatatttggtctttatggatgaatctttttattcacgctcttttcttccagccaattaaaatttgtcacctaataaataataaataaatttatttaattatataatctaacttgccactaatacaaaattatatatcatcttggatttataagagagggttagggtttagattttatgattatatgagattaaatattgttttgagattataaagggtttaaattttatagttaaactagttttaatgtaggtttaaatttataaacaggtttaaatgttacaattaaacgagattgaatctcggtttgagtttagaaagaacggttaaagcttagattttacaatgaaatgagtttagataccagtttgggtttacaatggaaaattagagattatattttgtgactaaacgagattatataccggtttgagtttatagaagaatggttaagatttaaattttataattaagtgaatgtttatttcttattaggtgtcaatatcctgattggctgatgaaagaaaaagagtgagtaaaaggattcactcctaggggtgaacctaagaattattcttcttgaagtgatttaaaaaaaaaaattgatattcaaaaaattaaagcaagtgttataaagaagatttggtccttacaaagctaattgactttctagtgctgaacaacaatagatttttgccaaacacatacaaaatggttagctatttatttcagataaagctataggtgtgcgtatgcaaatgacaattatacgaaaacaatatttgagatacctcaagagtaaatatttacaaacacatataccaatttatgacctatatccaattattttatgtacctatatattttttcttatttgcgactctaagaagtaggaagcaacggcaaatcaacctcatcacaccactctacacatctagtctcataaaacaaagtgttcaacttgtttggccaataagttagccaaattttgccacccagtctccacttcaacacacttccttccatctctctcccaactctccacccaacttcatctccatactcatcccttccaaacaccatccccccactcttcgtaaacacattctttaaaccctcttggtttggcttcggcttaacggttgtcacttcttgaccgctctctctatcgtacaacaccgcatcaaaaacggcagcgtttccttcgctttcctgctctattctccaatctttaaccttcctctttgttgccattcttgctcttgccttgactctcggagccactttaccttttccgaaatttccctttagcactctagtcacctcgatatctctctcctcgttcttcgttgaccttcctagacttagccccgatacgtggctggacccgagttctggcccgagccagacccgtacccgtgatgggaagtacctctcctcggagtaacaatccgctatctgattctccacgccaactcctcctttgtgaaaccctagcttcgagacgtggatgcgtatgttgtctacacgtgcgtttacttttatgtagttctcatagaacttaacggagtattcaaactgtactagtatttcagcttgttgatgcgacaaagcgtaacgtaggacagcttctttaggctctacgaatggaaacttgacgatcttgttgtgaacctcgttagagctattatttgtgacgttcattgacaagattgggaaataacctttcaagatccaaagaccatgagcttctgtggcatacgaaaaccccaacgaatgacgtggcatgaggctgctactgaactgtttcaaaccaagattcccaagtcctatctctttagagatcatccatttggataaggcatacgaagcagctcgtacaatacaaagctcggcgtctacaccgagagagacgagaaacgtccgtaagacaggtgcatgttgacatgtaagcgcgttcacgtgtggacctagtaagtgttggaagaagaaagagcctacttcgcttggcgcgtcaaacacacacaaccagaagaggcgtgtgaggaggattagattaaagactgatgagaaggattcaggtgagtgagagtccatgacccagctaactggacttggtttgatttcaagttgttcaaactttgtgcacgcgccgtcgtgtgtggtaggggaacgggtgattagttcttgaagaagctggagaacaagagggaggaacggtttctccgacgacaagggacatgtgttggagacccaaatggtcgacgacttaaggaggttaaaaccctctgctacaactgtaaaggtgagagagtgagattcttggtcagaacccaaagtccgttcggctctaagtttgatcgaacgtgtcaaatcgccagcgagctgaaacactgcgtgtgaatcagactcgctgaactcaggatcttctggaagctcacatatccatgaccatgggtccattttcttggacttggtttatttttctaaggaaaatgtgtgttttagtagaaggaaaaagaggaagataaaattctttttggcgaggaatggaggtggagaattttatatagagatcgtgtggtggagaagtagccatgaaggagattaaactaatcaaagatccttcaaccaagggatcatcgattatatgaggatcgtatcatactgaaaaatatgtggctttacaatatcttcattaatgattcagttttgttttcttatttggatatttggtttataaagaaccacgaccactcttttttgcatggaggaggtctcaaggaagggacgtggagttttaacgttttctcgtttgtggtataagctacgtgttgcatggattggaatgcgaatacgtacattcatttttcgatcacataaaagagttaatataaataaagtatagaacaaacatatttgattgaaaacgacataatcacataattataaataaacaattgataatatatttttcaattatttaattacttctatttggccaattgaaataatgcaaatgttttaggtttattaattaggaaatccgatgaatagtctattggccgattacattcattttaaagagattagagcatctacaatgcacaaatttaagtggatgtctttagttgtgattaaaataaaagaacaaaagaagaaacaatgacatattgccacataagcaaagatgtctctaaaaacatgtctttaatgtctcccaaagacacaatttccttccctgcactaacttaaagacatttacttattattttattcatttaaaatctaaagacacttatattatttgtgcaatggagatggccttagtcggacactaaaatatcggatcactctttatataaaagcatagactcaaatttgttgggttttatttatattgaaaatttctcagtgtagttgcaacttttattgatttttcaatttttattgtttgctgctaattcaaaagtaaaatctgaaattttaaaacacagataagagacaatgaaataaccaaactacacattcaaaattatatcaacatgtttgtaacttctatcaaactttttttttaatttttgtttgggctctctatatactatctgacttatggtttagttatccttaattaatgagcgtttgtaattagaaattgttttatgggaaaaacgatttagttttctcatgggatggaagttgaatcgagaaaatgcgaggaagaagaagatatcatatagggccaaaattgtcaatccatcaaaatgaaaaatgctcattcttataaatccaatctaaaattgtctatttttatagtttttaagccaaaatatgccaaactctgcaaaaaaatcccaatcatgtatcaattgtggcaaaaccaccaaaaatgtgtctctttgttaaaaacgttatttttgaatgtactcacacatgtaggtatttttctctcattctttttgactattatactcttccttaggtttttaattaatttttggttttctttctcacgcccaaaattgtctaatattcgtcttctacacgaacttcatcttcgctcactcttgacctcaagttgatcaactttacctacacctcctttgtttgttgctaattcaaaactaaaatatgttatttcaaaactcatacaagagacaacgaaacaaccaaactacacatccagtttgttattttcatcaaatttttttttaggttctttatataccatcaatcttagggtttaattatcctgaattaacgagtgtttgtaattagaggatatgggataatcgatttagtgcgggtgattatctagtatgcctaattctgcaaaaaaaaaaaacaatcatggatcaattataggaaaaccacaataaagtatttctctttattaaaaacgtcatttcaaaatgtactcacacatgtaggtatttctctctcattccttttgactattttaccccatctcaacttttcaattaactttttggttttccttctcacgccgaaaataattcaatattcgtcttcttctacacgagcttcatcttctcttactcttgatcttaaattgatcagatttatcaacacctcctttgcttgctgctaattaaaaattaagatctgttaattcataccccatataagagacaacgaaacaaccaaaatatacatccaaaattacatcaacatattttttattttcatcaaatctttgtttaatttttgcttggattccttatatatcattagtcttaggatttatttattcttaattaatgagcgtttgtaattagaagagattttatgggatacgcaatttagtttttatggggatagaagttggattgaggaaagaagaagaagaagaagaagatatcatacaagggaaaaatcgttaatctatgagatgaaaaatgctcatccttataagcctaatccgaaaatgtttttatatatatatatatatatatataatttttgggacaaaatatgcctaattctgcaaaagcttcaatcatagatcaattatagaaaaaccacaataaagtgtgtcccttttttaaaagcgtcacttttaaatgtacttacacatttaagtattactctttcaatccttgttaactattttacacttcctcaatttttcaattaatttttggttttccttctcaaaccgaaaatgatccaatattcttcttcttttacacgaacttcatattttctccctcttgacctctaatgatcacctttacggacatctcctcagcttgctgctaattcaaagccatgatctgctatttcaaaacccagacaagagacaataaaagaaccaaacaatacattcaaaattacataaccatattcagtggcggatctagagaaaaaaattatatagggcaccagtcatatttaactaaccaaagtttccttaattaataaaaatatgtaggaaaagaataataaaatgaaaaagaatggcagctagatggaattgaacccaatttccacaacattacatggggcacctctacctaattagctaatagatattgataattacaggtcataaagtaaatagttataaaatgaatatggggcacgtctacccctttgaacgtatatccgcccctgactatattgttatttttatcaaatctttggctgggaatggagagacagaggaaaaacattccgtacacttaaaagggaaaattacctttatattacaattcaccattttccttaaattacaaaacatgttttaaaaaaaaaaaaaaaaatactgagccacttgtgattcaaatacatgaacaaaaaacagttgctgctaagtacaataaaatttcaacaattattatcaccaagtgaattactattcctaactcatgaaccaagataacatgttcaacaaagcagcatctaaaccgcgaatgacgtggaccgaagttattccaccggttcaagcaaaagagttcggccaactcaataactattcccaaatcatgaaccaagatagcatgtacaacaaagcagcaaccaaaccgcaattgacgtggacctaagaaatttaactggttcaatcagatctgattcaagccaaagagttcagccaagtgaatggatattcccaaatcatgaaccaagatagcttttacaacaaagcaggaagcaacccgcgattgacatggaacgaagtaattcaatcggttcaatcagatctggttcaagccaatgtgttcagccaactcaatgactattcccaaatcatgaacgaagataacatgttcaacaaagcagcaaagaaaccgcggatgacatggagtatttcttctgtatttttttaatttaattatttttattaaaatgataggcctaataatttaatctgttgatactatttgtttctaaattattttaatcacttgaaagggttagaaaatacttgaattgagaaatagtataggttagaaaataatttaatctgttgatactttttaataggtttcaatctttatttaagcaaaaatagtatcaatctttacttgttgatcgttattatctttcgatatatttgaattgagaaatatagcattaacttaattacatttatgttaatattttctaaacaaattacattacatttaattaaagttctagctttttatagttttaaataaatataaaatttaaaaatcatttgtataagttcccaatatatgatctttaatcctattatacatataaaatattattatttaaaattaacgtttttttaaaatatatatattttacctatactatgtcatccgctttcaccattcaacatatatataaagcgttctaaccgtttgatctatatttgttccgctagatctgcttgatccgtatttttcttcttgatacgctttaaccgcttgatccgctccgtccaatacgctttctctattcggagcctttatttaatttttacttgggttcataatataccattagtcttaaggtttagttatcttgaattaatgagcatttatagaagagattatatgggataagcaatttatttttttttggggatgaaagttgaattgagaaaacgcgaagaagaagatatcaaaaggggcaaaatcgtcaattcatcagaagaaaaatgtacgtccttagactatttacaatgagactgtttaaaaaaatattcaactgcttaataaatttagtgaaggtgttgaataatatgaaaagtatatgtggattaaattgtgttgaataaaaaacaaatgggacccatgctaccacatggtgaaccgtaactggaagaagtgatgagcgaagatgtgtgtttttgggtggtgataggtgttattttcttattggttactcagattttcgtaattttttatactatcccaattatttacattcaattattttataataataatttttgttatttaaagatttttatactaaagttcatcatttttttaggatctagtcttagatactagttttgttgtatttggacacaaaaaaaaaacttcattttacattataatttttatattatcttcaaataaatccttttagcaatgtttttcttttttgtcaaataaatctcaataataattttgttaaattaataaataatattaattatcatataatagtaaagattagaaaacgacaaaaagagtatgaagtaaaattagtagggtaaggtgttgaattttattaaacaaaactattgtaaaggttaaaattaaaatgaatgttgaatgattaggtgaaaaagagataagctgatttttaatgttaaaaagagaaaaacaagtgttgaatttttgaacaattgtacatagccttataacaaaatcgtcaattcatgagatgaaaaatgcccatccttataagcccaatccaaaaatgcttttttataatttttggaccaaaatatgcccaataatataaaaactccaattattaatcaattatgggaaaacaataataaagtatatctccttgttaaagcatcatttttaaatgtattcacacatttaggtatttgtttctcattcctatatattttttgactttccttctcacgtttaaaattgtccaacattcgtcttcttctacatgagcttcatcttctctcactcttgacctcaaattgatctgctttacctacacctcctctgcttgctactaattcaaaatcaagatctgctatttcaaaactcatacaagagacaacaaaactacacatccaaaatttcatcaacatgtttgctattttcatcaaatttttgcttcatttttgctttggttccttatttaccataattattagggtttagctattctaaattaacgagcgtttgtaattagaagagattttatttaataagcaatttagttttcttttgaggatgaaagttgaattgggaaaagcaaggaggaagaagatattatacatggacaaaatcgtcaatccatcagatgaaaaatacccatcattagagcccaatcctatcctttttatagtttttaggcccaaatctgctcattactgcaaaagccctaactattgatcaattatgataaaaaaccgcaataaattgtgtccccttattcaatttattaaaagcatcgtttttaattatactcacatatttaagtatttctctctcattacttttgactatttcaccattcgtcagtttttcttattattaattttgagtttttcttctcacgcctcaaatggtctaatattcgtcttcttctacacgagtttcatcttcgctccattttgacctcaaattgataccgacaactccttcgcttgcttgtaattcaaaaccaagatctgctattacaaaaatcatacaagagacaacaaaacaaccaaactacacatctagaatgacatcaacttgtttgttatttttatcgagtctttgtttaatatttttttggattccttatacaccatcagtattagggtttagttatcataactttttttaaatctttttttatcacaatttttcattaaaattttgattgtttgttaattttttttgttcgtgtttttcatcgtaatttttcgttaaaattaccggttatttttccgtttgtgttttcttattggcaactttttgtaaaaatattgacggttattttcctcggttgtatctcttcactgtaacttttcgttataataatgacgattattttttttggttgagtcttttcatcgtaacttttcgttaaatattaatagttacttttttttgtgtctttttatcgtactttctgttaatattttgacgattatttgttccggttgtgttttttagcgcaactttccattaaaatactgatggttactttttatcgtaactctacattaacattggcggttactttcctcggttatgtctttttctcgtaaattttcttaaaaatatttatggttattttttccggttagttatatatacttttaaataactactaaaattattatatgcatcattttgagtttgatttatttttaaaaattattatataaataaatttataatatttttccccgcgatatgagtccttgttatgataataaaccattgcttatccgtaaatcaggtgaatgtacatatatatatactctaaagtttatatattattaagtgccatagatgaatatacatatatacgtcttctaaaatttgaatatagttgagtattactagacaatttgtcaatttgtaactatattttcatgttatctttttgggattatagataggacggttcataaatgtactttttctttacagtatacataatcaaacaaacatatcaaaaaactgagctaacaaaaaaatgtgtgtatcaaaattatcaagaaagataaattaaactactattaaagattctcacgaaaaggtgatgattatttgatatatacacacggccttcattgaggacagcaatatgaagcaatgatatgtgacttccaatatttttacagcaaaaatattactttaaaagatggttaaagaaacgcagaaattttatgattgttataaatcctcaatttttattgattttgtattttaatcgctaacttttgttaatggagccaaattacttttaaatggctagacaaaatagttattttttttgtcaagacgacacgactaatttgaccaagttaaaaaaaagttagcaattagattgagaaatcaacaaaatttatgaacaacatgaaatacttgtacttttttttttggtcaaacggcttgttttcattcatccaataaaaacaaggttacaagtagttaaggatacaaagataacaaggcttaaagcgaaatagcaacaacagacaaaggttgaagcaaatgctacataaagaaagaaaagatagttcgacaaaggatccatgagagtttggaagccaaagctataaagcgaattggtgcaagtggtaacacggtttgtcgaaaagtcatctacatacggaacgttagacgaaacaatggccacggtcaaaagactaagtgacgttgaaaacgattccatagtcgaggttctcgccggcacgagagcgagctgggtttgctcatcgacaaggagagaggttaaagtgttgttgggcgggtttgaaggtaaggagttaaggaagctttggtaagcaccgctccatggagcaggactcataattccatagttcctcaaacctttgatttcatgaatatcaaccttaaaatcgttgggtaacacatgctcagattcagtattcagcggaaatggagaaaaatgattgaagaaatttcggtaatcatctccacgtagagagaaaatcataatgcctctatgatccaaaatggagaatacttgtactaagcataagcatttgtttattctctacttgcattttttaaatgacctctaaaaaaagcaccaacgattgacattgagtttggcttttggttgtctcttcccttttcacaacctcttacaaaactgacaaaaaaacatatagtggagctagcacaaactttaggcttctctacttgcttctttttaaatgatcctctaatatgttaccaacgattgatcttgataaaagcgacgattgttccctgaataacaaaaccaaaagtaaagattggcagttatttatatatacaaacacagaacacataatgatgatacacgaagaaccatttttcactaaatttgaatcaaagtataccaaacaacattaggaaaccaaacacggttaagatataaagtaagaaaacagcagacctggtcaattgcacaaggaatcaagcaacgaagcttgtccattccagagaacaaattaaatgtgaaaatgagctaggaaaagatggagcttcctgcaaatatatggaatccaatttagaattcaggtacctgctccgcatggagaatgatttttccaatatgatcttcactggaaaagccaaatattgccttagcctagcaagataaaagatataaaaatgaaaacacatgcattagcgacattgtgcaattgaaggagatatatatagagagagcaaagtcaccttattatatcgaatattgtttgaaacctcgctcatattttcttatagaaaccactacacacaaagttaacgttggttgtatatcttccctcttcaaaactttttacataaataatacactcaaaattttataaattatgtggaacttgatgaaatatgatgtttagcgaagagtatattttactattttctagaaaattatattatttactaagagattatatattaattatgttgttgttaagtaataatagaatatttacgttttactggtcttaatgccatttatgaatttgaatgtaagctaatatgatcataattatcggttacattgtaaagaattcattgttataatgacatgcaatttaatgtggttttttttggctaaaaagttcttattggtcttgattctggtcaaacaatatgaactttgtaaatgtaccaattttcttttagagatagttatgtatacttatatttagaaccaataaattaaagaaatttttttgatatgtagataacacatgtcgaatcaatagagcgccacttgtcagtttttttagagcataagtttgaggaaatcttattttattatataataaaatatttttattataactaaaatatattatcctccttgatgacttaacccatctggttttttttttgtagtggcgattgccagatggcttaccggtttccgtcctcgtggacatactgaagctgttattgctattgcatttagtcctagacctggatccccgtaccagcttctctcgtaagaattgttctttttggcatcttatacgctgttttgtgtcagttctattcattggttgatatcatgctatttatgtgtttggaaaagatggtttatttcaactggtaagctccatgagccctttataaaatctttgcagatcgtcagatgatgacacatgtctgatatgggatgctcggggtgtccagcttgctccgcggatataagtccctaagcctcatagtcctattggtgattggctgattgctttatattcctggttgatttatatatcgatttgatctattggaagctataggactgacttcggaatcatattccaggagaaaaccgtggcggttcttctagtaatggtaattttttttgttgtgcattcaatgctaatggatctatctttgtcaatagcagctctgataatcgtgctagagtttactcggtcttgataaatgtttcttgactagattatatatataatgatgattcagttaattagagtagatacttccttggttacaggtttggggtgctagtaagaccaataagaatgatttagaccagctaaatcatgagatggatgttctggctggacatgagaatgttgttaaattacatttcttatcatatatgttatatttggtacctgctcatatttttaaattacatttcttatgagatcctaattttcttaacttagtcattttctgtggttctttctagtgcttgtgctggaagatctggacgaaaatgttccaaattttaagaattcttggtgtgctttctgctgcaattattcgtaaaagtttccttataatgtttttgacactcaataacatatgtatttgtctaggttctcttatgataacatagttacatgctctagtgatggtagtgcaatcatttggatcccaagatcacggagttcgcctgtaacatccgatttcgataagataaccatgacattcaatatgttttcataggagtagaaaccatatctttatttatgtctttcaggtaaaatgctgccaagccttagaagaagatccgagaggttgaaagataaaacaaaagtgagtattttgtaatattgctttgatcttgtggctaaatatgctacttatctgtttttttacgtctttagcaggctaggatcatgacttctttgagtaggcgttgcgaaaagagaaactttgatgagcttgagggagctccaagcagtaaaaacacatgtaatggtgttaatgtagcacatagttgtttgtaattgaaaacagatattgatggcatggcagttgacactttctcggtggtttttaatgggtttacaaatggtgaaagacaatatctagaactaaatgacggtgagtctaacggttctcaggatgtaactagtcgcctgaatgatgtagcagatagctccatgtgggtttcaagggctcctggtggcactgatgaattaaatgatggttttgaagacatcaaatatgatttgacattagactgtcaaaaggattgtgtggttggagcagagatatctctgagatatgattgtgttgggatatcaaatcctcacatcagtgattctctctcaagtggtagtgtgttcctatgtcatggaagcataagaagaaaccaaacagggttgctactgactcaagaactcagttcttgtagtcaggatcagagtagtggcgctaagtcccatgacgttggtccttttgaaatattgaagcctcaacagttaaaagaaaagttatcttggttgacattatcgatacatgaagaggattgtcgttatattctacaaaaggaggatgaagttgcgaatttgcgacaagtaagtgtttgtggtgatcttatttgttgtttcatttagttcaacctttggtatgagtattcttacatgtagctgttactctttatctttcagggacatcaagaatacttaaactttagctccttgaggggaagtagctccttggactttaataaagagtagaaatatgaaggctgtggaaatctgtaaagtgaaaagtctgaaatatgcaactcttcctagttctggagatagctgctgcaaaatgatacttaaagtcattgatccgaactccgaagtgtacagcaaactttcaagcttacattacctgatttagtgacctttccagattttcttgtgaaaagaagccggtatgaaggagcgatacagaggaaatggacttgcagggacaagtgtaaggtttggtggagaaacaaaggcgaagaagatggtcgttggtgggaaggaggaattctagctgtgaaacccaaatcaactcattttcttgatagtccatgggagaggtacaaagttaaatacaagactagcccgaccgagacacatcttcatagtccttgggagctttttgatgctgatactaagtgggagcagcctcatattgataatgagaaatgaaacagtatgctcttagccttaacaaacttacagacttcagaaaaaagaatccaggtatgtgtgtttaggcttatgtttaaatttgcttaggtggtttagaagtagaaaataacataacactatcacaagaacatgacaatatgatataaacttgacagattcgtttgaggattcttatggactccaaaaactgaaccagatcatgggaaactcaagctacaccaataggtaatattctacaagactagaagaggttttgatatggagccgaatttgacatggttttgttctatggattatctacaggttcccagttcctttgtctcttgaggtaataagatcaaggattgagaacaactattaccggagtatggaagcgttaaggcacgatgtatcagttatgctatccaatgcagagactttctttgatctaaacaaatgtgtaggtgtagcagtcaaaatttcagatctttctcaatggttcgaccgcacgttgtcttctttgtagcttatctgcctatgtatagagtacgtgaattagggtcgcttgcgttgttgtatctgaaaggcttcttcgatctaacgagtaagcacatttttcattgatctaatttttgtttgtctcttgtgatgtaatgtaccctaatgtcctaaagttggagctaatttttgtcattttatgtgcatcagtacaatgatgttattacagcattttagtgtatattcgggtatccaagttttaagctatacacgaaaatcaactcttacttgacccacaactacccaactttggcgtggtattagtcgtaataataattttatgggttttggaaagttaagcaccaactattatttttcttttttttttgtagagttttggtcgatgtgagacatcttatcaaagttagtttagggccattgttttcaggtccgatccgtaccgtccggtccgatcggttaacccatgacccggacatttttccggtttagattaagtgctaatatccgataatttagggctaagcgattgtcccacaacctcctgtaaacgctacgtatgccggttgctaacatttaacaacaaacacacaaatttctttatactgttacagattgctagatatcgcttgcaatcgttagattttaaaacttcatttccgccagtgtttgcgacagcaggcggttgcgggtggttcaaatgattttttttttcttttttatctacattagtattttgcatcttttgctatgtattttgagatagtgaagtaatataacttcatttttcaggacttgtagtttttatgaaagaaaaaacaaaaactagaggctgattttaatgatagatcctaaagaaatcaaaccaaatgaaatcaccagaaccttaagatactttaacctattgggtctataaaacggattttattgctttggatctataaagtcacgttgtagacccaaagcaataaaagatttgggatagttaaaccatatgatggttagtgtgtggttttaaaaccttaagatatttgtgtaggagactaggaattgtgtgttttgaaaagaagcagccactaaaatcatatgataagtcaataaaggaagcagctactgaaatttacttgaaaatgatttttcagtaccaaaatcaattaatctcttccatgtctcgtttaatgtatataaagaccgttgagaaaagtcgtatttggatcaccacaagttagtagaaagacttgttagtcagtcaacccatgtgatatatatgagaatgaaaccatgttatcacattacaatttccactttcttgctttttcattgttgatactcaaaaaggtaaaaaaacttaaaagaaagatgaaagactcttggaacacaatcagtcattcttattactcttttctttcccttctttctcacttctaattatggagacgtgttagcagctcctaatagaaacttgtgtcatccagaacaaagagacgcaattctcgagttcaagaacgagtttgagattcaaaagccttgtgtgttgatgggcctcttaagacggagtcgtgggcgaataacagcgattgttgttcttgggatggtatcaaatgcgatgccaagtttggaatgtgatagagctgaaccttagctccagctgcctccatggcctgctcaattccaaaagtaatatctttagccttcaaaaccttcgttttctagacctttcaaataatcatttcagtggtcaaatcttatcttcacttggaaacttttctagtctcaccactcttgacctttctgaaaatcatttcagtggtcaaatcccatcttcactaggaaatcttttgcatctcacatctcttgacctcactgataacaatttcgttggtgacatcccaacttcacttggtaacctttctcatctcacccttcttctccttggtgctaacaaccttgttggtgaaatcccattttcacttggaaatctttctcatctcaccgatcttaccctctgtgaaaacgaccttgctggtgaaatcccatcctcatttgaaaatctttcacatctcaccaatctcgatctctcacaaaacaacctggttggtgaaatcccatctttttttggtagttttaaccagttagttagcttagctgttgaagaaaacgagtttactggaaactttctccttatactactaaatctaacaaatttgtcagatttatcactctcccgcaaccagttcacaggcacgcttcctcctaatatgagctcgctctccaacttggtgttattttacgcagacgccaacgctttcactggaactatcccttcatctctcctcaacattccttctttgagttgttttgacttgagtgataaccaactcaatggaaatattgagtttgggaatatatcttcatcactatcagacttactccttggcaataacaacttcagagggtcaatccacaaatccatttccaaactagtcaacctttacacacttgacctttctcatttcaacacccaaggctcaataaactttagcatcttctcggatctcaagttgctcgtgaatcttcacttatcccatttgaacacaacaactacaattgacttgaatacattcttatcaagtttcaagtcactagatacattggacctctcaggcaatcatatttcagccataaacaagagttcagtttcaaatcctgtaacgaccgcgtcccgcgttcataaagaggccaggttgttttaggagaaaactataccatggtcaagaaacggactaaaatacttcgtcggaagaacgagaaagttcaagctgaaccagctaggtgagctggacaagctaggatgaactagctagctaagctaggtgagctaaaccagctggaagactagctagctcagctaggtgagctgaccgacagctcgattgagctcagtgagctgatcgggtactgacccagctgggtggtccggtcagctgacactcgagctggtggactgtggtagctcacgggtgaagaggtgtctcggccaaaaggtgtaaggtcgagcgggtaccaacgaacggttgcatcgcccaatagatgcaaggaacggatgtgaccttttggaaggatgcaaggaatggatgtgacctttcggaagggtgcaaggaacggatgtgacctttcggaagggtgcaaggaacagatgtgatgcttcgggaagcatccattcgccccctatataagggaggacgcccaaggcctttggaatcatctcacatcatctcacaacatccaaaacaccataaaacattcttaaaagagtcccaacacatcctgaagttgttggtcggaaagggggtgcggctcggcgagtataactcgaccgaactgatgcgcatactacctcccggtccaactgtttgatggagtgtagaggatggatagggtagaccgttcgtcttaaagacgaatcggatctggtagaccgatcgtcggatcggatcggccagaccgatcgtcggacggatcggggcagccagacagatcgtcggacgggtcagatgggacaggccgatcgtctgacggaacgggtcggacagaccgatcgtcggatgggatggatcgagaaaagtgttcgaggaaacacaaggataagtgcatccgaacaaacccaagggtggcccatggatgcaatcttaccggtaaagagagaaagcaccaagaatgggtaaggaacgtgattcaccatataggatcaatatcgcggccgccttcatgtatctatctcctcagccatggtgaaaccgatcggagatcggtaagaccaaaggatgactcgacggataaccaacgggaaagtccacggtgggaaccgatggacaaaacggatgttggacctgcgagcaaacctaaggccgacggaagaaggatttcatgggctagcctacgatgatccggtggatgaatccacggacccttgggtgtgaaaaggatatcgttcggaccgcatggatggatcattaagccaaaagctttatcgaccaccatggaccggacgggtaaacggttggtaaaccgtgggcggtcgtagtgttaaacgaccagatcggaaacatggatggttcgataagccgagggctcaatcgtccaccatgtagccggaggggcgtacgtttggagaacggatggaccaataagccaagagcttgattcggccatcgtgaaccaagggaatcgtacgatccccaatctctatcgttgtacttagaccagtggggttggttggttgtatggctaagtaacgatagggattggttcatcaattcacgatcggatacgagtcattgaacgaatggagtaaggcgacaaacgggctaaggaatcaaattcgcatattggccaaggtatgtaacgatctaacttattagttaaggtagacgtttgggaattgaccgagaaaataggataaaggaatatgcgattgttaggcctagaatggttagcgaacaatatgcatgttttgaccaaggataggatcgatctaagtctaagggacaagacgatgaaactggtacaagagttggttagaattaaaccaaggttagaaagacttccgctgtgtaataagaaagcgattatagaatttagcctcgtaaaggcaattctatggttaatcgcgaaaaattaagaggttaggccgggaagaggcgcaaacttgagtacacggtcgccggacaccgagacgtccgggactgggtctcacaaatcctctattgttatcgcggtttaacttgtccggatgcggtgtcactgagttcccagagttcctaagaacccaacaaacaatggagattttagacatttccaacaacaagattaatggtcaagtacctggctggttatggacgctaccaactttggactacgtgaatctttccaacaacactttcaccggtttccaaagattaatggtaccttcatcctggcaaccatctatgaattatttttctggcgccaacaacaatttcacgggaaatcttccagctttcatatgtgcattgcgctctctagcaatgatttatgtgacaacaaattcaatggttcaatcccacgttgcatgggaaatttcagtagtactcttcaagctctacatctaagaaagaatcatcttagtggagtttttccagagaatatatctgaaagtttaaagtcgcttgacgtcggtcataaccaactagtgggaaagcttccaagatctttggttcgtatctcttctcttgaagttcttaatgtggaaaacaacaaaataaatgatacatttcctttctggttgagttctctagaagagctacaagttcttgtccttcgttcaaatgcattccatggaccgatgcaacaaaccaggtttcctaacttgcgaatcatcgacgtatcccataaccacttcaacggaactttgccatcagatttctttgtaaattggacggtaatgtttttacttggagaaaatgaagatcagtttaatggagagtacatgggtacaagctattacagtgattcaatagttgtgatgaataaaggcctagaaatggagatggtacgtatcctaaaaatctttacatcagtagacttttcgagaaacaaatttgaaggagagattccaaagtccattggtctattaaaagagcttcatgtgctcaacttgtcaagcaatactttcactggccacatcccatcttcaatgggaaaactaagagagctcgaatcactagatgttgctcaaaacaagctttcaggagacattccacaagacctaggggatctctcataccttgcgtacatgaacttctcccataaccagcttgtgggtccattaccagggggcactcagtttctaacacagaattgctcttctttcgaggagaatgcaggacattttggcccttcacttgagaaagtttgtgatatccatgggaaaacaatgcaagagtccgaaatgccaggatcagaagaagatgaagaagaggtgataagttggatagcagctacaattggattcatacctggtattgcctttggattgatgatgggatacatattggtttgctacaaaccagagtggttcatgaacgtttttggcaaaaacaaaagcagaagcacaagcagcacaactcgttaatgaaagaggtactgttcttaatttggaaaaattgaaactataataattttggtggatgtattaatcattctttgtttgtatagtatcttcaacccaagctgaagaatcattgaagaagaagataaaagcaaccacatcagacgatatgtagagattagagaaagaagcgtggaaaaaaagaaatctaattacaaatattatcatggttaaaattttagttgttgtgaatttctgttatatgttctctcctcatatttatttatatatccatgttttcagtaaaaagattagttgatttcacatttactccatgtgaacaacatgatgcatcaaaacaacgtaaaaccaacaaaaatcttcaatccaatcatcatatatctaaatgtttataactgtttggagaacgagatgcttctcactagggtggaaaaagtattatcatgaaaaatattatatttgataatttgatcgttggcatctaaatacaacctgataactggctctgattaatgattggaattgaccaaatatcttcctaaacaaacgatgtcttttcaatccataaatcaagtggagccagcaactactgtatatgttaattctatgcccaatgagttatatttattcagcaccaaccaatattgttaggtgcgtgatcgtaatcaaattaaatattagctttgtagaaacgaacctcaaaatacagtataatttctatcaattaataatgttgggactgcaaaattttattaatttataaaggttttaatctattgataaattaatatttattaaaaaaaatttgtcaactaatatttattaatttatagagagattttcctaatttattaactttttaaaaaaaattataagattttttctttatataagatatctttcaagaatcaattacaagaaaaaataatatcatgattaaaaaacaacaccaaattttttttgatattgtaaaatactaaaactaaatttcaaataagaataaatacaaatttaagcaaaaacatattagaaatatatttcaaagaaatttcttacatataatgtatatatataattgtaatgtatatatataattgtaatatatatatatatatatatatatataattgatatatttatacaattattaatttatgatattgatggaccatatatttacttaggactttcaaaaaaattattatcttattaatttattgatttgtgtcactattttactctagtaccaactcgggattgaaagaatttattattttatagagattattaatttatcgagtatcaatttatagaagttttactgattgcaatttaagttttttggataactttgattaacggaaagattcaattattttattattttaatattctcacacctaattttttttttggtgaagtgagggagacagtgtttaattaaagaaaaaaataacaattacactacaacatgtcgtgagcttgtagctccactagtatcagcagccgagatcgaacacacgcaatctggcaaagaatcaaaataatcaaaacatacggaaagagaaaacgcatagttcgccaaaccgtcagcaagacgattcgcctccctatacacatgaacaatgcggacaatccagtccttcgaaatgaaaccatagcacaagcgtactaggaacgataatgggtgagactcactaacccttgtccgtaaaaacccgacaaccatctccgtgtcaacctccaattccactctcgaagccttcttctcccatgccaaatacaacccataatacattccccaaagctccgcaaaaagggcagaacatattaatcaagccaggacgttcccatcgtcattgaaatgttttacactagatgattacgctcaaggacaattatgagtttactattttactattcccacctaatgttttacactagatgatttggacaattatgatttggtatatgtggcaagtgttgtttatggatatcaatgatttaaataaatttataataaactagactacagcccagactttgtgcgtgcttaaaactattcatgtaaaatattatgtataaaattattatctgggatcgaagatctctttgtataaaacgaaacatatgataaacgttgttatgttctattcagttacaaatattttatgtaagaataaattttcatttttcatttcacctttgaaatatttgagcatgaaaaaagcttacatgtggtggaaaaagttttaatgaaatattatcattttatagcaaatatgtttttttgtgtcttttaataattaaattcagatattttatgattggtgaccataatcctaaattgccctaatatatgattacatgtagactcttgtaaaaagtaatattgtcaactaaataaaactaaaagattgatagtagggtgtcaatctaattaggtaagtttcctataataacgatgcaatcatgtactaagtcaagccaagtctagatgatttgaattatctaacaacctaagtgatcatgcaagaaactaacaaaactatactaagcaggaattaaagaacatgagtgatgaaagtaagaagtaaactacagaccatgaactatcaatgcataaacttgaataataaactaagtagagaaaagaaaagatgctcggccgagcattgaacatgcaggtcgagcaaacacgttgagcaaattaagttgagtagatgaattaaacaaaacgagcaaatgaacaaaagaaaatgagcagatgagtaacaacacgaaattcaatcaatctaagcgaagccgagctcttaagagtggggtagttggttctagtggactcctaaatccatttagctaactaacaaactcaatcaagctattcctagacaatagattcataatcagatcaatacactctcgtgacaatgatcctcataactttaccatctcaattctcattgatgaaacatagcaaagcacgcattaaacaacaatctattaaagtcaataagcagtctaaacatccaatctattgggttagaatctacaaatctcaggaattagttggttcagacatttcatcaaacacattttgggtgtagaaagtctgagatcaatctctagttgatcagaaaggaaatagcactaagaactcctaatccataagggaatcatgcattaaacacttagctagctaaagaaacagaggaatccacctaaacctaactcatcctcaagaactctgaagaacactactcaaaaacaatgaggagcaacatagaacaaaactcagaaaaatcataaaacccaaaaatcattataaacttagtatgcaatagatttaagcaaggtaaacaactttgtagtagaaaaaattattgcaaaaacttaaagattcaataggaaattaaaggaacatatttatgatttttacaaaagaggcaaagaaatctctagaacaaaagaaataaaaaaggaatttccattaggtaaagggaaggggtctatttatagcaaatactaggttgacctaattcgctagaagacaaaatagagaggcggtttggtccaactcaacctaaggtcgagcaggtgcaaatcttcaagatttactttttcttcacttgctcgacatgcacgaccgagcaaaaaggtcgagcttaacacaaatcttccaaaatggcttctaattttctgctgtaactgttacactgttgcggcttttgatgtaccactcaaccttatcccgtgcatagatctcaagcatagcttcatttcttcgtgaggcatctctttagcttgaccaatcgatcacatcttgtgcatagaccccgagctcaacttcttagttccaaaaactcccaaaataggttcaaaagcacttgttttacctaaaaaacactccatatgcagatatgccatgcaatgctatgcaaaacatgaaaagggagaaaaaggtctatgaatgcataaaaagaagcatgaaaccaaactaaatgtatggaaaataagggcttaaaacgtgtaaaatttggtgttatcaaagattgagggagtaatatgggttcatatatgtttcacaatgtcattcctacaatttctacttctttgaggttttaaaatagatatttcatataaagcatcttaaaatttattattttacatgtatattttcttttggtatgaacaacactactaatatagaattaataaactttccaaatttaaccgtcgaaagtttttagaatgctgatatggaataatattattggttatttaaaatcacatttaaacagtttgatagacaaataactccaacttttagggggtgtattcaaattagaatttaaagtgattcgaatttcatgagactttttagaattcatgtttgaataacatagaatttataaattctacacaaatctcttaaaattccactttcaatacaccctccttagatagataaaactctattgttcatatgttatcaatcagagtttaatttcaattgaaaataactatcaagttatccatatatatatcttttgtggaagccaattaacccagtggataggggtttaaaggatttacaccaaatgtttagaattagattaccaaaaagtgcatcttcttgcagattatcggaggttctagaggaaaatttatcggaggttctagaggaatgcatgtagagccgtatgttgtagtcttgtgtgttgcatgaacattaggtctattgatatgttgttttttttggtattttaggtcctttgtctaacctttgttttgagtcatctatcatgtcgtagtccatgtattacgtctttttttgttgcgtcttgagtctttaacaggtcttaggtactagtgaaaagattggatagttttgacctcgtttggcttgaaaaaggatgagaaaagctgaaccgaggagaaagaaggagtcaaggagacggttagactgatcggtccgtgcattgacgaggtgggcagagacggttagaccgatcggtccaccgccagaccgattggtcagtgcttcattgattcggcagagattgttggaccgatcggtccaccacctgaccgattggtccaccagaagaccgatcggttcggcttcacgatgaacggttccggtattccttaaccggatttatcttctattttctgtaattagttataaaaaccccaaaacctaattttatttttacgcttctttttctgcaacatttggagagtatttttgtaagctactacctttgggattagagattcatccttcttgataatttggagaagatttctaacccttatttcttatttattcaatttgaattatgtttgctttcatatctctttacttcatttctattgctatgtgtgaataattctccaattgaattttagggttctaagtagaaagtcaatgaattagtaactaaattgttatacagagttctcaatctttggggtattcattttctgtgtctttaatgctagaataggattgatcacttctttttagaaattaggtttttgtatgcattaaaagtgttcgacagagacctgaatgaatataaattgatcattgtatttctaaccatcgaaagttgacgttagaacacattgcgaactaaataaaccaattcattaatgcgaatttgattaggaaactgcaaacgaaagtttagtagtcgagtagtcaaatttagtggctagtatctcgggagaaagttagtctagaattatgtttatgtttgagaacggttcttcataattgaatttcctgttttgtttattctgctagtttttgtcttttgaaataccctaacacccaatatctccaatccataagtttaattcttttatttattttcattttcatttataattctgaaaaccaaacaaacaacctctttagttttagctcataacgagtttcagaaatttttagagtatcttttgtccttataaatcgatctcaaatatacagtctagcgattaagtgtattgagttaattattcgagcaatcatctatcacttggatgtcatacatgcatgaccattgtctgttgtccgtagtccgttgtccgttgtagaacctaatgttacataaagagttgaattataaaattattgttcgtggaaactgttacataaaattagagttacataaagagtttcaccgtaatttcatacgcaatagaatgttgaaatataataatataactaaatttatatctctgatcataatacattagatgacaataaaggtaagatacaaaaaaggggaacaaacgttaataaaatttatattgagaaaattatcactttccgaaaatatagaagttaaattgaaatatcaataaataagtgggagtacctcaaattaaatgagagtaacaaccaactactcctttcttctatactctaacgcatacacattttttaaaacaatttccgtctctatataaaacactcactccacaactctcttcatcacccatctccttttggaaaccatttactggaactaaaggatatatatggctggtcttatgaagttaggatgcttggtctttgtcttcgtgattgcggccggtccaatcacagcaaaggcggctctgagctgtggcgaagttaacagcaatttgaaaccgtgcactggctacttgaccaatggtggtatcactagcccaggcccacagtgctgcaatggtgttagaaagcttaacggcatggtccttacaaccctagaccgtcggcaagcatgtcgttgcattaaaaatgccgctagaaacgtcggccctggtctcaacgctgaccgtgctgctgggattcctaggagatgcggaatcaaaataccttacagtacccaaatcaggttcaacaccaagtgcaacacgtacatatgttaatctctttctcatctaattatactaaatcaacagtcactttttcaataactgatacattttctgtttgacatgtggcataagtctcaaattctactcttttacttcttctttttcttttacactttacgacaaaacaaaaataaaataaagaaaataaactgttccttttcaaaaattaaaaactgttcttattctccacatccacatgatctctacaatctccaaacactgttttctttcacaccttacacaaaaaaaaaactgttcttttaaataattaaaaactgtttctttgtttttttattattattttgtaatattgatacaaattttttgtttttataacactaatgcatatgtttgatattctcaaaatattttaatatattttataaattaatatttaattaactctgcataacagtggcataattctagtatatatataattaaagaggtttaagaaataaggaaaatttacgtactcatcaaattattttactacagacaaaattttgccaaaaaacaaatttgcaaaaggaagtatatatcgaacccctaactcagaaaattggaaacttgtaataacggtgttatgttgaattgtatgtggctgcagcgtgaggtgatcggcggtcagatgaagctactagcggatatttctaatatagtaatatatatagttagatagtaaaaaagagaggcctagttaccgatccagttaactggacataaatcggaaagtaattggcaaattagttttctcaattttgaataataattttacctaaatattggtttatatattatttgtaagaaatcacatatacatatgtcagtgaaataagatggtcttgtggttgaatttttgaatttaatgggtaactctcagcttcaagtccagaattcgggtttactaggatctgtttttattttattttttaacgattttgttttactgaaaaatttaatgaaatcataggaagtcgaggagtgtaattggagtgtgattgtagtttaaaataaagccatggtacaaacatatcaagaaggacatgggatgagaatcatctatccatgtctagagaaaccccacaaccactttagagtcaattttcagatcaatgtgcacgactctcttctctcaagcaatatatagaccattgtacattctccatagtttccgttaatggtgttgagcatcgagcaatgttaacagcaaaccctccacactaatcgcctctctagctcatcccgcaaaggtccaccgccgttgctaaacaaggattccttcgggaggctccttctttttttatttgtgcaaatatttgttttcattcatcacaatggaataaggttcaaaataaccaaaggtacaaggataataaggttacaaacagaggaaataaaagctaaagcaaaagctacacaaacatagttatagtagttcgacaaaaaatctatgagaacttgaagaccaaagctagttagcaagttggaacaagtgataacatgatttatcgaagaattatccatagacgaaacattaaacgatatatttgtcactgtcattagactaagtgatattgaagagggttccatgaccaaggttttcgtcggtgtgagaagaggctccttccatgtgtaactatatccaaacggtgtttgcactcacggtatatatggtaggtgtgaaaatgtatttggagatagacttttttttggctgcccatttttagtataaattactaacagttataaatctaatgataactttatttaagtaaggattttttttggctgttaacacatacagttaaggtgattaattaagactttagaaatccaaaccgaagttaagaaaatttacataaatagaattatacggataaagtttatcttgtaaatactaaactactcaccctaagattcaaatggcattgaataaaaaaaatgaagaaagtaaattcttaatcgtcacgaattcatccaaatacgttaagaatacaatcctattcgtcggtgcagacaccaaaaatgaagattttattatacgtaaataaaaaaggttttcaatgattggttcaaaaacaaaggaaaaaaaagcaaatcattatcaccataagtgaggattggactattattttctagttacaaaaatgtaaactgctaggatatgacttgcagtatactgcgggttaaatattttaattatttttctttgtcataaaatagaatttgttgtttgtgttgattaataattattgataaggttgtatatgctttttattgagtcataattatgatattagtcagaatttgttgtttgttgtttacataataagtctaatatatgttattttatcttttaggatttgacttgtgatagaccataccacatgataatattttagtttttatttatattttgtttaaataaaattttataattgaaacttttggtgttttcagattttacccgtggaacatatgtaaattagtaacaacacaaataaaattatacatttaaatgtatcaaagaagaataacatttagacatgtcaaataagattaacacttataatataatgttgaattttaatgtatttttgtaactaaaaatttaaaattgaaattgtatttgttatgttattattgtttgttttgttttgtattgtatagttgtaatttgatttaattctaagaatacacccgtggtatcaagatctgccccatctaaactcatagcactatataaactcgtctcatccaaacatgttctactatgtaaacccgtctcatctaaatccatcctgcaatattaatccgtcccctgataactaaaaattaaattgttcttttcttatttttaataatatttttatttaagatatttctagtcaatttacaattttaatctaataagaaaaattgtatactatttatatttagattttatatcgaattttttcaacaaaaaaaaaattattgttaaatattttgtatctttaaaattaatatatgtcctatttgtattttctatcttcaatatatttggttttgatatattttagaaaacctgtttaaataattattaaaatttgaatgccatatatatttatgtgattttttataatttaaagacatatatatatatatatatattgtttagatttgttgttgagatctttttagtgtctatttttgtttaaagatatatatatatatatatatatattgttcagtttaagagcaaatatgtatttcaaaaatgttaagtcgataaaataaaattgttaagtagataaacaaaataaacttatttttgtaacatggtattattattttctcaattataaattttgcaagtattattagattgacaaatagtgtaaataagtgtaatgtatatgtgacacgtagagttctaatgaggattaaaatattacatgaccatcaaggcctagttagctaaatagcccaacatcatacaacataagaatccaatttgaataaagaaaacccacccaaataataattaaaagaagcggagttgtagccaaacctgtcccacaatataaccccgtcccttgaaattaaacataattttatcatttttttataaatttcaaaataaatttaatatcgacccaaactttatcattgaattttgattgttaaaaaattaaagctaaactttataataaaaaaattctatttttgtaaagtttctattttttataataaaaaaaatttataataaatatttaaatatttgtaaagtttctaatttaaaataaataaaaacccaaataaaccggataaccactttaattttggacacttgataaatcaagttttctgcttattcgtaacttgaattattttggttctttttataatatggctctgaaccaatgtccaatttttttaagcgatgtgggatacatattatttcttcatcaattgaataatatatgtccgttttaaattttttgaattacatcatattaagaaaaaatataatattttgttaactatttatattttatataaattcaaaataaattaaatataagatccaataaatttgaaagaaaaatcatatatttatgtttaaattaggtaaagatggtttaggaaattagttaaggtaaataacaaatatggttaatttagagatattatatatattaaaattgttaatcaaattaattttatttttaattatttgtttgatagaaaatggtaataaaaaccaattatggaatatcagattgaagattttcgaatcaaaatcaaataaaaaaatccgatccaattgaatttcttaaaatatacttaaaaaatgttaagtagatttctcataacatgaactgaatgtggataagttgtcaatccaatcatgtgaactccttgttacaggaagcagcagccactgaagtcgacgattttttcaaagaaaagtcaatttatattataaatttcagatgaagagataagatccactttcacatctttggattttgtcgctggcctacctcggttgatattttccaaaatggcaaaatccaaggcaaggacgcctggagtatccccacatgcagtggtgatttgatccactttcatatcgtcggtggtgtaatcttttgacaattttatgctattgatctgcatgttaataaattttcggttctcatattttccatttctttatcttcttaataagcttttatatctaaaacgtttttcaggtttgagtataagagtaggttggacagaactggttatgtcctggaaggtgagttttataatggagaacttgggaaaacttttgaacatgttacatgtgaaaggttttgtccttaattgaactggttatttaaccaagtgattgtttgtttgacagttttttttatttggcgcataaactcgggatcgggcataaatttggcgcagtagttagtaatacaagaaagatgtgcatagtagctttactacaagaatatggagtatcggtagcgttcaaaaaacgctatttaattatactataacgttattagaaacgctctatcatcgtccgtcataaaaggtcagagatatattgtagcgcttttttgttatgctatcattatttcatttattacagcgctttaactgctgcaatatttaattatttaatagcgattagtttttgatataaataactattatacatagcatatttatttgttacatataattagacaatagcatttagttaattgcaatatctataaataatgacatttttaattatgcaatatttctccatttaattccaggtcataaattattttttaatcaaataaatatttattcaaatattatatcataaattcaaaattcgaaaggaaattcatattagatcaaattcaagatccgaaattacatttcaatgtcaaagccaaacatgattttatcggtacttaacaaaaaaaaccacataatgtttacacaaacatgattttatcagtaagccaagccacaatactacctactacatcgacaatggtttgaattttagagtttggtctccacacagcagcatctccaatctttgaaacttctacacataccttgctcgcatttggacttaggggcatatgatggactgtatctgaagggttagaggtacatactcttccttatgctattctttctctcctgttcttgtaatctaacatgatgcatttcttcttggcagatttgatggtgctagcagtactgttacttaagctctacaagaatcaaaaataataccaagcattcaggcgatggtcttttctaggctgtaagttaaagtgcagaaatttaccagtggaggtgatggtcttttatctggtgatgttgtttcatacagtggaggagatgaattcacatattgtatactatgaagtggccatgcaatgttctcatttagtacatctcccataacaaactttcctagacttggtctccacaaatatgcggctttgttaaacaccttttcaaccttaacaattgcagcagaaggaccaagaggcatattgttcacaagttcttttcagtctgttgaacacaatcgaccctcaccaaccacagaatcagccatattccaatcaattatgatgattttaacggttgatgaatctttagcctaaagcatgatgcataaataataagtgattgggtatagtgtttaggttcagctagataattgacaagtgatgggaaaaagacattaccgaagatcctgcagtctgattctcagaaggggaagatacatcactgtctagaatgatcttatcgaaaggccagacaatcttgttccttaaagcttcaccaagtgtgaaaactgatggtgtaggcctccacaaagaagctgtggcgtctaacactgacttcgcaataacagccgcaacattacgtccaagtggaatacgaccaatcttgtacatttgtttagcagagcagaattctccttcacctacaacaacatcatcatctgaacaccaatcaagtagctgacatcgaactcatgcactaacattactagcctcagacttagaaacctcttcaacatgttcctgacaaaaaacaatggaatttgtgacatttaaacattcaattttgcttaatagcacaagtgtattcaattagataatttacctttttggcagctaagccactaactacattttgcaagtcctcaagctttgtcagcaaatcagcttgagtagcttcaagcttctccacatgtgagtctctagctaacatgaatgctaacttagttgcagtgactccgctgcccatacctctaagtcttccaggcttgtctttacctaatacttgactcacagcatcttctttaagatcggtgaatgatgatgagtccatttcactatcaatagatttattttttcctgaaaccagaatgtaatgaaaataagtactagcaaaacaaaaaaaagaaagcaagtgaaatgagtgtcttacaatggtctctgcaaattcaggcttgacaggtctcccatctaagtgtatatgacctgctatccaaaccttgcttcttgtcaccaatatagggttggaactctttttttctacaagtatgatagtgattagttgatggtaaccaatttacacaagcttaattgattaaagagtagacatataccatctcatgggctaggcgaatcattcctttgcggctggtggtgtgtggaatctgtgccttcctcaacatcctgtacttgtcatttatttcctacaaaagtaacttccattaaaacaaatcatcttctaaaatatccaaatgtcaatttaaaaatagttatacaaccttgaaggcagagaggtcttcctgttcttcacccatgcattccaagccgtcacatattgtatgttacttggttttagcgaaagcaaatccgttttgttcttcactgcacgcactttcgttgtgagcttcgacttagaagacctccacacacaacccatctgcttaaaaacagcatccttttgccaatcttctttcaaattgaacctcccctacacattgaaaatacatagttaaacacaagcatgcattgattaaactcagcaaatgagtatgatatacttgaatttcttcccagagtgtgtccctagtctcatcaggtaggtgcctccagtcatgaagcagaacaggtacatgctctctcacaagaggaccaagtgatataagtcaaattaatcctaagaccactctctcaaataaagaggttggttacaacacttagggatcgaattcacaaagttctcgggtcacgcaatagactaatggcatcgaattaaactaagtaaaatagtaaataaaataaaaagaaacagaaagtaagcaatagcagattgtgagttgtgaaaacaagataataaaagcgtcaggcttagggtattctcaggaaatagatgataggagatatagaaatagctaggttgttgtcgaaccgttctcgaactcaaactatgattttagagtaaccagtggtgttccgtgaaactctctatacttaaagctaagataaccggagaagccgagaaatcctatactaaagcatgcattattatcaagtttgataagttcacctagtatctaaaccagagccctcctatgagcctacctgttctttcttaaaggcctaggctcatctatgagggattaaatagcaattacctatggtgggcatacctattatctaagatcaagttctagttagctactctagaactagcaataagaataatcaagatgaagaactctacagataacctagaaagggggcaatctactaaatcatctataaccctaatgagaaaccctaaacctaacaagaaaactactcaagcatgatgaatgaagcaaacaacatgattgaataagaaatcaatgaataaaacaagaagagattaaggtttagaaggatcttctctaaagggagtctccacagggttttgctcccaaagtacaaaagagataaagagaatagcctctccaagcttaggtctaaacaatgacctttaaaactatatatatgacctaaaacacgtgatgggccttctttagacataggagaaagttttgggccgaatttggaaatcttcaaaacatcaataagttgcgtcttcgaattatcgtcaggtattggtgtcgctcgacaccaggggtggtgtcgttcgacacctacgtgcatttttgtctctggattgcttctgtagcttaagttgtctgttttgctccataatgctccattatctccaaatgaatctcaaacatgtaaagacctgaaaaaaaactagaaaagactctagaaataactaaaggactctaaaacctatatctaaatcatagctaaaaccggtaaaaatagggttatatcactaaggaaagatgaaagtgtgactaatccattacctacatgttcacccagagaagtaaattcaacttctagcttctcgtcaggttgctttgctattttacgcatcctagttggtccccgtgtcttccttttcttggtggcggattgatggctttgagtttcttcagtggagtgaatctcagttccctcttcttcagttccagcttcctttgcagccatttcttcttcatttccttcttcttcaggtggttggtggtcttcttcagctggttaaggtggttagacttcttcatcagctgcttgttcagtctcttcctcttctacaaccaagtctgaaccaagaacaatagctatatcctcatgttgatgttgacctatggctgctttctctgccatagttttcctacttttctatgtttctttaatccaacagtagaactcaactatatcccttgcatacgcttactacggcgaggtgggttctcatgttgtaaagtagacattctttacctgaaacacaccaaactgatcaatactatcaaacacaaaaactcatcccatataagatgccaacacataaactcccattaaccaacacgcaaagactcctttacagtcctaataatccattactaagacactttcacagtcattcctaacacagaaactatcatcatcagatgattcattccctaaatcgtcattctcctgaatcgatactaatgcttcaacaaactcctcttctgtctctaactcatgatatcctctcggtgtcgccttcattactacataccaaggtgaagaattgtcttctctagagtagaagacatgttttgcttgggcagctagaatttatggatcctgaagaaaagcagtttggtttaaatggagattgacaagagtgaatatgtcttcttgtttgaatccattccctttgttagccaaatgacacttgaatataggaacttagaacatgtgatagtccaacatgatggtctcctttatcactccaaagtatgacactatatcagcatgctgtctagtatctttggcacttgatttacacattgaaaatgcttcatatgtaaccccactgttttgagttttcctcttcatgtcgtctatatgaaatccgtgtccataatgacaaatcccttgtatgattgagcaatatgccttggtccaaaggccatccatctcagtttggttgaattctcctttgaggttgtaggaatctattagtagagaacaaaaacaaatgtatcataattagagtaacacaatgaatgaaaaatcaactaagttcaaaaatgttcaccttctcctttacccactgtgagaacttttttgcatgtgtcttccataaaaacgtttcatttttcatacatctggcatcagtagcttggagttcttctaaatgcaagttgtgatcagttttacacaatagtttagaatataagttaatgacagtcaaataattaatgacagaaaataatttagaatcacttacttaacatatggatccataacggccatgttcattagaacatatctatgagctatgtctcgctctttactcgtaagagttacttgtgtagctttatgcagtggtctgccttcaagtacaagtgaattactatcaacaccttcattgcggttaacgacttctggaactgataatgagttttgtagaaactttaagcaaaaagccatacattctccagctaaatatccctcagccatacaagcttcaagcgttgcaaaattcttcacataagcctttagagttttcatgtacctgcaagttaataagattagatcaatatccaaattttatataagtaattaacttaatagaaaaagttatagacaatacctttcaaagggatacatccatctaaagtggactggtccacctaagcgagcctctctagccaaatgaattggtagatgaaacatgatgtcaaaaagagatggaggaaactacctctccagctggcacatagtctcaactaattcatactccaatgagattagcttctcagggtcaatgacccgctgacacagcctgttgaagtagtggcctaatctacttatagcgactctaggtctttttggcagcaatcctctcaaagcaacaggtaacaagttctgaaggagcacatgatgatcatgagacttcaaaccaccaatgactggtggatccacagaaacacagttagagatattggcacaatatccatccggccctctaaacctagccagccttttgcagaatctctttttctcatccttagataaccaaaatgccgcatgaagtaagtatgtcctcttccctcttaactgaatgtgcaagttactacgaattcccatatcttccaagtttttgcgtgcattcaagccatcctttgatttagcagattgcatcaacgtagacacaatgacgtcagacacattcttctccacatgcatcacatcaatgttgtgacggacagggaggtcctacaatacaaacaataagtagttagggccaatcaagataaaattcaagataaaattcaaaaggtgaagtatttaccttccaataaggtaattcaaaaagaattgatcgcttcttccatctccattgatgtgtgtcttcaccatattcatcatcttcacataaatctgatctctttcttttgttgtttctctccaagggtcttccaaaatcatttttgaaatcctataatgtttcaaatagttcttctccagtttgaattctactagttttcccttcttctacagtgttgtcaaaccagcctcttctacgcctgtaaggatgccctggtctgagtcgttttctattgcttaaatacacatgttttctattgaacttcaaccacctaaaaggtgtatctttcccacagacattacaagtttgttttcctttcaccttacaaccagccaatgtccctaaagttggatagtcattgatactccacaacaacatagctctaagagtgaaattttccttaaagaatgagtcataaacctgaataccatcactcgacaaatcctttaagtcatttatcaatggagctagatagacatcaatgttattgcttggtgctttaggtccatgtatcaaaagagttaacataatattttttgccttcatacacattgttggagccatgttgtagttaactagcaaaactggccaggtactatacttagtgttctgaatagagaacggattcatcttatcagttgaaagtcccagtctaaggtttcttgattcagcagcaaactgtggccatttatcattcacttgagcccaagctaaagagtctattggatgtcgcattgtaccatcaacactagcattgctaaaatgccactgtaagtcctcaaccattttcttggatctaaacattcgcttgaatctatctttgatggaaaaataccaaagtaccttagctggaatccccttcttctcttcaccagtgtgtttatcccttttccatctggaagcactgcatccaagacaagtatccctcagctcatactcctttttgtataagatgcaatcattcggacatgcgtgaatgatatcatacccaaaaccaaacatcttcaagaattttttgatttcatttgttgaagttggaagcacattctctcctggtaagatgtcgtgcactaaactcaaaagttgatcaaagtaattttctgacatcccactctttactttaatgcggtaaagccccataattgcagacacctttgtgtacttgggacacccataatataatggagtttcaacatccttcaacttctctctaaagtaagattcttcttttgtaactggctccttactatcctcttctccatcaaaataagctgttcttatcagctcataagctccaaattcactactaggctcagcttctaacttatcagcccatatctccccatgcttactccaacatccatttctcttgtatttatgattcattcccttaataactagatgctccaaaacagtatcaattggttgatgacacagattccagcaatccatacatggacaaaacatttcagaaggatctcccaaaagtctcgatgcgtaaacaaaagttgttgctcctttctcgtactcaatgctattccttggcagctatacccaagtcttatccatttttaaaacaccaacaagctccaaccccatatatatgataatatttatatatatattagttaacagagatacaagatcaaagacacaaagagaaatttcaaaaactcaaattcactacaagtgaatgcaagctatcaaagctatatgaaactcaattctataataaactcaaagctacatgcaaactaagaaccacataaataaactcaattcgatacaagtgaatcacataaatagtcaagttcaattcgatacaagtgaatagtcacaaaaatagtcaagttctaatcgatacaagtgaatacaagctatcaaagctgtttgaaactcaattcgatacaaatgaatgctcactatcaaagctatatgaaactcaattcgatacatgagaatagtataagttcaaagctatatgaaactcaaaattggtatatgaaccacataaatcgatctcaaataaacatacatgtcaaaaagaagccattgaaatcttcgagaaacggatagcgaaagccccaattcgaaacccgtaaatctcagaaacccgaaaatcaaaccctaaatgtgattaaaaccccaaatcgaaactcaaacaagacaaatttcacaatgcaaaccctaaatcgattacaaaagaaacataaccttctcaaattagaaccagatctgtgactgagaagctgaagagtaccaacctgaagagtccataaaatttgatgttttgggtttttcacacaaattaaaaaaagtaacttttgtattatttatattattttttttgtaaatttaatatcataagttttacttctctccactctatttgttattattaaaaataataataatattaacttacatcaatttttatggaacaaaaaaaaaaaaaccaaaatatcaaattttatggaacagaaggagtagttaataataatgtcgatcggactatccctgtcttgttttaatgctacaaggacctttggaaaaataaaatgtggtagagatttcagatggctctttgatatggtggaaatttcaaatggctctttaatgtggtggagatttaagatagctctttaacttaatgtgatgaaaaatataatatttggatcattataccaccaaagtccacacacgagttctctatttttgtttcatcctcttttagtcgctggtttggcctcaatgaataatgtagtggagacttttacacaatgcgtacaacgtgaagaagacttggtagaaatactggtttaatttatctctattttgtatataaagacatgaatatgaaaccatgttatcatcacaatctccttttcttgctttttcattattgatattcaagaaactaagaaaaagaagaaaaacaacacttcgaaaaaatgatgaaaggctatattactctttcttttcttatcattctcatttttaatttccttgacgagtttgcggcttctactagacacttgtgtgatcctgatcaaagtgatgcaattctcgaattcaagaacgagtttgagactttggaggaatcttgttttgacagcaatattcctctgaagacggagtcatggacgaataacagtgattgttgttattgggatggtatcaaatgtgatgccaagttcggggatgtgatcgagctagatcttagctttagttgcctccgtggccagctcaattccaatagtagtctttttaggcttccacaacttcgttttctaaccactcttgacctttctaataatgattttattggtcaaatcccatcttcacttgaaaccctctctaatctcaccactctagacctttctagaaatcatttcagtggtagaattccttcttcgattggaaacctttctcatctcatatttgttgacttctctcataacaattttagtggtcaaatcccatcttcacttggatatctttcgcatctcacctcttttaacctttcttataacaattttagtggtagggttccttcttcaattggaaatctctcttatctcaccactttgcgcctctctcgtaatagtttttttggtgaacttccatcttcacttggaagtcttttccatctcaccgatttgatcctcgatactaaccattttgttggtaaaattccgtcttcacttggaaatctttcgcatctcacctctatcgacctccacaaaaataattttgttggcgaaataccattttcacttggaaatctttcttgtctcacctcttttatcctctctgataacaacattgttggtgaaattccatcttcttttggcaatttgaaccagttggacatcttaaatgttaagtccaataagcttagtggcagcttcccaattgcactactaaatctaagaaaactgtcaacattatctctctttaacaatcggttaaccggaacacttccttctaacatgagttcactctccaacttgaagttgtttgacgcaacggaaaaccatttcacgggacctctcccttcttcccttttcaacattccctctttgaaaactattactttggaaaataaccaacttaacggtagtcttgggtttgggaatatatcctcatactcgaatttaactgtgttacgccttgggaataacaactttagagggccaatccatagatctatatccaaattagtcaaccttaaggaacttgacctttcaaactacaacacccaagggttagttgactttaccatcttctcgcatctcaagtctatcgaataccttaacctctcccatttgaacaccactactacgattgacatgtacgagatcttatcaagtttcaagttattggatacactagatctctcaggcagccatgtttctactacaaacaagagttcactttctaattcttcattggtattgataagtcagttgtacttgtcgggatgcggtatcaccgagtttccaaagttcctaagatcccaagagcttatgctgactctagacatttccaacaacaagatcaaaggtcaagtgcctggatggttatggatgctccctgttttgaactacgtgaatctttccaacaacactttcatcggtttcgaaagatcaacgaaacttggactcacctctatccaagaaccaccagctatgaggcaattgttttgctccaacaacaatttcacgggaaacattccatctttcatatgtgagttgccttatctcagcactctcgatttttctaacaacaaattcaatggttcaattcctacttgtatgggaaatattcagtctccatatcttcaagctctaaatcttcgacataatcgtcttagtggacttcttccagagaatatatttgagagtctaatttctcttgacgtcggccataaccaactagtgggaaagcttccaagatcgttaagtcatatctcttcccttggacttctgaatgtggagagcaacaaaatcagtgatacgtttcctttatggttgagttctctacaagagctacaagttcttgtccttcgctccaatgcattttatggaccaatagagaaaacacagttttctaagctgcgaatcattgacatatccggtaatcaattcaatggtacgttgccagcaaatttctttgtcaactggactgcaatgttttcactggacgaaaatgaagatcaatctaacggagagaccatgagcaacatgtacatgagtacagattatttctactttgattcaatggttttgatgaataaaggagtagagatggagctggaacgtgtcctaaaagtcttcacagtgattgacttttcgggaaacaaatttgaaggagagattccaaagtccattggtttattgaaagagcttcatgttcttaacttatcaaacaatgctttaagtggccacatcgcatcatctatggggaacctcatggcacttgagtcactggacgtttcccaaaacaagctttcaggagaaattccacaagagttagggaaactcacgtaccttgcatacatgaacttctctcataaccagctggtaggtctattaccaggaggtactcaatttcaaacacagaagtgctcttctttcgaggacaatcatggcctttatggcccttcgcttgagaaaatttgtgatatccatgggaaaacaccgcaacaatctgacatggcgccagagccagaagaagatgaagaagaggtgataagttggatagcagctgttataggattcatacttggtactgccttgggattgacatttggatgcatattgttttcctacaaaccagattggttcaagaatcctttcgtccgagacaaacgcagaaacataggcaccataactcattagagaggtaatgatcttgattttgaaagaataaagactatatattgtactaaaattttctggatatatgaactaacgtataatctttctttgttattctttgacccaagttggagaattttacacgaagtaaacaaaggaacaaaaccggaagaaacttgggaggaaagcaatctaattttaaataatcattttttctgtctcctcctccccccccattgttatgtctatgtccatttttaaatacaatgtaaaaatgaatagtatcataaaaaaattgttgaatacaatataatttgtacttgtttttttttttttttcgcatgtctacttacaaaaccaaaactgaatttaaaacttcaattaactaatttttataaatatagttgtgaaataaacgggcatactccggattctctgctagtagttctaaaagaaaactaaaaagctagtgtaatcctcctttgaagcctaactatagaagaaaaaaaaagtaaattaaagctaaggaaataggtctagttatacaaatatatatatatatatatatatatatatgtatatatattttaaaaggttgaagatccctaaggaagaaaagaatgaaaatagaaaattgaagagaaattaatccaaaagataatttggttaataagagccatttgagagtgctaagttgaaattttggtaattcttaggatgcttcattattggaagggacaataggcaaacttgatctaggaaggagagaacatgaaaatgtgaccattgtatgcataaattgtaccgcggtcttcagctattttgcataatgtcaagaatactttttcttaagatccaagagccatctttctcacctctagaccactctctatctttgacccaataaatttgtggtttatacatccagtatgatttcacaagaatacctagctaattgaatgacaaggagtttgtatacatggatctctaagttgagtggaaaatgaaattgtggtaaatgtgaataaattggttcttgcattatattactattttgatttcttttttggttataagatcctctttcaaaccttttctcttgggtgttttgtttgtttgaggacaagcaaaagacaagttcttgggaattgatatgatgatattttggtgttcttaaactccttttcttgatagtttttgggtcttaattcattatgatcacttgtaaaaatgcatttaacatgtagtttaaggtaattttgcattcagagtcctagaattcacttggtgtttatttaggtacaaaagaaggcaaatggatctaaagagacaaaaggacgttttggatcacaaaatatttggcttgaatcatattgggtttaaagaattgctagaagatttatgagaagtgccgagcaaagctcaaccatttgaaaaaccacttggattatattttgttcttagggttagtaattaaggaatatatcatcagggttggatttgtggctaggatttgattggaaattaccaaattatgcttttgcactaaaacattttatgtcgtcatctgttccaaactattgaccatattatggataggtgatgtcatattcatctcaagcacctccttaattttgtacttcaacaggtattcaggtaataatgttttgaatgttaaagcatctgagttccccgacttttctacacaactaattcttggtggcatgcgtattattggttgtgtgtttgtttaatgggtgtggttattaaactactttttattccaatccttataaaaaagaacgatacctcgtttttaaaatctataaccctacccattctttcagaaacaaggtattgttgttcacctccttttatttcagccaatcaaaatatgttatctaataaataaataaagaaatttaaactctaaccattcttttttaaactcaagtcgatatatattcttgtttaattataaaatctaaaccctaattctcctttgtaaacccaaactaacatttaacctcgtttaattgtaaaatctaactaaccgtttttttaaacacaaaacgatttaacctcgtttaattataaaatctaaacttgtttataaactcaaaccgatatttaacctcgtttaattacaaaatctaaactctaattcttttttgtaaattcaagcttacatttaactttgtttattgtaaactctaaaccctaaccgtccttctaaaccctaaccgttcttctaaacctaaatcaatatttaacctcgttttattgttaaatttaaatttgtttataaacccaaaccgacatttagtcctgtttaattgtaaaatctaaattcgtttataaattcaaaccgatatttaactcctttcttataaataattttgttttggtggcatattaggttttataaataaatgtttttttaattagcaggcagattctaatcaaactcaaacccaagtatttttctaacaaaatctacccagtcccctaattataaaatttgaaaagtacccactcactaaaaaatccccaaacgttattccataatttaataatgttacaatcacgataatttatctccagaatttagtaaatcacactaaaataaatccccaaataaatatctctataatttaatattccatctgtttctaattatatgtagtttaaagggtttttttccgatataagtgttgttttcacttttccatgcaaatattaaatgtatttaatagtttttaaccaattatattttagatcatatttttttattggttggattagttgtaattaatgatgttttataagaaatagatgaattaaataagatttgtatatttttttaatttgtgtgcaaaaagcttaaattataaatatttagaaacatatcgaatatgttaagagattttaaaaggatttgtagcactactttggtgggaaatttttagtttaccgaatacttaattcataaaagtctgactctaaataattagtattgaatattagtgaagttctgttggctatatactatatgtgcttcattattctaatcgcattaaaaccgatcaacgtcaaactaactgtggtaggagattttaaattctttcgataaatgattttgaaagctgtgccgtgtcaagaagactccattttttcaggatagcactcgggagacttaaacctatatttgaagtttttaatacgatagctaaaccttgtactatgattttgtaatcttttttcctcagacgtctttatcaacataaatgcgcactactggcatcaaataaagtaaattgtttctttttatgcgtaagtaatttttttcctatgtctgataagaaaaagatctcaatgcctgaaaatgggcaaaacatctttataatgttatttgtactttatatttcaaaatggtaagaaattataataaaagtataaaatcttggtttcgattcacatagtacaattctcttaccggcattaattggttatttgttgaaagttcttctttttggtaaaattatttgttaaaagtttgaagtgtatataatgttgaatgagttgaattcttcatttattttgaactttttgttgtgtctattttgatcatctttcctggactacggtagaaaataaaattagttagttttatgtatttgaactacaaaagatattaaaatgtagagtcttacgaaataatggattgcaattgatttattattacccattttgaagtttttttttacagtattagttgatcacatatgtgtgagtctaattggtaaccaaaacctttacaagttttttatctgttagttttatcggaatagtgcaaaaaaactgtacaaaaaagccaaaaataaaactttttataacgttttttataaaaagtttgtgattgttaactgtcaaatttctacaaattacaaaactgtacagtattttaatggttaccattcaaacctattatattttagaatataccacgaaggttattgtttgtgctctatggccatcgagatctacccagagcccaactatcttaaccgactattttggaacgcaataaaagatgttggatctatcatctacttgagtctctaggtccattgaataatttatcttttacgcaaccataatttattgcactgttgaatttatcatttttcttgtatgtctgataatatgttgaactagttttgtgaaacttaagtaaaaagtgtattttagaattgaatgtagcggtttattataatggtgtttttcattagttacatttcactagtttagtcttgtctatgaacaattcgtaaaccacattttgtgaattaatgaaactgaaacatatttttaatttgctctaaaatgttattggagctcaactaaaaaattggttcgataaaacacctcatttttatttaatataatccagtaataattttcttatcaaatttatttaattaatcttagaattaaatagaatatatgtgctacataataaaaattattagtaatatttattatgattaaaatacgtctgatatttataattttatagttttttaaaggaaacaataatttctgactttttattgtgtgttccttaataaatgaaaatatgggtatgatacacaaaacaatataaaaacgagaatatgggtacaaatggttagaggaatataagaagctgagttaaagattcatctgaaagttcaccatatacaaatatacaataaaagttgtggtcaaaagttcaattttgtgtgtttctaacaaaggataaaaacccaccctacaatgccacatgattaaaaactaacactaattacatccgatatgaaatttgtaagattaaacccaagaatggtagttttttttttttcctaaacgtaaaaggctaagttaccttgtaatggcatgtttacgatatttgaagcacatagttagaagtatacggacagcagtaaaatgaggtagttgattgattcgtcactcctatttattactcatgaatgtgggtagatactccataaatatagcattatctaaacacactgtttctttggtaaataattcaaagaaccacgacaaaaaataggtgcggcttcattttaattttttttttttttttggggtactgaaaatatctaaataatgagaatttgtcaacgtttatgtcccctagaggaaagaataattttcagaacccaaaagcaaagtacttaatttctgatttctcttgagtacttgagtactataatattcatagaacaagaaaacctaagcccacaaagtatatgtagttaagtgtttgaattcaagtttcaagtgtaataagtaccgatgattaatatccttttctcggatttaagaatttgttaggatatttttcttcacttctgaaaaaacaattaaaatatactaaaagataaaatatcttggcaattattatacaacgcggagaaagaataattaatacgtttggttatcactctcttgattcactctatatatgtaaaccgagccagctagaacgaagtgtcacggacacaacttaaaatagaaccaaagagtaaacacttaagcaaaacaattttgtcctactcttaggttatctccaatgaagaacttaaagatggttttcttcaagatcctctttatctctttaatggcaggattagccatgaaaggatctaagatcaacgtagaagatctccaaaagttctccctccaccatacacagaacaacctccaaaccataagccttctattgtttcttgtcgtttttgtgtggatcctctacatgttaacccgacctaaacccgtttaccttgttgatttctcctgctaccttccaccgtcgcatctcaaggtcagtatccaaaccctaatgggacacgcaagacgtgcaagagaagcaggcatgtgttggaagaacaaagagagcgaccatttagttgacttccaggagaagattcttgaacgttccggtcttggtcaagaaacctacatccccgagggtcttcagtgcttcccacttcagcaaggcatgggtgcttcacgtaaagagacggaagaagtaatcttcggagctcttgacaatctttttcgcaacaccggtgtaaaacctgatgatatcggtatattggtggtgaattctagcacgtttaatccaactccatcactcgcctccatgattgtgaacaagtacaaactcagagacaacatcaagagtttgaatcttggagggatgggttgcagtgccggagttatagctgttgatgtcgctaagggattactacaagttcataggaacacttatgctattgtagtaagcacagagaacatcactcagaacttatacttggggaaaaacaaatcaatgctagtcacaaactgtttgttccgcgttggtggtgctgcggttctgctttcaaacagatctagagaccgtaaccgcgccaaatacgagcttgttcacaccgtacggatccataccggatcagatgataggtcgttcgaatgtgcgacacaagaagaggatgaagatggtataattggagttaccttgacaaagaatctacctatggtggctgcaaggactcttaagataaatatcgcaactttgggtcctcttgtacttccattaaaagagaagctagccttctttattacttttgtcaagaagaagtatttcaagccagagttaaggaattatacaccagatttcaagcttgcctttgagcatttctgtatccacgctggtggaagagctctaatagatgagctggagaagaaccttaagctttctccgttacacgtagaggcgtcaagaatgacactacacaggtttggtaacacttcttctagctcaatctggtacgagttagcttatacagaagctaaaggaaggatgaaggaaggagataggatttggcagattgctttggggtcaggttttaagtgtaacagttcagtatgggtggctctgcgagacgttaagccttcagctaacagtccatgggaagactgtatggatagatatccggttgagattgatatttaattttatggttaaagagtccaatctatcttatcttatttattttcgttgacattttatcctatgtttgttttaaagagtttgcattgaatattatttgtggtctatttggtaactttgttttggtacttgcttaagtaagaagtgatgggtgatactgattttctttacatactagtcatttcaagagaacagagacttggtcaccgtatgttttttgctctaaccggaatcaatggataaatttagtttagtcatgggtagccacaaattttgtcaatggtgatatgtggccaaactggttgagaagcggtgacggattatatcgattgatgtaacactaatatagctccaacaagtaatattatggttgagattgttatccgctgagattgatatttaatttttatgtaatctcttagaccatctccaacgtctcaccatataaaaatcttttaaaaaccataaaataatatattttaattttataattattttataattttttaatatagtctgactactaataaaagtacacgtatttattctttcgtgagattgtcccttatataaaggattttaaagtctttctctcctaaaacttttactttttagttatttttctttttcttttttattgtgagggactctgttaagggatcaccgttggtggtgctcttatggctaatagtttaggttgagaccgatatttaattttatggttaatcctttacgcatactagtctaacctatcttatcttgtttcattttttgacatatcatatgttttccctttttcttatgaacaatttaatcttatgtttgttctttaaagagtttgcattgaatgtgtattgctatctttggtagctttgtttgggtacttctttaagtaagacttgatgcattatactgacttttctttataataaccgtctcttcaagaaaacagaaaattggtttttgctctaacctgaaatatgtggctatatttagtttagtcatagatggccacaaattttagcaatggtaatatatggtcaaactggttgcaaagcggtcacggattatatccatagatgtaacactgatatagctagcagtcaagatggaagcaaaactgacaagtgattattgtggacaatcgtttctattttattttttctcttttttctcctacggcaaaaaagtagatctagagttttttttttcttttttttaccgccgttgatcttcattgatgaatttgggcattcttgacatttaaaaagttttccgccgttaatctagagtttcctcttggtctgcagtagtgcggttttgtcaccgatatagtcgttgctgatcaggttttaacggaggtgaaggtttaaagccgtgttacgcggttgaagacgtcgtgaagtgcttcgagttcagagagttaggtgagccacaatgatctgatagacttaaaactattctaccaattcttatacattgtgttgttaacgggttaccaataataacgttgctacagaaaaacaaatgaacaaaatattatgttagattttaagttatgtaaaaaatttttagaagatttaaaaagaagataaatttttaattttctacgcaaaatgtccactaattgttgaaaacatgttgtggccaaatatggaaagatgaaaaacaattgagattttttagaatctaaggtatttgaaatcaatttgatagatatttggttacatgagaactttggtgacagttactcacatttcttaactgaaccactagtgggctttcaaatgatgtcatgaacttcacattctttgtttgaaatttatgaggtaaacaacatgtgtttccgtagaaagtttcatatagcattacaactatatacagaattcggacctctattccacttcatatgaaatagaagttaaagtccagtttctccttaaatcgtaagtttaaatccttgattttcagaaattcgaaatttgtattttattttcatctttccatttttacaattctatttatttatttctgtttccaaaaaaaattaattccatttattttctatatataaagcttacatgaaaataattttaataagaccaaatattttatcaaaataataaatattttgttacgataaaaatattactaaaatgtgtgacgatttttaaatggttacaatacaatcgtaacaacttttttctgtccctaaagcatcacatatattgcgaaaacaaatcgagtagcgatttcgtcactattacatagtgaaattatcatctctaaaccgtgacagataccaagtctcaagttcgttactaattacgacgaaactatagtttcaaaacttcatagttaatgacttataactatcacttatccggcacaattactaactaaaaaactgtcgttgaaccatcatcttttttgctccactacaataattatttttgtcttaaactgtcacaaatgaatattagaaattatggagctattataaatttaggcacattttgggccaaaaattataaaaaggacacatttcaattgggcttataagcctaagcatttttggcctgttaaaagtctattttaccctaaatttaactcttcatcgttttcttctcttcctcttcatttcttccttttcttcttcatattcccagaaaattttagttttgttcttgagaaaatttattttgattacaaacactaaaacctaaggaatgatactaaaaacggaacccaaacaaaataattaaacgaaccgtttgagatataataaacggatgaaccaattacgaaataaaaatttgagatcttatcattgtcttcttcgagctcgtttatcatgagacgtgagtcatgaccatcacttctcaccgccacccataattgctgttatcggagcttatatattgttgttgttctgttgttgtaaatggagatcttgtccgatgtttttcatttcgttaaaaaaatgaattattcgattcaatcaaataaacaatttcagattgattaaaaaaaaaaaaatcaaagaaacaatctcatcaattggaagaacctcaaatcatatctaatcggttacagaaaaaactctaaactcaaatttaatttttaattaatttgaaaagggcaaaatcgtcaataaaggtagtagaagtacccattcacgtaagacatgtataaaatgcttaatcatacaatacccttcactttattgtactattttcataattgatcctagaatttatggctaactagtcaaaagtatcaactaaaactattggggtctcaaaaccgtcatattttgtgactataataacgtcttaatttcaaaccgtcacaaacgataaccaaaaggtagtctcatattcgtaaaaaaaatagcaattttttttttcttgatacccttgtgttttgttactaagacagacctataatgttgaaattgtcatagctaatgacaaagaaaacctcatctccatccgatttgacagctatgtagagagtacaaggccaagtatggtcaatgattataaagtaggatcaattacgagatcttgcctttttttctatgtgctttgtccaaataggtacttttcaatgtgctactacaattaggcatttctctcctagttgcattgacgtttttatcccaatctccagttctccaattcacccgaattacgagattggtgtctgcaattcaccaaccccagttctttcgtctctacaattcaccctaatcgtaaactaatcacaacatgacgtagacaccatccaacatttgtttttgaattacttttcgattattagacatcgatctatcaaatccccatttccgccgttaatgcctttcatcttccgtttctgctattcaaaaatcagtgacaccgccttcagctctttcctcgactcataaaccggtgacaagtctcagtccgaaatcaaaaaatccacctactaatatatgtcgatcaaatctaaaattgatttcatttgtgttttgaaatttttgcgttccctaaacatcatcttcttagggtataatttttttttatatatatacgtatttaattggatatgttgagtaaataggtcagaagaagatctatgaaccatctggaaaaaaaagaaaaaaaaaagaaacagatcgatgtagaagaagaagctgaatcaagggtaaaatcgtctagtgataaaaaagtgctcatttacataagtccacatgaaaatgtccattttcaaatatttgaggtaggtagtacctatttttataaaaaaacctcttataaagcagtatgaaataataatcttaatgaataatttggtcttcaaaattaaatcgaacgtttattaaaaaaaagaagccttttgtagttctctatttgtatattggtatcgtgttgtaagtttcaattggaaaagccgggaagtcatatacattactataaaggttattgacaatatatgtgattttttttttttgttaagcaaataaacgaagtagccatatgattctgatttaaaaacagggcatttcgaaattttaaaataaccggggtctgggtcaataaactaggggcttttatgaatataggtatattttggatcaaaaatttgaaaaaagcatattcacttgggcttataagtttgtccttggatttgttgttggctaatgaaatgataattttgtccttggatttgttgttgataatttcacttcattttttccgctgcgtcacagatttcacgatcatgaaacctcgcttctcaccatcaactcttgcctttttcaacgtcgactcaatattccatcaacatcatcattttcaacttcatcaataccgtttctctcgtctttttagacttaaaaaatgttgcttcccctaacctcttccgattaacccaattgctcaaatttaacgagacttttgatggaaggaatctaaaccctaaggggatagtatttagggaacccaaaacatctaattttagacatggatcgaatcaattaaactccaattaatcaatatttgtaaaccaaattcgatcagtgttgtcaaagatgaacgattatagcgtcgttctctggacgaatatgatcacaagtgttcttattcattgctttgtgtgtctttaaaattctacaaaagagggttttgggattgagcttatatccaaaatgggcattttaagaaagtttctttcaaaagaggtatcttctacagtagaattcaacagtagcaacttattgactcgattctgacaattttgactttggtgtcaaagcgtgaaatatatattatatctaaaacttctcaattatcagtatggaaatggtacacagtctaaacattagtaaaaactatatactagtttgggatttagaaacccaaacaattcaatttacagtatgtaaatgttagataggtgagatgagaaaatttgtgaacaaagagaattgcagtttcagtggagaagaggacgccagtaaatcacgaaattctgattgtggattccgacatccacaatttggcgctagaaggaggggaattaagtcttttacttcagaacaacgatcaaaatcaccatgagtagcaacgacggtcagagttccggcgaccaagcctccaccctcgacgacatcaagcagctgcttcaacagttgtccgagaagactgaccgacaacagcttgctgtgacgtctctctccaacaagttcgtgaccttccaagagcaatgcaacggccaacacgcagcattggcgactaatcattctgaaatcagatcggctcacaacgcgtacgcggagctcgaacgcgactcaattttcagggcaccgtcagcccgagcgtccaaaattcccaggaagcatctggccagcagactccaccgccaccggttgaagtcggagcgacatcgactcagaatcctgtcacctcgtcttcaccagcacgacttgccgcagtttcagatagggcgatagctcggacgccagttccacttgatcaaacgcagtcaattcggaacttcaaaaccttcaagatcaaatctgggccatgaacgcaaaagtccatcaggccactacttcggctcccgaagtggagaaggttattgaggcaacgaggagaacacctttcaccccaaggatctctaagttgcgtatccgtgaattccgagacttcaaacttccggtttacaatggaaaaggagatctgaaagagcatttgacttccttccaagtcatcgccggacgggtccccctagagccgcacgaagaggatgccgggctttgcaaattgttctcggaaaatttgttcgggcttgctctcacctggtttacccaactggaagagggctcgatcgacaattttaagcaactctctactgcgttcatcaagcagtacgaatacttcatcaatagtgacatcactgaagcccatctttggaatttttctcaatccgctgacgaaccacttcggacgtatatttaccgcgttcaaggaaatcatggttcaaatacccagcttatctgacttagcagctcagtccgcactcaaaaatggtctttggcatgagtcacgattccgtgaatctttaacagtaaaccgtcctgagacgattcaagatgctcttcatcgagcaacgaattggataaatgcagaagaagaacgggcttttctagccaaaaagttcagtgcttcaaatgctgcaccaaaggcgcctcagcccgcaaccaccaaaaaacctaccgaactccgaaaacccgcagcaggaacctgcacgacgatgctctggtgataactcttgacattgcgaactgcgaaatataaagaattcttattgatactggaagctcagtcgatttaatttttctcgatactctgctgcgaatgggaatctccaaaaaggatataaaaggagctccgagtctactcgtatctttcaccagcgaaacttcaatgtctcttggcacggtggttcttcctgtaactgcgcaaggagttgtcaagatggtcgagttcacagttttcgaccgacctgccgcatacaacgtaattctcggaactccttggttatacgagatgaaagttgtaccgtcgacttaccaccagtgtgtcaagtttccaaccccaggtggaattgaacaagtcctgggaagtcaacgtacctctagaatgtgctacatgaccgggcataaactcaagatcaaatagcaaccacagctcgaagcgtccccaaatccaatcaaaaaagtaggcgacaacctcgtagagcgggtagttataaacgacgatcacccagatcagcttcttggctttggagcgaatttgggcgaagatttccaaagtaaattagtcaattttctcaaaacaaataaagcaacgttcgcttggacagttgggaaaatgactggaatcagtacggaggtgatctcgcacgagctaaatgtcgatccaaccttcaaaccggtaaaacaaaagcgccggaagcttggtccagatcgagcacaggcagtgaatatcgaagtcgttaggctcctcgaagtcggtcggatccgcgaagtcaaatatcctgaatggctcgctaatcctgtggtcgtgaagaaaaagaatggcaaatggcgtgtttgtgttgactttaccgacctcaacaaagcatgttcaaaagatttttttccacttcctcacattgaccgccttgtcgaatccacaacggggcacgagatgctgtcttttatggacgccttttcgggatataatcaaatcctgatgaacccggaggatcaggagaaaacatccttcattacggaatgtggaacgtactactacaaagtgatgcccttcggactaaagaacgcgggtgcaacctaccaacgtttggtcaacagaatgtttaaggatcttctcggcaaaactatggaagtatacatcgatgacatgctagtgaagtcaaccttatctacctcgcacttcgaccatttacagcaatgtttcgacattttgaatgagttcgagatgaagttgaatccttcaaagtgtactttcgctgtcaccgaacgcggaatcgaagcgaattcgaggcagataaacgctttcctgttaatgacctaacctcgcagtataagggaagtccaacgattgacatgtcgagtggcagcactgaacagattcatatcccgatctaccgacaagtgtttccctttctacactttactgcgaaaagtaagcaaggggtttatctggaacgaaagctgcgaggaagcattcaagcagttaaagcgttacttgtccgaaccttcggtcctcgcaaaacgtgagttcggggaacagctttttctgtacatcgctgtttcagagagtgcggtaaccggcgttcaagtaagagtagagcgaagtgacaagcgtcccatcttctatgttagtaagtctttctccgacgcagagaccagatatcccatgatggagaagctcgctttagccgttgtcacggcagctcggaaacttcgaccgtatttccagtcacatccgatcgtcgttttaacatctttacctcttcgcaccatccttcatagtccaactcaatccggacgattaggaaaatgggccatcgaactgagcgaattcgatcttgagttccgagctcgaacaagtttaaactcaaccatggatacttcacgtcaatggggcttcatcaaaacatgggtccggagtaggaatttgtctgacgctcccaccggtgaggtgctggagcagtccttccgcctagcattcaacgcctctaataatgaagcggagtacgaatcactacttgttggattacgactcgccgtcggggtaggagtcagaaacctgcatgcacattatgactcgcagcaaatcgatactctggcgagtatgaagcaaaagatgcgtgtatggaagcatacctgaatttagtacgtgaggtgtcaggaagattcgagcagttcgagttaaccaggatccctcgagctgaaaattcggctgctaacgcattggctgccttggcatctactttcgaagtaaccttacctcgcgtaattcccgtcgagacaataagccaaccgagcattcgtcttgatgaaataagtttcgttaccacccgtgccatgcgaagaaggctagatgctcagtcagcagagaatggtcttcatcagctcggggatgatgaggaaatttcggacgcagttcaccccacggagatcgtggaaaatcaaagtcttccagataatcataatgcgccactccctgatcaaccacctcatgattggggggcagactggagagaaccaattcgggattacattctcaacggtacgcttcctgccgagaagtgggcagctcgaaagttgaaagccacttgtgcacgtttctgcatagcaaacgatattctctatagacgaatcttctcagctcccgacgctgtgtgtatcttcggcgaacagacccgaactgtgatgaaggaggttcacgacggcacatgcggaaatcacaccggaggtcgctctttagcctttaaagtgaggaagtatggttactactggccaaccctggtagcggactgtgaagcatatgcccgtaaatgcgaacaatgtcaaaagcatgcaccactcatccttcaacccgcagaactcctcaccacagtttcagctccctatccgtttatgaaatggttaatggacattgttggacctctacacgtgtccactcgaggagtacgcttcctactcgtgctgacagattatttctcaaaataggttgaggccgcagcttactccaacataactcacgtccaagtttggaacttcatctggaaagacataatttgtaggcacggcctgccttatgaaattgtcaccgacaacggatctcagttcatctccgagcaattcgaggtattttgtgaagagtggcagatccgtcttagccattctacacctcgctatccgcaaggaaatgggcaagccgaagcaatgaacaagacaatcatctcaaaccttaaaaagaaattaaacgcttacaaaggcgcgtggtttggagaattgcaaaatgttctttgggcagttcgcacaactccaagaagagcaaccgatgaaactcctttctctttgatctatggaatggaggcagtcattcctgctgaaatcaaggtcccaagtgcgaggagaatccgcaatcctcagaacgaaactgaaaataacgaaatgataattgatgtcatcgacactattgatgagcggcgtaatcgagccctagctcggatgcaaaactaccataatgctggagcacgatattacaactcaaatgttcgtaatagatctttcgaagtaggaaccctagtcttacgtcgggtccagcagaacaaagcagaaaagggagcaggcaaattagggataagttgggaaggcccctacaaaatcacacatgttgtccgcaatggagtctaccgcctgattaacatggaaggaaaaacagttcgcagggcgtggaattcaatgcatctaaaacgtttttacatttaaagcatttttcttatgtaaatcgaactacgtctgacttgatccccacctttgggtacgtaggcagcccgcacttcgggtccagtctctataatcaataaaaccaaacattttcatacttaaagtcgtatttggttttcacatctgaaactgcttcaggcggattactaaacatccgaacctatgcttcagagatatccgaattaagctaataacttaagttcgcggtcataagtgatatccgtactaaactataagccgagctcagcttgcaaacgaatgtcatctttttcttgtcaaatttctacgcgatataagccgagttaaactcgcacttccatagacaaatttggcaaagagaaaagttttcaaaaaagtttgtacgaccaaagtcaagtacttcaaaaaataatggcctctgtggccaacgaaaattaaaagcatttaagtcttaaaaacaaatgggtagcaacttcgggccataacaaccccaaaagacgataatgttttaaatttttactccgtcttgccggagtccttctcgacgtcaaccgggaacatggccgctatccctgcttcggaggtggagcccttgttagagcctccctcgtcgataatcgccacctcggcaggaggaatactctccgcagctacctccgatggcgtgtcggcgaggagcgaagtgagttcagtcgggtcgggacgaggagtcttcggctccgcagcatgtctagcgaacttctcctcatcagcccggactgattcaagctcctttgaaagatcaggaatttctcccttctcaatttcctcaagcaactctctgttcgctttggcctccgcaacccgaactttgagggtctcgacctcttccgattctttgaagaaattcccgtacttcgaagagaagtcatggaattgagcccgcactttcctcctttcgtccgtcctcgctgcgacaatcatttcggcttgctcctcttccattttcttcatcttctctttgcaagttctgaggtcggctcgagcttgagtctctttctcgattgcgtcgagataggcattcttcccggccttgagcttcgcggtcagatcgatattgttcacttcaagcttttggacctgcagttcggctgctttcatccggttcatgactttattggctttctccacggccttggcattttcatcttcacttcgcttgaaactctcaatttcaacatccttgtcaaagagttggtcctcgtgactgcagaaaacggagttgaactctaggattaactgcataataaaaagttgttattcaactaggtcatccatggacataacaaatatggattcagttcgggccttaccttgccaagttttctggcaaagcgaagatagttttccttgttgacttctttcatctcgtcaaaaggagctatggcagaaccaggcggaacgagagtcctcattgtatccgcaaaagtcattggaggagctaaatcattttgaagtcagatcgaaagacaatattcaaaagttgaaataattgatgagttcgttacctggaagagggacgttgcgacgttccgattcgcaggtttcagattcccgagaagacagaaccaccaggttctgaggggcttccttcacaatccccttcaacttcgctcccttttcctcatggcgagggcgggaagagcgaggtggggaggggttagtctcttcgggttgcttccttttcttatcagcagcccgcttctcggagtcttttccagcggggtccttaatagtctttccagagcccgaagtgggggtttcaggttttttcccagctgacaccgaagccttgttggtcgtctggcgggacctcgacccagagtcagattgttggtatttcgatttctctagagaacgaagtttgctgtcctcaagggtccccgccatcacagttttgtcggatttaatccgcgccttttcctgctcggctctctctctctctcaagtttcttttctgcgcggtacgaagggagagacatgtcggctttgtcgattattcgtggacagaaaggaggcgaagatacggcaaggtcagttcgggatctgattctccgacctgaagctcgaattctatctatggtcaaggactcccaacctagatcttggcaacagaaattcgagaagtgagcagcgaaagtatgtgaaacgggaggcatgctgactttaaatgaaaacaaaaacataaaagaagatggtcagttcaggtgccacgaagtgtttgcattcagaaattacaactaaattaagttgtgttttcctaaagcgaattcactatctaccggtgcgagctgcccattcagatacaaataagccagtcttgtttccataagtaagatcattcactggaaagaagaagtatgattttctccattgttcatctttatctgggaagtcatcgaaaactcggaaacctttccgaggtgacaagaaaaatgttccctttgttcgccctttcttaactgcgtatagctgaaggagatcgttcagtgatagagaaaatctgtcttcttcagctagagtaatgaggcataagacagttcgaataacattcgggcacaactagggaagtgcgattccaacgcatagcgaaaataaaatttcgaacgcacacggatgccctgggggaggattctcaggacagaccgtcggttcgggagaaataagtggaatctggtgaggaatttggtgggctcctctcagcagcaagagtctgctcgaagtcgagagcgaagtcttgtatttttcgaacttaccatctattagaaacacttcgcgaactactttcctcggaggcatgacaaacaccgcgaagtaatttgcaagaaaaaagtcatatctgagggccgtttttcgtttattttctgaaaagctctcttaagcagctgaagaacacttgaagatcttcttcaagaacccaggagcagagaaaggtccgcgctgtatttaatcgatcggcgaaccggtgagacggtgaatctaagaatttgacgacggaatttgaccggaaagaggtgtagaacggcggtgacgttgagttttcttcgaatttctaaacttaaaatctaagaaatcgataaagaatctactccaaatactaccggcctaaacctactgcgattctaggtctaagattccggctatctattgattcaggtgaaattcggaacaaagactgaacgaaaacgaattatggaaaggaggagtcggggttgttacctgaggcgaggaatgagtctggtagcttataagaggtcagtcagaaggtgaagggttcgtcggtttatatagaggattgaatgggcgggaaatccaaaaccctaggattacgaagcgtcacactctttcaaaggaaatcctcgaaaatcacgcgattcagtttccttttttacctcgggagattcttgttatcccgaaatggcgttctgagatctccgagaatggcgccacgagttgaacttaagtccccgaagtgttcacttcgaggacttggggggcaaattgtggatgttggatttcgtatccggcccaatacgcggtctgagcccagcggagggcccatcgagagaagtgggcctgtttaaagaagcccatcggttcaaaagtcagattatgctttaattcgagtaacggaaggatctcgaattaaagacgctcattaattgctcgagctggagagttcgtaacgtttgaagtaaacgaagcgagattcccggcgtagaatcagcgtagtgattaattcatttgattcgaaatatttgtataaatgtagtccgattgcaattgtagagagacgaatgaattgacactgaaactatacagaaataaacaaacacttttccgattgatctttgttcgtttaacaagtcttaagatcttcgaaacacgaccacgaaattctgattgtggattccgacatccacaaatattttatatgtaattaatatgtgaggtgtaaggtaagccaaattaacgtcaatatgtctttagaagaacagaacaccgatgcatgttatgaaaatacatgcaaaatacaaagatgacgtttcacaaaatcttttttgtaatctctctgatgctcgttgtctcattagttaatgctgttgactactcggtcgtcgacaattccggtgactctaccggaggaaggagattccggggagagatcggtggcataagctacggcacacagacactaagatctgcgacagactttgtgtggcgtttgttccaacaaaccaacccttcagacagaaagtcagttacaaagatcacactgttcatggagaacggtgacggagtagcgtacaactctggaaacgagatacatttcaacgtgggatatctcgcgggtgtatacagaagctaaaggaaggatgaaggaaggagataggatatggcagattgctttggggtcaggttttaagtgtaacagttcagtgtgggtggctctgcgagacgttaagccttcagctaacagtccatgggaagactgtatggatagatatccggttgagattgatatttaattttatggttaaagagtccaatctatcttatcttatttatttttgttgacattttatcctatgtttgttttaaagagttttgcattgaatatttgttattgtctgtttggtagctttgttttggtacttgtttaagtaagaagtgatgggtgatactgattttctttacatacgagtcatttcaagagaacagaatgtttagtcatgggtggccacaaattttgtcaatggtaatatcatattactaatatgtggccaaattggttgctaagcagtcacggattataatcgatagatgtaacacttatatagctacaaaaagtatggttgagattgttatccggtgagattgatatttaattttatggttaagtccttatggctaatagtagtttaggttgagaccgatatttaattttatggttaatcccttacggctactagtctaaactatcttagcttgtttagttttgttgacatatcgaaagttttttttttgttctttaaagagtttgcattgaatgtgtattgctgtctttggtagctttgtttgggtacttctttaagtaagacttgatgaggacgacttttctttatagtaaccctcatttcaagaaaacagaaaattggttttttgctctaacccgaaatatgtggctatatttagttttgtcatagattttggcaatggtaatatatggccaaactggttgcaaagcggtcacggattatatccatagatgtaacactgatatagctagtagccgagtttctaaggatggctaagaaatatcgtatcaattacgagaatatcacaattatgttgggggtattgtatgatgtagtactttttaatatgtttacagatatagacacattcattcatgatgaaacactattttcacctcttaaaccagtgaagaacataaacgaatcccagaaccctcttttatagaattttaaagacacaaagcaatgaatacgaacacgtgtgatcatattcgtcgagagaacaacgctacaatcgttcatcttcgacaataacgatcaaattcagtttacaaatatagatgaattggagtttaattgattccatccatgtctaaaattagattccttaggttccctaaatactatcaccttagggtttagattccttccatcagaactctcgttaaattgagcaattggggtaatcggatgaggttaggggaagcaatgtttttttagtctaaagagacgagagaaacggtattgatgtagttgaaagtgatgatgttgaaggaatattgaatcgacgttgataaggcaagagccgacggtgaaaaacgaggtttcatggtcgtgaaatctgtgacgcaacggagaaaatgtagtgaaattatcaacaacaaatccgaggacaaaattatcatttcattagccaacaacaaatccaaggacaaacttataagcctaagtgaatatgcttttttcaaagtagttgtgggaagagaactcttcttcatcatgggacagcttaggagagttaaacgaggtaaagaaacccggactcttcgtgagacaaataggtcaaaagaacctgaaaagttctcacactaatgtctgattttatggtgaagagatgatgctatctacatccaagtgatcttgctttgtctacttatgctcttgtcaagtcatctccatttgcgcttcgcccaacatcaagccatcttcatttgaggttcaaacttgtcatgttgctttcacaccacgccaagtttgcgggggagtattagaggatccatatgaaacccaatatagtgtctcatgagtaatccaaaagcccatgtaactagggttagcaagatagtgactcatatatatagttatgtaatgagagctttgagagcaactttgagagttggaaacaactctcctccttcatcttatgaaatatcaattctagaatcattggatcttggtgacaaaccttaagcttctttcccttctttacatttcttaataaagctcttaatgagttatctaatttcagtttatatttctttcaataagcatcaatctatgtttgctttagaattgtctacaaccgttactcacatttcttaactggaccactagtgggtcttcaaatgatgtcatgaacttcacattctttgtttgaaatttatgaggtaaacgacatgtgtttccgtagaaagtttcatatagcattataactatacagatttcggacctctatcccacttcatatgaaagttaaagtccaatttctccttaaatcgcaagttcgaatccttaattttcataaattcaaattttgtagtttatctttggtttacagtgtcgaagcaatgccaaacgaaaaccaagtagactaaaccaaatataaattgagggagttaagtgagtctcctggactagtcgtcgtcgttgtccaagtctacctatatatatatcttttttttttttttctatttctgaaaaatcttccaagtctacttgcaccatcttgtacgccttattagttattactgagtctatgggcacaaccaaatgaaagctgaaagctcttcgattgactaataaatctcgattatttttcatctttccattttcacaattccatttatttatttttttataaaaaacaatttaacttcatttattttctttatataaaacttacaagaaaatcattttaataagaccaaatatttatcaaaaaataataaatattttgttacgataaaaaatattaaaaatttatgacaattttaaatatgttttttaattaaatgttaaattatattcaaagaaaaaatatcgttgttacaacaaggtacaatacaatcatcacaacttttttgctgtaaaaaaaaaaaaacacttttttgctgtaactaagagcatgcacatagttgatatcctatgagtatcattaacaattttttactattaattttaatgttttttattgtttgatattttttatgatattcgtaataaattgtttccagtggtgagaccgatattggtatcattaaaaacaaaatatttataaaatcaaaaaataaatttataaaaatataagattacaaaattactgtaaaattatgtcgcataatcacgaaaaacctacaaaattacttactcgcagaaaatatagctagttgactaaaatagtagaaagactatcagagagaaaaatgaattattttttttcaagaaaaaacgactttcaaaaacgaatcatgagcctccacatcatctgatactgggtatcaaaagaatcactgcagtgatacggtatcaagcctaaatctattgtttgatctattaaaaattatttatgactcttgatactctaaatgtctcacctatgtacatggtctaaaacgtcacatatattgcgacaaacaaatcgagtagctatttcgtcacaatatgtaacaattggtaagcttatcaaaaccatcactaatgcataatgaaattatcatctctaaaccgtgaccgataccgagtctcaagttcgttactaattacgacgaaactatagtttcaaaatttcatagttaatgacttataaagtatcacttatctggcacatattactaactaaaaaactgtcctcgaacaatcatattttttgctccattacaacaattatttttgtcttaaactgtcacaaatgaatactaaaaattatggtaattagtcaaaagtattaactaaaactattgtttcaaaaccgtcatattttgtgactataataacgtcttaattatgtcactcctaacaacaaacccatagtttcaaaccgtcgcaaacgataaccaaaacaaaagtctcatattcgtaaacaaaacagcaacttttttttttcttgaaacccttgtgtttggttactacgacagactcatctccaatccgatttgacattattgttttactcaattattatcacaatgatacaaaagcttatcatgtattagatattcattataaattaatattataatatgaatttattaattcataattaaaaaaacaaaccaatatccattaacgtaaccatgaaatataaataaaatccaaaacaaataacgtgatatgagatagaattaaaagcctaagttatcctgaggaaactaaataaaaccctactaaataaaatagcaaattcaattaagcagcaaatcaaatttaatttcttggagattattcctcgaggagtaaattctcatcaggaatatttttcaattcattttcaagttcttcaatttgatgagtctaccatttattagaacacacataaaagcccaaactatatttttatagaagcctatccaaactcatgtaattaggttatctagcaagtagtctctcatgtatatattcatgtattgtgaactatgtgtgtaacctagagagttgccacattgagcaactcttctctagtctctattgtatgaaatcaaatccaaatctattttactcttgaagacaacttaaaactttcacctttctctcttcttttcattttcaataaagctcattgagctattgcattttcaatctcttctaataagctcaatgagcatatatttagaaatgtttgcatggtatcagagcatcagtccatctaagggatttatggttttactctcactatcttagtctctgctcactctttgaaacgtcgagccttctatctttcccacaatatctaaagcaaggctagtctttagtttctctcactttcagtaaacccgacagaagaaatcttagtctcattatctatggataagattccagtctcgtcagcgacaaagttttctgttaaagaatcacaaaagcttgatgaatctgatgaaggagaagcaacgagagctaaagcaagaacttgagagattggagaagaaaaggtgaagactggtttctgaggaagagaggcagaattggttgaagatttctatgtattaaacgaagagatcagagccaccactgcttgagtatgactctgccttgtctagtacgccaggtgttcgacgaaaattccagacttgaatgttgtctcagctacatcggagatataaacggtaatgtatttgccttgctctgaaacagaacaagagtaatgatgatggttggtttagatttctaggtctggaattgagaagttagaatgaaataggttgtttagtttggacaaatcagattaggagcactttgctcaatctatcttcatggaacgttggctgttgatgagctcttggaagggctaaaagctggtcttggttttgttttgataaagatgtgtttatgggctgcaaaactctgttgattttatggcaaacacaagtttttgattgacgcacgtaagatgttcgataaaatgccgtagagaagagaaactgagtatatagatgcaaattgtgattggctaaagaatgagaaacagatagctagtaggatctaagtagttgtgggaagagaattcttcttcttcatgggacagcttaggggagttaaacgaggtaaagaaaacccggactcttcgtgagacaaataggtcaaaagaacctgaaaagttctcacactaaagactgattttatggtgaagagatgctactatctacaaccaagtgatcttgctttgtctactcatgctcttgtcaagtcatctccatttgtgctgccatttcaattgaagttcaaacttgtcatgttgcttccacaccacgccaagtttgcgggggaatattagaacacacataaaagcccaaactatatctttatagaagcccatccaaacccatgtaattaggttatctagcaagtagtctctcatatatatattcatgtattgtgaactatgtgtgtaacctagagagttgccacattgagcaactcttctctagtctctattgtatgaaatcaaatccaaatctattttactcttgaagacaacttaaagctttcacctttctctcttcttttcattttcaataaagctcattgagctattgcattttcaatcacttctaataagctcaatgagcatatatttagaaatgttttcaccattgtaggatccaataccaaaggaaaggtcttctgttgactaatctttcgtttatttttcattttttcgctttcatattttttttctctatatataaatcttcctctaaacctaaacagatcatcgtccaaaatacaaaaagagtaaccaaaagaaaaaaaatggcttgtcacaaaattttccttgtaatatctctaatgctcgctgtctcattggtcagtgcagttgacttctctgttgtcgacaatactggcgactctcctggaggaaggagattccggaatgagatcggcggcgtgagttatggcgaacaatcactgagagatgcaacggacttcacgtggcgtttgttccaacaaactaacccttcagacagaaaggacgttacaaagatcacactcttcatggagaacagtaacggcatagcatacagctcgcaagacgagatacattacaacgcgggatctctcgtggatgacaaaggatatgtaaggaggggatttaccggggtggtttatcacgaggtggtccattcttggcagtggaacggtgcaggtcgggctccgggagggcttatcgaagggatcgcggattacgtgaggctgaaagcgggttatgttgcgagtcattgggtgaggcctggtggtggtgataggtgggatcagggttacgatgtcaccgctaggtttttggagtattgtaacgatttgaggaatggatttgtggcggagctgaacaagaagatgaggagtgactacaatgatggcttctttgttgatttgcttgggaaagacgttaatcaactctggagagagtacaaggccaactatggtcaatgaatacaaagtataataatttaatttaagatataaaatagtatgctataaaaataatacgtttatataagaaataaatatactatgctgtcctttgatggtgttgtaagtttccattggaaaatggatatacctattgatgtatttttttttaaaaagagttgatattattgttacgaaattagtatgattatctataagctcatatgtattgtttcttctaattttaaaacatactattaatgatagatagaaaatgtaatttagtgtgtgattggttcgtctgtaactgtagattttttattatagattttttgctgtagaatttttgctgtatgtgtgatgactgtagctgtatattttattgctttaaaaattagggagatttgcaaaattgcccttattttaataaccttttgtaaaagtgccctttcctgaaggccatttttaaaactaccccttctaatatgccaaatgactgtcttaccctctgaatgattaggtttcacgttcgtttcacaaacttcttcgttttggcacaaacttcttcgttttcctctccgatttcactcaaaatcgccggcgaatttcctctccgatttcactcaaaatcgctgacgaattccctctccgatttcactcaaaatcgccaacgaatttcctctccgatttcactcaaaatcgccgacgaattttctctctgagaaaccccaaaatcgcagacgaatttcctctccgataaacctgttcttctgtgaaggattcagatcatttctctacgacgcaaacaatccccagagatatcgattgatccgacggtaaccgttttaataatcgattttatagtcaatctgacgctgtttcataacatgttttgcagatggattcagagagtgaaatccttacattgcctgaacaaatctacagagaaggtgaggaatctattgcactgggaaccgttcaacaatactcggattggaatttagttagtaaagtagaggaagctttaggcgagtgtttatttcagaagattagaagttcgtttcttggtcctctagttgaattgggaccaaaaatgaaggctaagaagggaatcagattttctggaaaaatctttcactatctcatgcagcagagagtgaaaacaaaaggatcaactctttggtttagagttgattctcaacctatccgtttctccttgagagagttctatctcacaacaggtaataaagttttacaatcgtttttaaagcttaattaactgtcgtagaatgatttacaaggcatttgcataactgtttgcgtagtttacaatcgtttttaaaacataagtaagtgtcatagataatttacaagggattttaaaagcttttaaaaggggtttacttcattaacaatcgtttaagaagcataagttagtggcagataatgatttacaagggattttaaaaagggtatgcatggtttacaaccgtttttaggcataagtaattagcatagaataatttacaaggaattttaaaagcttaaagaagtgttaaacacgtttacaagggattttaaaagcataagtaagtgtcttaaaacgatttacaagggatcttagaagtgtttgcatagtttacaatcgattttaaaacataagtaagtggcatagaatatctacaagggattttaaaaccttttctaagggttaaacatgattagcaatcgttttttaagcataagtaagttgaatagaatgatttacaagagattttaaaagcttttagaagggttaaacatgatttacaatcgtttttaaagcataagtaagtgtcatataatgatttacaagagattttaaaagtgtctgcatggtttacaatcgtttttaaaccataagttagtggcattgaatgatttataagggattttaaaagcttttaaaaacttttaaaagtgttaaacatgatttacaatcgtttttaaagtatttactataaaacctgtaataatagtctctacactgtcttttgttcatacaggaattcaatgtgaacctgttcatagggaacttcgacgaaaggggaaagatcttgtaaaagaaccatacttttgggctagtaaaggatcctatactcttggtgatctcgaagatcgattgtttttaaaacctaaggaaggtgaacctgctgttgaagatgaagaaaagttgtgtcttgctgcagtagtgttgactgaaggaattcttttgacaccatatgaaaaagagaagatacctttgccaagattgcagcatgcttttgattttgagatgtacacagcccaaccgtggggtaaagaagcattcagtgttctatcaaattcaattctgagaatggacgagaaaacttgggcaaaagagaaatatgatttgagaggatttggactagcgctaacaatatgggtgttgagcgcagttccagcatttggtgcagcatatggagttaaagataaggaattccaatctgaatatccattgatattgaagtggaaaagcactactactccagagtttttcaagatcgtaaaccttgtaaatgatgtttctgaggtaagcttttgtctatttacagaattctttaaatggttttgagatttgaagttctgctttctcaagatttgtaatgttattgtatcttcgcagattgaggtgaatacaattatttgaaacccagaagacttcaagtctttagttcctgatttccacacagacgacatagaattccaacaggttttggaacttgttaagatgggctacagattgaagaaaactgaatggaatacaagatgcgttgatgtttgtgctgcccttgaagaagtaggtcaaaacaaaatcaataacaaaatatctgatagcgagaagctt

SEQ ID NO: 228 - DNA, 57564 bp, Arabidopsis thaliana
gaattcctcttccctatgtttgtgaggagacatctttggagattgctcatgaacttggtgagatcatcactttggacttccatgatgcaaccactactcaaattgcttatattcgagtccgagtgaggattggaatcactgatagactaaggttcttccaaaggatcacttttgattctggggagactgctctcatcaggttttaatatgagaggttgaggaggatacgcagtagctgtttttgagttacacatcacaggacctattgtccttatcgaccaagattacctaattatggaagggaaagaactgtattctatgatgaaaggcttagatcgactatgaattctcagtctcaaatgactgagtcttcctttctagttcctgtgaaccctcctccaagaattgctaccccaccgttgaatcatggagagtttgttgcaacccatcctcattttcctactccaagagaaggacttaaccaacatgttaggggaacttcttatcaggggctctatcaaggctaacaagtctccacagattctaatatcacgtcttcggtgggaacaacagtcacaactggtactcgtcgtgtttttgaagttggtcaatcttcaagaaggtttgaaacagtggaaacaaggaaaaggcaagaagagaaaggatcttataatgaacaagatcaagcgcacatgaaggaaggaattctgaaacctacaaagaaaagataagcactctatgaattctgtcaagctttttggtttaggactgcattggtttcaacaagtgcagatccacgctcttgaataatacgtcaaagtggtatggcgttcataacactttttggttcaaggcatactctatggatgcaattactgtttttttaacgtttattatgtaactttttgggtatgcaacatggcttttttttaacgtttattatgtaactttttgggtatgcaacatggctaaccttgttggtttctgatgccatggttgttagtttacttgctttcttgtgtatgtctttaagttgtaagtggctgccactgatgtacttttcgaaatcgtgaacctaatgaaaagaaaacaacacttagtaaaaaaaaagaaaacatctttagtttatgcaactctcagactgtttagcttgattttcgagattattatttttcaaattatttatgtaaactaatttttctagaaattaagtaacggttgtggagttgagtttttaattagtgtgtggttgcttaaaaaaaatatgattcactttttaaaaggaacggtttacgacaaaaaaaaaaaacaaaggaacggtttagtataatttgtaccgaacgcagaccgcaactgcaaaaaagaagcgtctgggtgcgattgcggtataagcgaacaatccctaaacccgaaaataaccaaaaggaaaaacgcagagaattcgaaccagagagatctttcgaatcaaaacgatctgaagaagaagaagaagaagaagaatcaaaatctggatcagaaacaagggaggagaagatgttgcccacaacttccagatctcgttcttcatcttcttcatcccgagctaatccaatgttccttcagtactttcgtcgtatcgttaaggttctcttactcataaacatctcgagcttatcgtggattgatctcagatttaggtcgatttttagatagattcttcattctcttagatcgaattacggtggtagaggatgagaaaacctcggatttagctgaatcgatttgatattttggctccgcagtgtcacttagatttagcaattactgatgaagtggctgtatagatcactttctggatgttttgttggagtgttatgatctgatgattaaacaagattgtttgaggattctgtaacatttttcttcttatgagtttgggaatttgtaagcattgatgtatgaatggtgaaatttgtttatgtgatcatacactatgatgcatattacattgtgttcgagtttgactattgggctatgaaactcttttttcgttctcagttttgtgatcagtccttttttggtcattgcagtggcagcaaatggatgttgaatatactttctggcaaatgcttaacctttgtacatctccgaaagttgtgtaagtctttgaaatactttcatttcctatcttgaaggttccttttgaacgattaccatcaaaatgttccatttgaaaggatgataagggaaaacctagaacttgtaaggttctcaaaatggcaaaaatggaaaagttacccaggcttttactagagggcggattaggatggaattaccatttaactgtggttctaagtgaatagagtttgagatggtttcactgcacctttgcaataagaaatggaagagagttttaactctctgtaaggcttatatgttcttttgggaagatcaatagggtagtctaatccaacaatttggaatagttttagttcagttactatgcggtggcttaatttccagttcttattctcgcactttttgtattttttgcatgggggcggcgctatggcatcagctatcaacacactaagtatcacaaacgtaagctcaactttcaatagcgaacccttatgctactgcaaccagcttttatttttcttctatttgatttacctttctgtttctgaaagtaccttgagccatccacttttacaatgaatacctagcaagtggagaagcatccccttgtgaccttttctagctgtccagctttttgcataatctcctcgtcgtctttactcaaaattaatgctagtatctgttaaggataagctcaagtatggtatggcttgaaatttttagtgcatttgctttaattactcttattttttctttctctcagaaactaagaaccaatgggcacgtgatgaccctgcgtttattgtgatctgtagcctgcttcttgttgttgcaactgtagcctattgtgtcacgtaagtgttttgtatatttgaaggtttagagtatgagagataataattgccttggaaaacgatttcgttttctgattttcgttgattatgtctatacttcaggtatgaccatagtagctctcatgccgtcgtcgtagtcgtttcagttttgttcacccatttcttaatcaccggagcagttatagctacatgctgttggtaagtaatttctattattgcataggcatatacatttgttggtgcaaactcttatgcaacttaaatgttatgcttgctcgatgtctgttattctcattcgtgctataaagactgttactacctttactactggagttgcttatctgatcttattattcttgttttgcttattatatcatgcaagacaagcactcttaagatttggtactgaaacccgtcttgtgaacattgctggttttgtgaataccactcttgcacaaacctgaatcctgctctatagttttcttccttgtaattctaccacagtttgagtcgtttcttatatcaaatctacacggtttctctgacgcaagatatggattatcaggtttttgacaaattcttaccttcgcgaggagactccaaacagtcatgtggtggaacaacgcgttgaatggtaagtttatggactgaatcttatcttttcaccttcacctcctttctttggttgattttttcctctagaagatgagttagaacctccaaaacagaaagtttcgtgtttgtagttcagtatccttaccatagtttctctttttttataatctctatctgtgtgagatgttcatgaattttcttttatgcctttctctgtaggctgtatacatttgatgttcactgcaactcgttctttccaatgtttgtgctgctctacggtaaacccagtttcaaatacattattcaattctccaacccctcctgaagttaagatctctgcaaaaagagatatattacttacagtttcatcttgtattttgcagtcgtacattacttcttatcaccgctcctgatagcacacggattcatccctttactgctatcgaatctgcttttcatggtcggggcttcgtactaccattatcttaacttcctaggatatgacggtgagtcccctaagatcacttgtttccttctttcactattgatccgttgtataactcttgaactaacaagaaagtttgttatgaatccatacagtgcttccatttttggagcgaacaacattcttcctctacccaatcggagttgtcattgtcctgtctcctattcgtaagctcaatcagaatcattggtttcacagatatcttcttcctgaaaaggcgtatacatcatcttatgtttattctccatttttgcagttatcttaagcggattcaacccgtcaagatatttcatgaacatgtacttcagccaaaggttataaaaaaaacagccacatcagtggaatccttagggcttttgcactgcacatacatcattaaagtaaggaacaagaagattgagagagtaatgattttcccttttttacccgtaacagatcatcgtaatgctcagtttctggtacaacttcaaaaggctacttaatagaccagtaacattttctaaacatgacccctcttagcaagtgctctgttaaatgtagtggtttttttggcatctttcttttgcggtcattcatacgttacgtgttgcgactgtcattgagtcataagtacaaaatcatgatctcgcagattctggaaagttgtactaaaggaaggaccggtcagatatttgatctgatgatcatctctctaaggttaatggcttatgttatctttggatacaaaatttgtatccaactgctcactctttttcatcttaaagatcaaaaagttgtttttgattgctatcaattttgcatctaaacgctgctgcatccaaccaaattaacttatccacacaaacaatatctggtttaacaacatgtaaacgtaataataacagaaggtgtctgtcttgtaatttatctaaactcatcgacgaccaatctatttcacttgagttactggattgttctatctgttcatgtctagattggtgctaagtagctctttgaagcagaaaatttagttcaataggaaaatatttacaatcagatgtgtacatatatttgtggaagataaatatgtgcaaagcagaacagagtatttagtattttaccaactactagacttaacctttgctctgaaaaattgaatcatgtgcttatagacatcttctttagcacttgagccaagcacaaagtcaatgtgaccataatcctcaagatatagtaactctggactggaaggtagttccgcgagagtatgttccacatctgtcacatctgctaaaccatcagttccaccataccccatccacattggtaatgatgccgggatgtggcttagtatgaattctggaggtttcgacagcccataagtccgtagatttttgaaatacccgtagtcgtattgtgcaaaggttcccttccgaatcactggagtaaatgatcgtaaagatcgaatgcattagtatggaaatcaaaagggagtgtgagtaagtaagctaggctatggattatggaacacacaaaaaactaaggcaatgaacaagttaaatcaaggattagagatcttactttggaaaagatgtcgaatattcttgacagatgatgggtgaggctcgtaatctagatagtattctatcttcgaggcgttgaaacaacaattcgtccctgacattcattgatgttagttgaaaagaaagattaaaaaggggtaaaatcatatacagaaagtatcacaggacatggaggctaattattgccaaaacaagcttaagtgtcatggtccgttggtctctttaacaatcatagtaagtgctgaagctagagaagtttctggtcaatagatcaataaactacaatgcctgctgaaactaagccttattgtcatctagaggcaataacaaatgagcacagttaatgggatttggcaatcaagcttgctttggtgtaaaaagggttttgtagaaggaaggtcagagctctcattacataatcttaaaaacctttgtttcttcagttccaaaaaaaccaccatttcacattgatttatgtaattctatgttcttcttctcacacttaccgaaccgatatataaaagagaatattttttgtcaacagttcactacagggagattagaggaagagaaaaacctgttatggatgtgaggaaatcagtgcaatccatatgcccttcgcataacgaatcaacaagtttaactaacatatcactgaaaacacagaataaatccatcagatggttagtaaagaaacgtcacattatatcaacacacgataactagatgagacagaagtcacaaccttctaaagtttatttgatgcagcccaagagcaactaccatctgtaaacagtagcacacgtgttaacttgattctttgaaatcgctttaatgatgctcgagagccaagaatacctgatcgagatgcataaaaaccattctttcaacaagaggagctgtgacatgatccaaatatgatattggacaaagcaacgcagctgcttcaaccatttccgcaacatgcggctgagtaagagcagcaaaagacatgatagtcccctatcaaacaaattaaaaggagttagcttattaaaaatcaacaaaagggtaacttatatgatttcagaagaataataacctgagaatgtccaacaaggaaaattttggagtttgaaattgaatacagatactgaatcatttctgccaagtcatacattgccaaatcttgccaactccagtcccaaaactcctgcatatatataagcaattaagcattacttttcttaactatggccatattcttataatgtcaactacattatccacatctcctgttcttgccagcattaatcactttaataacatcaaatcacgtataaggaatcaccattaagcctcataaacaatggccatatgttaaactattcctcaacataaaaaaagtgaaagcagagaaacacataatttgatggtgtaccaaacctaagatgcacattttcaggtgaagctcatacataaagaggaaccaagacaagagaagtctctgcataccttatcagtgtcagacaaagttacatgtccataactgtaacgtgtaccacgaacatttccaacccaaacatcaaacccatgatcagcaagaatgaaacctagtgactcttttggtgaattcaagaaccacacatctccagcctaataatcaaaacaaacccaccaaaaaagatacgatttttaacaattttaaaccaatttcaccaagaaaagttaaagcctttaaacaagatataccataaagagaccgtgctgaagcaaaacaggtggaccagattgaagtcttggaccaagagaagctacacgttgaagagctaatatgtaaccatcctttgtttgaatctacaaaaccaaataaagttgagatttttctacgactgattcaatgaaatcttgattataagaaagagtgataataaaagatgagatttgtacactgtgttcagtgcaggagtaattagcgggatgaatgagatcagcgcagagagaattgaccggagatccatggaggagatgggactgtgttaaggcggagaagatcgtaagagaggtcaatacggcgacgagcaaccatttcatcgtcgccggtgacgggactgtttctatctgaaaattttcaaattacccttttttgtcttctcgtggattttttaggccccaaaacagaaaattcttatcgtggatttgtaagtttataagtgttatatttcttacgagtttagttaatgaatgattacaactacacgaaagtgttttttattcgaccatgatgactttaaaacttcacaatcagattctaccattattatctctgacttattaatatcaatttagtaaaaactttagaataatatatatttttaatttttattaaaatctaatcagatttggattttcgggtcaatattcaagacaacagttaccaaataaggtaaaagaaaaaattcatgacgacgacggctcgagaatcggaattcggtgatgactgaaggcaaaagagtcagacatagtttttggcggattcaaagagaacagctttgtgcatctcaggcatgcgatctacgataggagattcaaatttcctcggtcgatcacgccaccgatgcactagacccgccacacttttcaaggtatgaccaactctccaacaaccggctctgcattgttagatcccagtttatcaggtttcttaaaatgggatctaacaatgtagagccggttgttggagagttgatcatactttggaatcttattttaagcaacctgataaactgggatttaacgtctcaagccaccaccagaaaatctaagaaactttcgagtcaaaatctcatcaatccggtctgatagaaaccattacggtggatccagaggcttattggctcatagtccctcatgacaggattagtcgttgaccaccaaatagaactacaaaactcaccgtttctccgacaatcttcgttgtaaccgcatattctaactcatcagttgagccaaggggatctccaaacaaccaccaacgtcctcaactagcatcatgctcaaagagacctctaccgacaaataagagctaccgctacatcattggaggagacaccacaccaccgtagacagatatgggattcgactcagcattgttccttgagaaacaagggatcagccggcaattaagctcaaaaaatggagaaaaattaaattttagatctttatatggagtaatcttttcaaatgaattaaaaaaaatttatatgaaaatttgatcaatcaaatacttattaagaataagtgtgggacacatgtcccacctcctttcattgtagatatgccaacggatttaaatgcctcacctctttttactgtagatctgccacacacgacggatttagacctggatccgtcatgagtgtggacatcagattttgtggttttcatcttcgcgtttgacttttttggctccgatggatcttttcctatgggttggttgttcctctaataggcatgggtggtctttctctttttttttttttgtatttttaatatcgtgtttctgcaattattctcttttgggcttagcacaatttattgttttacacataatttttaaaatatcataaatatgaaaacctttgacacaaaaaaggtagaaaaccagaacttaaggcttgattggttctccctctaccacccgcaaacacagcgtttacggttggtagcgattgttagcggttgttagcgattgacaccaatcataaaaaccgctagacatcgctttggaccgctcaaaattgtccgttttcaaaagctccttcccgcaagcgtttgcggttgcgggcgatagcggttaggttaaaaataaatcttttttaattaaattaaataattgtggcttccacccaaactctaatcactataattaaaataatctaatctgtgatatatcttatttttattagaaaaccttaatcaatatattgtaaccctattgtctcaattatggcatccgatgaaaatcaaaatcaagaatcaaacataagtatcatctatcattttattcattcattagctagtgtaattttttaactatttcatagcatcgttgtttttattttattttgtattctttttagttttttgattgaatacatgtttcgatttgtttttttgattaaaaatcatttggtcggacaaggtgatatattgtatttttatttggtcagaaaatcaagttttctaatattatcaatttatcataatatactgtatatttatttcttttaatagtaatatattatatttattttggttattttttatttaattactatcgtacccactggtttaccagtcataaaactcccgcaaacgtacccattatcaaacgctcaaccaatcgttcaaaacgcttgataacgcttgaaactgcaaccgcccatttccgcaaactcccgcaaccgcaaccgtacccattgcgtttaaaccagtgaggccttagaaaatacatcaaaataaagataaaggtttggaaaattatctgatagggttgcacgaaactttcgaaaaatcaactcgtggtcaataataacaaaaacaatttttgtcgaactagagattcactccaaaaaaaatataatgatggaatcgatctcttccaaaacaaaatttgtggcgaaagctttaaaatagtagaaatacaatttataatcttggtttccagtagacacgtacaagagattacaaattattttaaagactagtttatttaactttgttcaacgttttactttgaccgaagtcacctatttattaatctataatcatatttaatattagcataagttttttttttttttaaatgttaaaataaattaatctaatcgtgttgaggtttttccaaaaccatttgtggcaagagctctaatataatacaaatataatgtataatcttagtttccattgaaaacgtgcacgagattacaaattattccaaagactgatttatttaactttgttcaaagttttattttgaccgaagtcacctatttaatcatgtcgtttaattgttgcgagacgttaactttatattcccatagattttacttcttttttcttctcacataccttaatggacaattacaagaaagagtttttattcggccacgattacgaataaacagtgacataacgttctaaatcaacccccaatatattttctttgactaaacatacaataccatttttagcaagagcttatattttaatacaaagagtgtaatgtatgtgttttccaatagaaacttaacaacaccatatttttcattttattcaccattttattttattttcattaccatattgagattattttgtatcgtttgtattcattgaccatacttggccttgtactctctccataattgattcacgtctttcccaagcaaatcaacgaagaagccatcactataaccattcctcatcttcttgttcagctcggccacaaacccattcctcaaaccgttacaataatccaagaacctcgcggtaacgtcataaccttgatcccacctatcaccacgaccaggcccgacccaatgacttggagcgtaacccgctttcagcctcacgtaatccgctatcccttcgataagcccacccggagcccgacccgcaccgttccactgccaagaatggaccacctcatgataaactacaccggtaaattccctctttacatctcccgatacacccgcgagatatcccacgttgaaatgtatctcgtttgcagagttgtacgctactccgtcaccgttctccatgaacagtgtgatctttgtaactgactttctgtctgaagggttggtttgttggaacaaacgccacacaaagtctgtcgcagatcttagtgtctgtgtgccgtagcttatgccaccgatctctccccggaatctccttcctccggtagagtcaccggaattgtcgacgaccgagtagtcaacagcattaactaatgagacaacgagcatcagagagattacaaaaaagattttgtgaaacgtcatctttgtattttgcttgtattttgggacaatgatctgttttgatttagatggatgtatttatagagaaaataaatggatttgtgagaaaaataatcaagatggtgattggtcaatcaaagaccttttcttcggcagtgtcccattatctaagttttgtacaaatgcgacttggtatttttattttatatgttggtagaagaaactacgaccggtctttcttttattttgtcattaaaacaaactacaatgtgtgtgtaactaacttactattcttttaggaaatttgagtttgttatactatctttttttaagtcgaagaagagtgattcattcactataattgtagactgtactaaaagtttttagctgtatattacgtcaactaattataagggttttatacaaaacaattatcaaagtcgtctatttttacaattttaccatatacgtcgaaaaaatacaaaataatctcatgaaatttaaaatagtagacaataaacctcatttttaaattttatatatatatattgtaaacgtttttacgattacttacatttgtttttaaaaaatctaatgatatagttgaccttatcatctcgaagtcttcgatttgatatattatttagcaaaattttgagaatttgacaatagcgaaaaaactatattgcgtattatttttaacttcctatgataattctgtattttttggacgtgaaaaataaaattacaaaaatagaagattttgagaattgttttgcacaaaaacctatttataaagtagaataggccagttaaataattactaacaattgtatgtcaaaagaattagaataattcactctaatgcccttttctcaatgcccttttgcaactctacccttttttttcccactttcatttctaccctttctaatacttttctccccaaattacctttaatgagctacccacagacctaattcatttcttcactctctctcttcttcctccatcggaaattgtgaatgccgttgaatcccatgccgtcggaaatagtgagtttactcgccgtgaaaacccatcttcgccgtcgtaagtagagctgtgtgtcgtcgtcgaatctcttgcgtttcccaggtttgattttataatgttagcttaaatcttcgttttcgaattggtttattcgatttttgttgttgattatgtgaattcgttatttgaatcctgattcaatcgacagtttgacatttgcttcagcttcgaatttgaattttgtttgagatttgatgattgaatttgtttctaaaatccttgtacattcgttatactgttctaaaatccttttgaattcgttatactgtttcgtgatagatttgcttatgtgaattcgttatactatttcgtaatagattttggttctgatttagtgtttacctcttttgcatatgctttcgtgatagatctatgtcacttacgctttaaaacgatttgtaaaccatattaaccacttttcaaagcttttaaaatcccttgtaaattattttatgctacttacttacgctttaaaacgatttataaaccatgttaaccacttttcaaagcttttaaaatcccttgtaaattattctatgctacttacttacgctttaaaacaatttgtaaaccatgttaaccacttttcaaagcttttaaaatcccttgtaaattattctatgctacttacttactctttaaaacgatttgtaaaccatgttaaccacttttcaaagcttttaaaatcccttgtaaattattctatgctacttacttactctttaaaacgatttgtaaaccttgcttctctctgtagtgacagtgtttttgtaggtgttgattttgttgttatttatcttatcaggttataatgctagaattgtattctgtttgtggcttgtggaagttgacaaacaatatgacttgggaatttgaattagacattgaattgggagcttctttagtgctcattgatgagcacattacctatcacgcgttggttgatattcttgtagaggattttcaaatagatagttcaaccaattctttgaagcttagttacaagttagtctccacgtctacaaccatacaatctcatcctctttatactaggaacgatagacagcttgcaacttttatgcacaaattctcacagagtggaggattgcttcagttatgtttgactatagagcaaatttctgtgacagttgagcaggtttttcaataaccttcttgtgttataattttaaaaatccttgtaaaatcattattaagtcagtgattgtgcttattataggctgagactacttcaaatccttttgtttctcattctgtccctaatgctcaggtactaatcgttttaaaaatccttgtaaaatcattattaacgtttttaaaccccttttaaaaatccttgtaaaatcattattaacgtttttaaaccccttttaaaaatccttgtaaaatcattattaagtcagtgattgagtttattacaggctgagacgacttcaaatccttttgcttctcattctgcatctactactcaggtaataatccttttaaaaaatcttgtaaaatcattatcgtttttaaaccccttttaaaaatccttgtaaaatcattatttaagatagattgatgtttgaggtaagctttttattttggcagtcgaggttaacctctaggattattgaggcgtgtgtatctgaaacatctagtattcttgatcaacagtattctagttatgcgttttcaactggtctaagtgatgctgattctttgtttattggaaaaaatttcaaagacaaagatgaaatggtattcacgttgcggatgtttgcagtgaagcacaactttgagtttcatacagtgaaatcagatctcacgaggtatgttcttcattgtattgatgaaaactgtagttggagactacgtgcaactagggctggtggatccgagagttatgttattcggaagtatgttagtcatcacagttgtgactcttcattaaggaatgttagtcatcgtcaagcatctgcaaggacattaggaagattgataagtaaccattttgaaggaggaaaacttcccctcagacctaaacagctgatagaaatatttagaaaagatcatggagttggaatcaattattcgaaggcttggagagttcaagaacatgcagcagaacttgcgaggggtttacctgatgatagttttgaggttttaccgaggtggttccacagggtacaagtgacgaatccaggttctatcacttttttcaaaaaagattctgctaataagtttaagtatgcgtttctggcttttggtgcatcaattagaggttataagttgatgagaaaagtcatatctattgatggtgcccatctgacatcaaagtttaaagggactttgcttggtgcctcagctcaggataggaattttaatttgtatcctattgcttttgcaatagttgactctgaaaatgacgcatcatgggactggtttttgaagtgtttgctgaatataatccctgatgagaatgatttagtttttgtgtctgaacgagctgcttctattgcaagcggactttcagggaattatccacttgctcatcatggactttgcacttttcatttgcaaaaaaacttggaaacccatttcagaggttcttcacttattccagtttactatgcggcttctagagtttacacgaagacagaatttgattctttgttctgggaaatcactaatagtgataaaaagttagcacaatatctttgggaggtacatgttaggaaatggtctcgagcttattctccttcaaatcggtacaacatcatgacatctaatctagctgaatctgttaatgccttgttgaaacagaaccgcgagtatccgattgtttgcctatttgagtcaatcagatctattatgacaagatggtttaatgagcgacgtgaagagagtagtcaacatccgtctgctgttactataaatgtagggaagaaaatgaaagcgtcatatgatacttcaacacgatggcttgaggtttgtcaagttaatcaagaagagtttgaggtaaaaggagataccaaaacgcatttggttaatctggacaaaaggacttgcacatgctgtatgtttgatattgataaatttccttgcgcacatggaattgcttctgctaaccatatcaatctgaacgaaaacatgtttgttgatgagtttcattctacttacaggttttatctctattcttcacaactttacaggcgtttttaaatgttttaatatctctttttatggttttatctgtgtttatgtggttttaatctcagtttacatcgctgtaatttacaggtggcgtcaagcatattcagagagcattcacccaaatggtgatatggaatattgggagattccagaaactattagtgaagttatttgtctcccaccttctactcgtgtacctagtggcagacggaagaaaaagaggataccttctgtttgggagcatggacggtctcagccaaaaccaaaattacacaaatgcagtaggtgtggtcagtcgggtcacaacaaatcaacttgtgttgctgcaatttagatatatctttatctccaaagaattgaatattgttgggttttttaatattttcttcattgtgtcgtgtcattactctcgtttgttaaaattactatcaaacttttacaagtaattttgaaggttattccaatattttaccttttaaaatctcttgtaaaatcttgtttaaaacgtctgtttaaatccttttaaaataccttgtaaatctttcgttatgccacttacatatactttaaacgattgtaaatcaagttaaacacttttacatgcttttaacttgaatcttttaaaatgtcttgtaagtcgtttactaaaattactatcaaactttacaagtaattttaatagtaattccaataatttacctttttaacatattttgtaaaagcctttttaaaacgtctttgaaaatccttttaaaataccttgtaaatatttcgttatgccacttacatatacttttaacaattgtgaatcaagttaaacacttttacaagcttttaaaattccttataaatcattttctgacattaacttattcttcttaaacgattgttaatcaagtaaaccccttttaaaagcttttaaaatcccttgtaaatcatgctttaccactttattatccttaaaaaccgatagcaaaccatgtaagctgtttatgcctttaaaatcacttgtaaatcatgacaattcttataaaaccataaacagttgacaatagtaaagcattttgattagatttgacagtcataattaaaatacaagtacaatcatagattccaaataacaaaagtaaaataaacatgtttgaaataagtcagtctaaagaactaaatccatttttgccttagtagctctgtccttctctacctgcaaataaaattcaacctgtaagttattttttgcataacaataatattcaagtttttaaagatatatcgttatacaaaagaagagtttaacactaaccattattatcttgcagatttgttcagctagttatttcacttctggatgagctcgaggcagtttgtcaggatgaatgagtaacgttgctttctttaatgctaatttgtatttcttctcgtcccacatatcccaaatttcgactttttgccatttactgtcgggccaaagaatctgaaatgtaaaaattccaaaatgattagaattaaaatcttttgcaacaaaacaatgatgtaatttaacttacttcttcaagtgacgatagtagatctcttattaatttgtttttcgcccattttttaacttttatgtcaatttcttccattacttcctaactcaacatgaccggcgttaaaggagtttgaactgatacaaaaaaaaaaaaaaaaaatagaagttctttatcaaggcaaatcatctgtgaatgtaaaaagaacttacgactgctctgtccctgggtgatttcttcttcttgcgtagagagtggtgtttgattaacatcttcatcatctttcttggtctctcttggaacctgtaaacaaaaacatcaaaacaaaattttattttttgacaattttatcatgtctttttaaacaattaaggaatgcagacctctgttgtttcttctttttgacgttgtgattctttctctgtgggtgcagtcccattatcttcatcatctgacaaaattacatatgcttcttgatcttcagtctcatcatgtttatcatgttcttctacgttttcttcttttggaacctgtaaaccaaaacatcaaaacaaatttttattttttgacaattttatcatgtctttttaaacaattaaggaatgcagacctctgttgtttcttctttttgaggttgtgattctttctctgtgggtgtagtcccattatcttcatcatctgacaaaattacatatgcttcttgatcttcagtctcatcatgttcatcatgttcttctacgttttcttcttttaaaacctgtaaaccaaaacatcaaaacaaaatttttattttttgacaattttatcatgtctttttaaaaagttaaggaaagcagacatttgtttcttcttttttttttttgtgattctttctctgtgggtgcagtatcattatcttcatcatttgacaaatttatatacgcttcttgatctacagcatcattatattcatcatgttcttctactttttcttcttttccttcttctctttccatttcttcatcgccttgtttgggatttttcttgttttcctatttcttcaacattgcaagtagaatgatgatctctgtattcaacctgtataaataattacaagttcccaaatacaagccaggaaacagttattagtcatgtaaatcacttttaaaaagcttttaaaatccgttgtaaaatcttatcgaacactgcctacccgttaaaaacgaatttcaatcttttaaagccccattaagaagtctttaaaatcccttgtaaatacatatctaacactgcctatctttttaaaacggctaaaaatctttaaaacacgatttataaggtttttaaaatcctttgtaaaaacacatactttttcttcttcctcttcttttccttcttcctcttgcttttcttcttccccttccatttcttcatcgccttgtttggggatttcttgtttttctttcccttcatcgcctctgtattcaacctgtatataaaattacaagttttataactacaagttactcatgtaaatcactttttaaaaagcttttaaaatccgttgtaaatacttatcgatcactgcctatcctttaaaacgaatttaaatctttaaaaccccattaagatgtctttaaaatcccttgtaaaaacacataccttttcttcttcctcttcttttccttcttcctcttgcttttcttcttccccttccatttcttcatcgccttgtttggggatttcttgtttttctttcccttcgtcgcctctgtattcaacctgtatataaaattacaagttttataactacaagttactcatgtaaatcacttttaaaaagcttttaaaatccgttgtaaaatcttatcgaacactgcctatcctttaaaaacgaatttcaatcttttaaaaccccattaagaagtctttaaaatcccttataaatacatatctaacactgcctatcttttaaaaacggctaaaaatctttaaaacacgatttataagcttttaaaatcccttgtaaaaacacataccttttctaattcctcttcttttccttcttcctcttgcttttcttcttcctgctcctttttttcgtcctcttctttttgttcttctctagtataactggcaggaactctttcgatgcctaaatagccctccagccttccaattttcttcttaagaacctcacaattttcatataccagttttaccttctcaccaaaggacattgatttcctttttctgctttgatgcacaactgtttcaattgcaggtttcaagacatgatcaattcttccttgatgtccttgttccacttgaatccatccctgacaccaatccttcttgctcattctatatcctttgattacaagatcaaaaacatccaacagatccttgtcttcaggattcttctgtgaaaccaagtggtcgtattcatgagtatgaacaccaactattggtgtcacttcaacctgcaaagataaacaaaattccaaactgtgtaaaaataatgtacaattcttaattaaccttttaaaatccgttgtaaatagtttaaattgcttttaaccctttgtaaatctttaaaacttgattgtaaaaactattgtaaaacatactctttatttataaacagtgtttaaaacataaaaaaagccacagctaagaaaatgtaccttgtcaccatctgctatcattgttatagcttttgcacttggagatgatgttgatctccattggagaattaatggaatatttccactagacgattcatctctagtgccaaacttttctcccaacttctgaaccgatgataatgcccatatctgaattgattgaacaaatccaaatagaccatattgtttccttaacaaatagtcattaccgattctcttcacttcagttaccaaatatgagtacacaatctgcgcccatggatacttacagaacttttcgaaatcagtagctctcttcagattctcaattggcagcattgtagtcggatttcgagctagcaatatgccctccactagtaacgaacccgccaatcttagtctctcctctggctgcatttttttggaacgcttttccaaaacatatgtaagatctaaaaaagtcatttccttgttaatccacacatcttttttctgctttctcttcaaagtctgattatcttttatccaccacttttctttcttctttctcttcacatttggactgcttcccgatgcatcatccattggaagtcctgttgttatgataaattctctcagggagaatcgcataggttgatcagcaaatacaaaccacaattcgtcattgttggttagtattcttctctggagtaaatgatgaacgatatggcttgaaaatgctaagtccattttagcgaattccactataggacccaagaatgtgtccattaatgtgttgaactctatcggctctaaagctttcctgacagtcgagacaattttgaaggatgaatgctttgatacccttgtaatattatctacttcgctgcctggttggaacagtcttttagggaagaacagtttctttgtactcatatttctcaaaacctgattaaatacattaacacagtcattaaattaacacagttttgaaatagttttaaaaatcatttttgtaaatctattatgcatttatagttttcgaaacataaacatagtcattacaagtcgtttaaagaactttaaaaaccctcgtaaaactatttttcaaagtcattgcaagtcgttttaagactttaaaaacccttgtaaaacacagtcattactccataatcctttttaaagaccgttttgaaaccattccaaaaacaaaattttaatctttttcaaagaacacagccgctgaaaatagaaacaaaaaaaacttttccaaaccaactccaatcaactggtaacccataaattaagtgaggatctataaattaaaacacaaacccaaacatcaatctatttactgttgaagtttcaaaacgaaaaaaactttaaaattgttacaacagagaagttaatcggcatttgaaatcttctttgaaggtttttgaaacccaaatatcaaactttaaaacataaatctatcaaaattatataacaatttccaacactccttcaaaatcccaaatatcaatctattttacttgtttcgtttttaaccgaaaaacctagaaatgctagaacaaaaaagagattcggcgaaaattgaacaaacccaaatgttaaacttcagtttcgtaaattagttaccttcaattgcttcctttttgctggataatcagtttttcttcagattgttgaaaggaagaagacgaagacgacaatttgtattcttttttttttttttttggttacttttttgttgtcttttcacggtttccttctttttttgtttttgggttatagtgaatttttgggctttagtattttttgggcttttagtgtttttttactaaaacaatttgtttttctaaataacaggcctaggcccaattagtaacagatacagtgtttaacattactgtaactttttcaacggttgatattctcttttaaaaacagttgtaaatcattttaaaaacggttgtaaatcttttcaaagtgagtgaccctaattcggtgaagatgtcagcagccaatccctgtttaatttgtttttaggttatagtgaatttttgggttttagtgttttttgggcttttagttttttttaaactaaaacagtttgtttttctaaataacaggcctaggcccaattagtaacagatacagtgtttaacattacggtaactttttcaacggttgaaattctcttttagaagcggttgtaaatcattttaaaaacgattgtaaatcttttcataataacagttactgcagctttttcaacacttttaaaacgcttttaaaacagcttataaatcatttgtaaatctcttttaaaaacggttgtaaatcattttaaaaccgattgtaattttttttcataataaccgctactgcagctttttcaacacttttaaaatccttataaagcagcttgtaaatcgtttaaaacccctgtttaaaagcatgtttaaagtctttttccattcaaatcaaaaagcacctgttaacccaaacaaccattataaagtaattttgtaaaacaggagttgaactaaataaacttcataaatcttgttccatacagatgttcataaaatattcaaatgacaaagttttatgaaataagaaacaaaagctgataaatctatcttatactccactactttttgattagtagtctgctacttctacaaagtgactgaccctaattcggtgaagatgtcagcagccaatttattcctaacgttttgaattatgttcccttcaaggttcgaatggctggtatacattgagtaacattccataaacttcagcatatagataccagactcttcatttctaggagtctacaaccaaaaaccaaaagaattacttaagcaaagaagttatagaagtcaggacttacggaatattcatttctaagaatatgatatatttaaagaagttacctgaggaaaagtggtcaggactttgatgctaaatggagagacatccatgtcttcttttttgaggatgttccaaacaatgtatgacatagctatagagtaggcagcaacatatttcttctgttaaataagaagctgcacattcccatatacaaactgtcttctgttccaagtggatgagcaaggcaacccagcattttcctttgatacagaaaggagccaatatccacttggtttcttcctctattatcagcttactgatttcttcagactgaaactgaaatccctctttgttatccaaaaactccatgtatgactcatcaatcacatttaagaaagacgatccaacaaatacaactgatttgttttcgaataattctggattgctttccttcctcgttttcatcaactccaaagctgcatcaacatgctaaacacaacaaaaataaaaattatcatattagaaaacccctttaaaaacgattgtaaaaaatgcaaaccctttttaaaataccttgtaaatcattctacgccacatacttatgctttttaacgattgtaaatcaagttaaacacttttaaaagcttttaaaatcccttgtaaatcattctatgccactaagttctgcttctaaaacgattgttaatcaattaaaccctttttaatagcttttaaaatctcttgtaaatcaatccttaccattttctaatccgttaaaaacgattgcaagtcatgtaaatcctttttaaaataccttgtaaatcattctttaccactttcaaatcttttaaaattgtttataaaccatgtaaccctttttaaaatcccatttgtaaataacttaatgatgctttaaaaactatatgtaattcatgggttaccaatttgacaaggttttttagaaatatcgttgctgttattgctttccctggcgtctctagggttgtaaaccactttctatctacaatatttcccgcgattgatagtggcctacaacaacaaaacagtcaacaatgatgcttcttccattattaaaaaaaactcactatcttactaacaaaactcacttgtttttccttgacttcttccattcagccaatttttcaagtcttgtggcatcaactttcgcaaatggatgcaaaattggatgcttcttcttcttagctgtgaaaggtgcttgggtatgaatggaaggaaccgtaccccgcttactctttctttgcggagcgggctgaaaatcatcattgtcgccatcattatcagcgttatcaccatcattgccaataattttccttttcttactctatgcctatcaaaaagaatataaaaaacagatgtttaaaataccttgtaaacaaaattttcaaaatcataataaattagatactaacctctttccttgttggaacatcaacatcagcactatcaacttgtttctgcctctttctcggtacctagaatagtaaaaaacaccaattaaaagtacttttaaaatcccttgtaaatatcataacaagacaattgacaaattttaaaaacagtactgttgcaaatactaacctgttttcttgttttaagattatcctcagcatgaacacttggtttaactctcttgttctgaagttgcatgaaagataaacttttaaagatttgaaaacaatattataaacacttggttagataatacaaatttttttaaatgctaacctcatttcttcctctgctaactctcttcttatccttttgaacatccagactttcttcagacaaaatattgaaatttggtgtagaggatcgtggagtaggagacttatccttgaaaagataacagaatgtaaaattataaaaaggatactaatcatttttgtaagacttttagagatataaatcactgtacttttgatgattcttcagctacttcatcaccaacatcacgttgggtgttttcatcatcacccggatagctcccatactgtgtgtttggctctcggattgaatcttcaaatgattcattgtcattctgcaacaaaataaaaacaataagtcaatcattaatataattagtagacctttaaaatagcttgtaaagattttcaattacctctgcttttctttctagtcctccttcttcttcagcctgcgaaaaaaaagagtacattgtaaaggtttactacgtatttaacctttaaaatacattgtaaaacctttcctttcaaatagcttttaaagaaacatttacaattacctctggttgtctttctactccttcatcttcttgttttctttcttcatcttcctcagatctctgattattcttttcctccattctaatgtccaaaatcctctcaatcagctcgactctcttgttaagatcttcaaggattgtcaaaatcctgtcaagcttctcgctattagatattttgttattgattttgttttgacctacttcttcaagggcagcacaaacatcaacgcatcttgtattccattcagttttcttcaatctgtagcccatattaacaagtcccaaaatatgttggaattcggtgtcgttgaaatcaggaactaacgacttgaattcttctgggtttccaataattgtattcacctccatctacgaagatacaataacattacaaatcttgagaaagcagaacttcaaatctaaaaaccatttaaagaattctgtaaatagacaaaagcttacctcagaaacatcatttacaaggtttacgatcttgaaaaactctggagtagtagtgcttttccacttcaatatcaatggatattcagattggaattccttatctttaactccatatgctgcaccaaatgctggaactgcgctcaacacccatattgttagcgctagtccaaatcctctcaaatcatatttctcttttgcccaagttttctcgtccattctcagaattgaatttgatagaacactgaatgcttctttaccccacggttgggctgtgtacatctcaaaatcagaagcatgctgcaatcttggcaaaggtatcttctcttttccatatggtgtcaaaagaattccttcagtcaacactactgcagcaagacacaacttttcttcatcttcaacagcaggttcaccttccttaggttttaaaaacaatcaatcttcgagatcaccaagagtataggatcctttactagcccaaaagtatggttcttttacaggatctttcccctttcgtcgaagttccctatgaacaggttcacattgaattcctgtatgaacaaaagacagtgtagagactattattacaggttttatagtaaatactttaaaaacgattgtaaatcatgtttaacacttttaaaagcttttaaaatcccttataaatcattcaatgccacttacttatgctttaaaaacgattgtaaaccatgtagacacttttaaaatcccttgtaaatcattatatgacacttacttatgctttaaaaacgattgtaaatcatgtttaacccttctaaaagcttttaaaatcccttgtaaatcattctattcaacttacttatgcttaaaaaacgattgctaatcatgtttaacccttagaaaaggttttaaaatcccttgtaaatattctatgccacttacttatgttttaaaatcgattgtaaactatgcaaacacttctaagatcccttgtaaatcgttttaagacacttacttatgcttttaaaatcccttgtaaacgtgtttaacacttctttaagcttttaaaattccttgtaaattattctatgctaattacttatgcctaaaaacggttgtaaaccatgcataccctttttaaaatcccttgtaaatcattatctgccactaacttatgcttcttaaacgattgttaatgaagtaaaccccttttaaaagcttttaaaatcacttgtaaattatctatgacacttacttatgttttaaaaacgattgtaaactacgcaaacagttatgcaaatgccttgtaaatcattctacgacagttaattaagctttaaaaacgattgtaaaactttattacctgttgtgagatagaactctctcaaggagaaacggataggttgagaatcaactctaaaccaaagagttgatccttttgttttcactctctgctgcatgagatagtgaaagatttttccagaaaatctgattcccttcttagccttcatttttggtcccaattcaactagaggaccaagaaatgaacttctaatcttctgaaataaacactcgcctaaagcttcctctactttactaactaaattccaattcgagtattgttgaacggttcccagtgcaatagattcctcaccttctctgtagatttgttcaggcaatgtaaggatttcactctctgaatccatgtgcaaaacatgttatgaaacagcgtcagatctactataaaattgactataaaatcgactataaaatcgattataaaaacggttaccgtcggatctatcgatatctctggggattgtttgcgtcgtagagaaatgatctgaatccttcacagaagaacaggtttatcggagaggaaattcgtctgcgattttggggtttctcagagagaaaattcgtcggcgattttgagtgaaatcggagaggaaattcgttggcgattttgagtgaaatcggagaggaaattcgtcggcgattttgagtgaaatcggagaggaaattcgccggcgattttgaatgaaatcggagaggaaaatcggagaggaaaacgaagaagtttgtgccaaaacgaagaagtttgtgaaacgaatgtgaaacctaatcattcagagggtaagacaatcatttgccatattagaaggggtagttttaaaaatggccttcaggaaagggcacttttacaaaaagttattagaataagggtagttttgcaaatctcccaaagaattactaacaactgtatgtctaatttaatttattattttatccatgtgatattagaaaaactaaaagttgattaataaaaacttttctcctccttaaatatagtaaaataaatgttgcaggaaaatatgtttcagccgatcgatcctaacgctggagaacaaactaatttgcgtaatgatgaacaaaaacataaaggagtttcataaccatgcatcggtgttgcggtcttctaaagacatattgacgttaacttgtgcataggcgtttaatgcggtgacgttaatttggcttacacctcacatattaattagatccagtccaaaatagctaagtaaaatatttttcgagtaacgatgttcttttcacttgcgtggctgctatatattgggctagaatgctagatagaaaaccaaaaatataggagtatatatgttgataccattatgagttctatgctgcttagtctcatttttaggagcaatctgctcgaacgagcatgtgatattatggatgagggggtactgaaatagttgcgcatagagacatacctgatctgctgaagtcatccctcaaactcaagcatataatcctaatgattttctctcttttgaacctagtttattgacccggatcccggttagtttaacatttcgaaatgttatgtttttaaaatcagaatcatattgctacttcgttgatttgcttgataagaaaaaaatgcacaaaattcacataaatcgtcaataacctttatagtgatgtatatgactatccgattactgtgaatagttacactggacgaaattactgtgaacaaagatgagagtgtcaatgacactattcagatcaaaggagaaccaccggatgctcaacaatttcgcaaaactcaatgtaagcttctaaacccttatacacttcaatggactaacttgacttatctatgtgtaggtaaaaaaagttttgaggacaaaacctcttgaagagggaggggatgatgtaagaatgggagctgacgtaccggctgatgcactcgttgacagactgcttgttggatttttttatggaccttctgacagactacctgaagtacttcatgtatcaaaccagcttgtgcgaactaaggaaagctatcctttccttcccttttgtgcgtcccagagccacatatggaagcctggagatcctctacgccacctagaaccattcacacttaatccttggtgcatcattccttatgtgaacccgcggagccaagactttccttttccggagctaaatgagatcaaatcacaacaactctattttgatcatcttttgggaattaagaagcttcctacaatgactctagacgtcccaaaatcacatcacttccagcccaagttgtcaagactcaagacacatcacaactttccttatttggccgatttcgtcattaaagttccaacaaccatattttcatttattgttgcgatttctttacttctttagagcatatgaacattgtttgagcctctatataagctcaccttagttttcatttgtattcaagccttttacgaaataaacaagtattttctttaaagagtgtctttgagttttatgcattagaagttagtgtggattcactaaagtcttgtgtgtgcggatcaattagcttgtggattcaagttgatttgtttgtggtttgattgtggattcaatcaagcacgttgagtgtggattcattcaacaaaacctccatctttcatctctaccatcattcatcgaatcattcaagctttaggtcgacaaaccgagaagcgtaaaccctaggtggattccgaggtttgcatcattggtatcagagctaaaagctccaatcccataaggtgaactcgttcccttttatccctttcaatttctgttttcgttattcattttttttattttaaatcgaaaaccccataaaaatttggttttgcaatttgttttgatttgcttccacaaccttaatagtgaaacaaaataaaaattttaattgtctagtttgttatttgtttcaattttgctattctcgtttttaaaaagaaaaataaataaatcgtgttttgttatttttgacttatttgttgacttacttcctgagttaagttctgattcattgtcttctttgttttactctctttggcgaggtaccacaaataaaatttgagaacgatggagacaataatctactctagctctgatgaagaggactcatatggatgtagtcaagactcgtactacaacgagactagatttgttgagtcatggcatgatgatggctactcatcaagctcggattttgaggaagaaccagatggtggagcacctgaaccggaaccaccagaccgttatagcagccatgccacaccgccgagctattcgaagccatggatctcatggaatcccatacccaagaccaatttctatcctactttctaccccactcgcaaagttatatacaaattatttgtgcataatggtagtaaaacttacggacctgaattctttttgttttcaggattgggctatctacagtgggagagtaatatgaattactattttgagtttcattccacagcacaagaagacaagctttcgattgccctaggacaacttaagggtagtgctttgtggtggtgggatcaagatgagtacaaccgatggtatgaaaggagagcaccgatccgaacatgggagagactaaagtggaacatgtgtgcaaaatactccccacaaagtttgtcaccagcacatgtggtgcaacaaaagcaaaaaccaacatttttgcctcaaatgcaagcgacaactcaaggtaagtgtacttttcaaacaaagcatgttgaactaacatgttacaggtgtaaacaagagggacacattgccaagatctgccccacgagagagactacaacaaaggtaggattggagcaacaagaattgttaaaggctaaagagaaacaagaaattgtttcaagtccaaaaggtaaaaatgaacaagccgaaacttgtcaaactgatttaaacaactcaatgaatgtgataacacacttgtctagtgccaaaagcattgcgaaagtttcaggtacaaaagaaaacattacagatcaaggagaagcttcaacaatggagaaagtgttcacggaagaaagtaaaaaccaaggaggaccaacactggacgaaattactgtgaataaagatgagagtgtcaatgacactattcagatcaaaggagaaccatcggatgctcaacaatttcccaaaactcaatgtaaccttctaaacccttatacacttcaatggactaacttgacttatctatgtgtaggtaaaaaagttttgaggacaaaacctcttgaagaaggaggggatgatgtaagaatgggagctgacgtaccggctgatgcacttgttgacagactgcttgctggattttttgatggactttctgacggactacctgaagtacttcacgtatcaaaccagcttgtgcgaactaaggaaagctatcctttccttcccttttgtgcgtcccagagccacatatggaagcttggagatcctttacgccacccagaaccattcacacttaatccttagtgcatcattccttatgtgaacccgcgaagccaagactttccttttccggagctaaatgagatcaaatcacaacgactctattttgatcatcttttgggaattaagaagtttcctacaatgactctagacgtcctaaaatcacatcacttccagcccaagttgtcaagactcaagacacatcacaactttccttatttggtcgatttcgtcattaaagttccaacagccatattttcatttattgttgcgatttctttacttctttagagcatatgaacattgtatgagcctctatataagctcaccttagttttcatttgtattcaagccttttacgaaataaacaagtattttcttcaaagagtgtctttgagttttatgcattagaagttagtgtagattcactaaagtcttgtgtgtgcggatcaattagcttgtggattcaagtttatttgttcgtggtttgattgtggattcaatcaagcacgttgagtatggattcattcaacaaaacctccatctttcatctctactatcattcatcgaatcattcaagctttaggtcgagaaaccgagaagcgtaaaccctaggtggattccgaggtttgcatcacaacataaccggcttttaacctcacgtaatccgctatcccttcgataagccctcctggaacccgatcagccgcaccgaaccactgccaagaatgggccacctcgtgataaatcaccccggtaaatccaacccttacatctcccgagttacccgcgagagatctagcgttgaaaatgtatctcctttcccaagttcgtgttgtaggccacgctgttactattctctatgaagagtgtgatgtttgtaatggtctttctgtctaaagggttagtttgttggaacaaacgccacgtgaagtctgttgcagatctcactgattgtttgccataactgacgccgccgatctcatctcgaaatttccttcctccaggagagtcgccagtattgtcgacaacaaagaagtcaactgcattgaccatagagactgcgagcattagacagattacaaggaagatttcgtgacaagccatttttttttatctttgttagttttgtttgcattggtttagatttagaaggagctttatatagaaacttaatggaattatgaaaatttaaagataaaaaatatttgagatatactagtaatcaatggaagacctctccttgatcccacaaaggtagactaattaataaggccaatgcaagtagacttagacgacgacgggttcaagaccatcatgtaggagatttagtcacgagacttccgagtacccacgatataaatttcgaacaaggcccatggtccgattaagaaatgtaagtaacggtagggttagagattttttttttcccgtgaaacggtagggttagagattgtgaacatgacaggtgggagacaatggctttaactttaccaaatagacttcaaagaccttatgttaagaattacagatctcgtttacaaaaataaataaaaataaaaataaaaaaggaattacagatctaatttctcctcaagaacatgaataaaaagcaagaaataaagtgcacacaagatttatatataatggtttactcgtaagagctacaaccactttttctatcaacgtctcgctctaactctctatttcggtaataaatagaagtgattaccacaaatacatataaaggaaaaattctaggacaaacaaacattggccaaaagtactcaaaatacttttactaaaactctcagaaaaacatacgtttacagaattaatcataccttcacagactagaacatacgttcacaacttcaaccatatattcacaaaatcagctatgcgttatacgaacagccatgcgttcacaaattgctgagaaactcttatcctgagatttgtctccacatctcaacaccttagtgttcagcagttttggccacgacatgttaacaacaactggtggaccgatttagtagtgttaaaaaattatttactttaaaaaaaatatatttaactttaaaacttctcaatctaacttctttgttttgttttttgcagcaacgttagtattggtatcccgtttaccacaccatgtttaagaatgaactgttataacatgatcatcaacatgctgtacaatcaagtatactcaaaccccaaagaagagcatacggttattttacatggtaatgaatgtctattcgttataactcttcataatattttaatttactaatatattccaataaattgttgcaactgtttacttgaatcattacaaaatttggtttgcttgaagaatcactgtaaacatttatttattttacgaacattgtaatattgtagtttattaggttttaatcgagtaatttaacgttttatgttaattagtaaacgttggtcaaattttaggataaaattgttaagtcaatgacaagttgaagattaaatttacgcacatgatagttggagaataattgtgttaattacaaaaaattggggaataaaatgagtattttcccaatatataaataatttaattttgtgattctattcaatccaattaatattagtatggttgattaaaacttgaactaattaaaattttattttaggcatctttggtgctcgtggcgaaccaagaagctattgaagataacacttctatgtataagcatatgctagacataatagaagacctttttgatcagtagtctacgaacaagagattgtgccgtgatcctaatgatgttgatgcgatgggtgatatgaaacttggaaaggatgtgcttgacaacgaaaagtatcaaaataattgatggcttatggatcaagaaagatgatgttaataaggttaagaaggttattgacatgaagatcaaatgtgtttcatgaagatggaaccgaatcaaccttgattcagttggtcaatctgatcttcatatgtcatagtatttctatggtttgctatgtttgagaactttttgtttggtttaactgtttttctctgaaattcatgtttaaagttttatgttactttgattattatggatttaatttggctttctttcaaatcttcgaataaattggattttgttttgggacttatttaagcttcaatattttcaactttgaaagtgttgttgtagttagttggctatacagatcttacaacaacacttacataaaaattaatacatttataagaaacctaaatcaatcccaaaaattaggatctttcatacatacaccaagattcaattttctcctcctacaaatgcaacaataattaccgaaaagtaaagtagagcatgtttaagtgttgtcaatgaaatatatcatttctcattttgaaaacagatattcaaactttttggcattcttatttcatctgtattcttcttcggaaaaatgggtaaaaaaaaccttcactttttacaaaaacatgtaaaaaaccctcaactttttttgttagtttttaaaccatcaccttttaataaatggtaaaataacacctagtaatattaaaccaaataaagtataatattaaaacataaagtaaaacaacttaattagtttgtaatttatactttccaaattcgagtttacgatattttttccagaatttagttattgtttttttggcgatataaagaaataagtttcaattagaatttgttatgtaaactaaaatcaatttatagcttaacacattttattttatttttctttgtatgttttctattttttgaagttttggatttaaaatatttatgaccaaaattcgttctaaacttgtgtgactgaaccaaataagtttttcttaatataaattttatattttgttattacaaaattagtttggtttctcgttgatgaaattctagaactcaaccaatcaaactttctttcaactaaatctatatataaaagaatatatcatacataatataaaataattactttatccaaattaaatcaaatctaccctcgaaccaaaataaataaaatttgaatagattctggatatgttatcttcaatatgtaacccattttgaaaaattctttctaatgcctttttcacactaccccttttcaattctactcttttctatttaccatttttatttataccctatttaaatttttaatgactattttacctctatttgtaaattgatttaggttaacaaaataaaatattaatattttttgcctaaaatattccaaaataaatttcccgccaaaaaatttcggaaaaaaaatttcccgccaaaatgttttttcaaaaacatttttccagccaaaattttcccgccaaaaaatttcgaaaaaaaaatttccgccaaaaacaaaattcgaaaacattttttccgtaaaattttttttggcaggaaatagatttacaagagattttaaaagggttttaaaatatttaaaagatttacaatagattttaaaagggtttaaaagatttacaatagattttaaaagggtttaaaagatttacaagagattttaaaagtgttttaaaagatttataagggatattaaagggctttaaaagaaatacaagagttttttaaagatttttaaagggtttaaaagtgttttaaaagatttacaagggatttttaaagggttttaaaagatgtacaagagtttttaaaagattttaaaagaaattatatgaaaaccctttaaaaactcttgtaaatctttttaaaaccttttgtaaaggttcacaagagttttaaaatggttcaaaaagagttgtaaatgttttaaatacttacaattctttttctaagagttaaaaaatgtttgtaaagattttataagagttttaaaaggatttacaaaggtttaaaatccttgtaaatccttttaaaactctttaaaaactcttgtaaatcatgttttacccttttatacgtttttaaaatccttgtaaatcattctataccacttacttatttttttaaaacgattgtaaaccatgcaaaacttttttaaaatcccttgtaaatcattctttgacacttacttatgctttaaaaacgattgtaaattaggttaaccccttttaaaatcccttgtaaatcattcaatgtcacatacttatgctttaaaacgattgtaaaccatacaaacacttttaaaatcccttgtaaatcattctatgccacttacttatgctttaaaaacgattgtaaatcatgttttacccttttataagcttttaaaatctcctgtaaatcattccaataccacttacttatacttaaaaaaagattgtaaaccatgctaaccctttttaaaaatccttgtaaatcattctatgccactaggggtgtcaatcgggcttgaagcccgcgggccaggcctgtatagggatgcaacggggcgggtacgggcacatttaataaagcccaaaaaaatgcgggcctcacggtcatggtccgtttggatcgcggttgaaagaagcccgacccatttttgaccgcggatttgcgggttgacccgcaacgtcttctttagcaccgttacgacttacggtgaatcgttgatgaattttgatatggtgatggcatcaccaattcaccatcgtttcttcttcgtcgtcaaaaaccaaagtctccttctttcttcaatcaacgtgtttgttaatggcggctcctattcaagcctcttcttcctccaccatgggtatcttcactcttcgttaatggtttcctccatcatcgcaggtactacttaccttcttcttcgatgaaatttctgctaatcggtttgatttttggttattaatcatatgaaattttgtattccttatttgtttgactgctctatgattatcatgtagtttgattgtgactgttctgatttttttttaactcaaaactgatcatgatttttaacgagaaaacaagttgatactctctttggttccgtggaatttaaggatcatcgaatcgggtttaagctttgatttgagtttattgttgtctctaatgatgctttgtcgccacaagcagcaaaattttcttttcatcgagttgaccaactcatggtcttgcttcgattttcttcttctcagttatgtttgttgatgtctggactactaggaaacacatgattagcttgtgatcgagaactaatgagcttagcaagttacagttctgctttattatgcaaaatcagaaattgactaacaggtctttgatatttgattcatatatgcagttgtttcttgtttttgtttgcagttgcagaaggcaaaaagatggagcaagaacccaatatatgctggtatgaatagattcagccactagctcgtctcagaaacagcaacaaatttcagatagggagaagctgtcaaagagaaggtactaattccaaactctttcatgcatttctctgtgtgtttccttttagaagacgagaattgtagttgtatacaacatctagttttgggattatgccctgtgtagtaggtatctttgtgtcttgttaatgaagcttcactttcatatatatgttgcttagtgtcgtgcttaagcttcatatgttttcattagccacattgtttttgaatcgactttattctttgcattgattatcttttatgggactttctgcaactttaaacaactttttggattgaatttcgtgtcttattctgttatctactcttggtcaaaggttggtattacttaatctcataaccatgtgttaagaattaccctattaaacctctaagctctctttatgtcatcaaactctctgtatcatctacaataaaattgtcttataattgacttaatgtcataaaactttttgtaatgttttttaccagacgttgtcagacataaaacttaatgtcagacgttgcataagataagagagagtatcaaatttgtgcaagcttctgaaaaacgtgagaaattgtttgcaaaatgtgtggaagctgttggtataaagattaagtcgggtttgattttggatgtggcaactaggtggaattcaacatacaagatgcttgatagagctctcaagtatcgagctgcctttactaatctcaaagtcattgatgcgagaaactacaattttctccctacagaagaagaatggcatcgattgaagcaagtgtgtgaatttttagagccttttgatgtgatcactaatctgatttctggttcttcatatccaacttcaaacttgtaattcatgcaagtttggaagatcaatgactggttggtatcaaatacgagtaatcaagatgaaatcatcagaaaaatgattatcccaatgagagaaagatttgataagtattgggaagaaattggtgatgtctttgcaatggctacggtgtttgatccacggttcaagctaacacttgtagacttttgttttgcaaagctgggtaagagtgatgctaagataaagattgatgatttacgtactaagctgaagactttgtttgaatcatatgagaacaagtccattttcacgtcatcgtctacagagacacgtgaaaccaatcagcaaagtgagaagaatgcagaacaaaagaagtgttttggcaattataaagtacgtaatcaaacatttattccaatttttagtgtggttttagtaattgtttctttagtgtttttttggctgaaattgatgtataatctcgtaggatttttttgccttccgcaaagaaactgttgttagtagtggaaagtcttctttggatatgtatctagatgaaccaccattggacacaaacaattttgagagttgggatattttgaactattggaaagataacactcaacgctatggtgcattggcgtccatggcttgtgacatccttagtattccaatcacaacagtagcctctgaatcctcttttagtattggagctagagttttgaacaagtatagaagtcgtcttctaccgaaacatgttcaagcactaatatgcacccgcaattggttaaaaggttttgaagcatatgaaaatggtaagcaaataattttcataatttttgtgcttacataattataaatcatgcattgattttgttatttttatgggacatatatagaggaggctgaagtatatgttgaacttgaagatgagaaagtgcctacttatgagtcaattgttgacgatgaagcttaatattgatgaagagacaacttgagttggagattcatgttttcagctttgaaattcagtttatgactttagtttaatgtttcagtttgagtacttgagttaaatgttccaacttaaaagttggagtttatgtttcagttttagtttggattttgtttatgtttcagactttcagttttaattttattttcagtttcagtttgactttttgtttctgttcaagttttgccaattacaataactttttaagtagaacagcttctttgtggcactttaatcaggaaacaggttttgtttctgttcaggttttggttggaactcggagtcatcatggattgatggttctctgcttgaacaccatatttgatatgatcaagagtgacaagagcttagatgagtttgaagtgacttgctcatatcttgaagtttacaatgaagtaaaacttacagctgagaacatggaggatttctacaatgagatatcaactcacggtaatatcaatttatctttttgtgcttctttgataagcttagttttattgtctgaatcattgttctaattgctgtgatacaatatgatacaagaatccaaagacaaaggcaagaatcgcagctcctccacacctttgtccatcaatatgtatgcttctcttcttctaaatttctctttttttcattgtcctttgatgattacgtatttgtggttctgtttgtataaagagatatgtggctgcacaggttttgtagggaaaggagaaactagaagaatgattagctctgcatatgtcatagcccgcgggccggcccgttagaccaatgggcaatgcggggcgggtatgggcttcgttttgtcgcccgcggtcgttagcgggccggcccgttatggactggaaagaagaatggcccatcgcggacagcccgtttggtcgcgggccagtccgtttgacacccctatatgccacttacttatgctttaaaaacgattgtaaatcatattttaccattttataagcttttaaaatcccttgtaaatcattcaatgccacttacttatgctaaaaacgattgtaaaccatgctaaccctttttaaatccattgtaaatcattttatgtcacttacttatgctttaaaatgattgtaaatcatgttttacccttttataagcttttaaaatcccttataaatcattcaatgccacttacttatgcttaaaaaacgattgtaaatcttgtaaaactattgtaaaaagtcttaaaatgatttacaaaggtttaaaaaagggttttaatttacctatgtttttaaagactttataaaagttttaagaggttttaaaatgatttacaagagtttttagcaactaccaaagctttttaaaaactttacaaggttttttaaaagagttttttaaaaaatttcaaggatttttaaaagcatttttttgcctgggaaaaaacatttacgagaaaaaaatttggcgggaaattttttttggcgagaatttttttttttggcgggaaaaaaagtttggcggaaatttttttttggcgggaaaaataaattttggcgccaaaaatttggcggaaaactttcagtttccaattacatgttcttattagatgagggtaatttggtcgttctgttcaagggaagggatattttaaaaaatgaacaatataaaagggtattgttgcaaaagggtagtaaaaaaaggataattttgcaaatttcccaccaattttctgggctaaaattaaattgtttacataaccaacaatttactgataatgaaaccgtttttctatatctcaaatagatttgaaatcataatttcatgtaattatttaacatcaagactttaaaaaaacttaaattggaaaacaataaattgtaaaacagaatttagaaaaacaaatcttaaaccaaattacttttatttatttctatatttttataatattttgtcttacttaaattcattttaataattttaggtgttaatttaccatttttaaaaagattagggtttataaacccactaaaaagtcaaggtttttttacatgtttttggaaaaggtgagagctcttttacccatttttttgttcttctttttttttttcttacggatctctagtacatgataagaagataatgacaaatgtagaggtgtaatcccaaatagtagatatgtaataagggaaaaatccaataaaattattcaatgtaacaatcacttacacttcaaacctttaaagtttagaactgttacaacaaacaagaaaagtgaaattttttttacctaaaacctataaagtggctttcgaattcgtggtttcgcaaaaattaatggataaattgagtcttataaaatttttcgttataaatactaaggtaactttaataattattttttgtaaaaattaacttaaggttatgattggttgggctgtaagaaattgttaaaggcactaaaaaagttacagtcctaaaattgaaacaatcatgctttagctttcctatttttctccccaaattacccttaattagcgacccatagacctaattcatttcttcactctctctcttcttcctccatcggaaattgtgaatgccgttgaatcccatgccgtcagaaataatgagtttactcgcagtgaaaacccatcttcgccgtcgtaagtagagctgtgtgtcgccgtcgaatctcttgcgtttcccaggtttgattttataatgttagcttaaatcttcgttttcgaattggtttattcgatttttgttgttgattatgtgaactcgttatttaaatcctgattcaatcgacagtttgacatttgcttcagcttcgaatttgaattttgtttgagatttgatgattgaatttgtttctaaaatccttgtacattcgttatactgttctaaaatccttttgaattcgttatactgtttcgtgatagatttgcttatgtgaattcgttatactatttcgtaatagattttggttctgatttagtgtttacctcttttgcatatgctttcgtgatagatctatgccacttacgctttaaaacgatttgtaaagcatgttaaccacttttcaaagtttttaaaatcccttgtaaattattctatgctacttacgctttaaaacgatttgtaaaccatgttaaccaattttcaaagcttttaaaatcccttgtaaattattctatgctacttacttacgctttaaaacaatttgtaaaccatgttaaccacttttcaaagcttttaaaatcccttgtaaattattctatgctacttacttactctttaaaacgatttgtaaaccatgttaaccacttttcaaagcttttaaaatcccttgtaaattattctatgctacttacttactctttaaaacgatttataaaccttgcttctctctgtagtgacagtgtttttgtgggtgttgattttgttgttatttatcttatcaggttataatgctagaattgtattctgtttgtggcttgtggaagttgacaaacaatatgacttgggaatttgaattagacattgaattgggagcttctttagtgctcattgatgagcacattacctatcacgcgttggttgatattcttgtagaggattttcaaatagatagttcaaccaattctttgaagcttagttacaagttagtctccacgtctacaaccatacaatctcatcctttttatactaggaacgatagacagcttgcaacttttatgcacaaattctcacagagtggaggattgcttcagttatgtttgactgtagagcaaatttctgtgacagttgagcaggttttttaataaccttcttgtgttataattttaaaaatccttgtaaaatcattattaagtcagtgattgtgcttattataggctgagactacttcaaatccttttgtttctcattctgtccctaatgctcaggtactaatcgttttaaaaatccttgtaaaatcattattaacgtttttaaaccccttttaaaaatccttgtaaaatcattattaacgtttttaaaccccttttaaaaatccttgtaaaatcattattaagtcagtgattgagtttattacaggctgagacgacttcaaatccttttgcttctcattctgcatctactactcaggtaataatccttttaaaaaatcttgtaaaatcattattaacgtttttaaaccccttttaaaaatccttgtacaatcattatttaagatagattgatgtttgaggtaagctttttattttggcagtcgaggttaacctctaggattattgaggcgtttgtatctgaaacatctagtattcttgatcaacagtattctagttatgcgttttcaactggtctaagtgatgctgattctttatttattggaaaaattttcaaagacaaagatgaaatggtattcacgttgcggatgtttgcagtgaagcacaactttgagtttcatacagtgaaatcagatctcacgaggtatgttcttcattgtattgatgaaaactgtagttggagactacgtgcaactagggctggtggatccgagagttatgctattcggaagtatgttagtcatcacagttgtgactcttcattaaggaatgttagtcatcgtcaagcatctgcaaggacattaggaagattgataagtaaccattttgaaggaggaaaacttcccctcagacctaaacagctgatagaaatatttagaaaagatcatggagttggaatcaattattcgaaagcttggagagttcaagaacatgcagcagaacttgcgaggggtttacctgatgatagttttgaggttttaccgaggtggttccacagggtacaagtgacgaatccaggttctatcacttttttcaaaaaagattctgctaataagtttaagtatgcgtttctggcttttggtgcatcaattagaggttataagttgatgagaaaagtcatatctattgatggtgcccatctgacatcaaagtttaaagggactttgcttggtgcctcagctcaggatgggaattttaatttgtatcctattgcttttgcaatagttgactctgaaaatgacgcgtcatgggactggtttttgaagtgtttgctgaatataatccctgatgagaatgatttagtttttgtgtctgaacgagctgcttctattgcaagcggactttcagggaattatccacttgctcatcatggactttgcacttttcatttgcaaaaaaacttggaaacccatttcagaggttcttcacttattccagtttactatgcggcttctagagtttacacgaagacagaatttgattctttgttctgggaaatcactaatagtgataaaaagttagcacaatatctttgggaggtacatgttaggaaatggtctcgagcttattctccttcaaatcggtacaacatcatgacatctaatctagctgaatctgttaatgccttgttgaaacagaaccgcgagtatccgattgtttgcctatttgagtcaatcagatctattatgacaagatggtttaatgagcgacgtgaagagagtagtcaacatccgtctgctgttactataaatgtagggaagaaaatgaaagcgtcatatgatacttcaacacgatggcttgaggtttgtcaagttaatcaagaagagtttgaggtaaaaggagataccaaaacgcatttggttaatctggacaaaaggacttgcacatgctgtatgtttgatattgataaatttccttgcgcacatggaattgcttctgctaaccatatcaatctgaacgaaaacatgtttgttgatgagtttcattctacttacaggttttatctctattcttcacaactttacaggcgtttttaaatgttttaatatctctttttatggttttatctgtgtttatgtggttttaatctcagtttacatcgctgtaatttacaggtggcgtcaagcatattcagagagcattcacccaaatggtgatatggaatattgggagattccagaaactattagtgaagttatttgtctcccaccttctactcgtgtacctagtggcagacggaagaaaaagaggataccttctgtttgggagcatggacggtctcagccaaaaccaaaattacacaaatgcagtaggtgtggtcagtcgggtcacaacaaatcaacttgtgttgctgcatttagatatatctttatctccaaagaattgaatattgttgggttttttaatattttcttcattgtgtcgtgtcattactctcgtttgttaaaattactatcaaacttttacaagtaattttgaaggttattccaatatattaccttttaaaatctcttgtaaaatcctgtttaaaacgtctgtttaaatccttttaaaataccttgtaaatctttcgttatgccacttacatatactttaaacgattgtaaatcaagttaaacacttttacaagcttttaacttgaatcttttaaaatgtcttgtaagtcgtttactaaaattactatcaaactttacaagtaattttaatagtaattccaataatttacctttttaacatattttgtaaaagcctgtttaaaacgtctttgaaaatccttttaaaataccttgtaaatatttcgttatgccacttacatatacttttaacaattgtgaatcaagttaaacacttttacaagcttttaaaattccttataaatcattttctgacattaacttattcttcttaaacgaatgttaatcaaataaaccccttttaaaagcttttaaaatcccttgtaaatcatgctttaccactttattatccttaaaaaccgatagcaaaccatgtaagctgtttatgcctttaaaatcacttgtaaatcatgacaattcttagaaaaccataaacagttgacaatagtaaagcattttgattagatttgacagtcataattaaaatacaagtacaatcatagattccaaataataaaagtaaaataaacatgtttgaaataagtcagtctaaagaactaaatccatttttgccttagtagctctgtccttctctacctgcaaataaaattcaacctgtaagttattttttgcataacaataatattcaagtttttaaagatatatcgttatacaaaagaagagtttaacactaaccattattatcttgcagatttgttcagctaggtatttcacttctggatgagctcgaggcagtttgtcaggatgaatgagtaacgttgctttctttaaagctaatttgtatttcttctcgtcccacatatcccaaatttcgactttttgccatttactgtcgggccaaagaatctgaaatgtaaaaattccaaaatgattagaattaaaatcttttgcagcaaaacaatgatgtaatttaacttacttcttcaagtgacgatagtagatctcttattaatttgtttttcgcccattttttaacttttaggtcaatttcttccattacttcctgattcaacatgaccggcgtcaaaggagtttgaactgatacaaaaacaaaaacaaaaatatttagaagttgtttatcaaggcaaatcatctgtgaatgtaaaaagaacttacgactgctttgtccttgggtgatttcttcttcttgcgtgagagtggtgtttgattaacatcttcatcatctttcttggtctctcttggaacctgtaaacaaaaacatcaaaacaaatttttattttttgacaattttatcatgtgtttttaaacaattaaggaatgtagacctctgttgtttcttctttttgaggttgtgattctttctctgtgggtgcagtcccattatcttcatcatctgacaaaattacatatgcttcttgatcttctttgaaggtttttgaaacccaaatatcaaactttaaaacataaatctatcaaaattatataacaattttcaacactccttcaaaatcccaaatatcaatctattttacttgtttcgttttcaaccgaaaaacctagaaatgctagaacaaaaaagagattcggcaaaaatcgaacaaacccaaatgttaaacttcagtttcgtaaattagttaccttcaattgcttcctttttgctggataatcagattttcttcagattgttgaaaggaagaagacgaagacgacagtttgtattcttttttctttttttttgttacttttttgttgtcttttcacggttcccttccttttttgtttttgggttatagtgaatttttgggctttagtgttttttgggcttttagtgtttttttactaaaacagtttgtttttctaaataacaggcctaggcccaattagtaacagatacagtgtttaacattactgtaactttttcaacggttgatattctcttttaaaaacggttgtaaatcattttaaaaacggttgtaaatcttttcaaagtgactgaccctaattcggtgaagatgtcagcagccaatccctgtttaatttgtttttaggttatagtgaatttttgggctttagtgttttttgggcttttagtttttttttaaactaaaacaatttgtttttctaaataacaggcctaggcccaattagtaacagatacagtatttaacattactgtaactttttcaacggttgaaattctcatttaaaaacggttgtaaatcttttcataataacagttactgcagctttttcaacacttttaaaacgcttttaaaacagcttataaatcgtttgtaaatctcttttaaaaacggttgtaaatcattttaaaaacgattgtaaatttttttcataataaccgctattgcagctttttcaacacttttaaaatccttataaagcagcttgtaaatcgtttaaaaaccctgtttaaaagcatgtttaaagtccttttccattcaaatcaaagcacctattaacccaaacaaccattatacagtaattttgtaaaacaggagttgaactaaataaacttcataaattttgtttcatacagatgttcataaaatattcaaatgacaaagttttatgaaataagaaacaaaagctgataaatatatcttatactccactactttttgattagaagtctgctacttctacaaagtgactgaccctaattcggtgaagatgtcagcagccaatttattcctaacgttttgaattatgttcccttcaaggtttgaatggctggtatacattgagtagcattccataaacttcagcatatagataccagactcttcatttctaggagcctacaaccaaaaaccaaaagaattacttaagcaaagaagttatagaagtcaggacttacgaaatattcatttctaagactatgatatatttaaagaagttacctgaggaaaagtagtcaggactttgatgctaaatggagagacatccatgtcttcttttttgaggatgttccgaacaatgtatggcatagttatagagtaggcagcaacatattttttcttgacttcttctgttaaataagaagctgcacattcccatatacaaactgtcttctgttccaagtggatgagcaaggcaacccagcattttcctttgatacagaaaggagccaatatgcacttggtttcttcctctattatcagcttactgatttcttcagactgaaactgaaatccctctttgttatccaaaaactccatgtatgactcatcaatcacatttaagaaagacgatccaacaaatacaactgatttgtttttgaataattctggattgctttccttcctcgttttcatcaactccaaagctgcatcaacatgctaaacacaacaaaaataaaaattatcatattagaaaacccctttaaaaacgattgtaaaaaatgcaaaccctttttaaaataccttgtaaatcattctacgccacatacttatgctttttaacgattgtaaatcaagttaaacacttttaaaagcttttaaaatcccttgtaaatcattctatgccactaagttctgcttctaaaacgattgttaatcaattaaaccctttttaatagcttttaaaatcccttgtaaatcaatccttaccactttctaatccgttaaaaacgattgcagtcatgtaaatcctttttaaaataccttgtaaatcattctttaccactttctaatcttttaaaattgtttataaaccacgtaaccctttttaaaatcccttttgtaaataacttaatgatgctttaaaaactatatgtaattcatgggttaccaattttacaaggatttttagacataccgttgctgtgattgctttccctggcgtctctagggttgtaaaccactttgtatctacaatatttcccgcgattgatagtggcctacaacaacaaaacagtcaacaatgatgcttcttccattattaaaaaaaactcactatcttactaacaaaactcacttgtttttccttgacttcttccattcagccaatttctcaagtcttgtggcatcaactttcgcaaatggatgcaaaattggatgcttcttcttctcagctgtgaaaggtgcttgggtatgaatggaaggaaccgtatcccgcttactctttctttgcggagcgggctgaaaatcatcattatcgccatcattatcagcgttatcaccatcattgccaataattttccttttcttactctctgcctatcaaaaaaaaaaaaaaatagatgtttaaaataccttgtaaacaaaattttcaaaatcataataaattagatactaacctctttccttgttggaacatcaacatcagcactatcaacttgtttctgcctctttctcggcacctagaatagtaaaagacaccaattaaaagtatttttaaaatcccttgtaaatatcataacaagacaattgacaatttttaaaaacagtactgttgcaaatactaacctgttttcttgttttaagattatcctcagcatgaacacttggtttaactctcttgttctgaagttgcatgaaagataaacttttaaagatttgaaaaaaatattataaacacttggttagataatacaaatttttttaaatgctaacctgatttcttcctctgctaactctcttcttatccttttgaacatccagactttcttcagacaaaatattgaaatttggtgtagaggatcgtggagtaggagacttatccttgaaaagataacagaatgtaaaattataaaaaggatactaatcatttttgtaagacttttagagatataaattactgtacttttgatgattcttcaactaattcatcaccaacatcacgttgggtgttttcatcatcacccggatagctcccatactgtgtgtttggctctcggattgaatcttcaaatgattcattgtcattctgtaacaaaataaaaacaataagtcaatcattaatataattagtagacctttaaaatagcttgtaaagattttcaattacctctgcttttctttctagtcctccttcttcttcagcctgcgaaaaaaaagagtacattgtaaaggtttactacgtatttaacctttaaaatacattgtaaaacctttcctttcaaatagcttttaaagaaacatttacaattacctctggttgtctttctactccttcatcttcttgttttctttcttcatcttcctcagatctctgattattcttttcctccattctaatgtccaaaatcctctcaatcagctcgactctcttgttaagatcttcaaggattgtcaaaatcctgtcaagcttctcgctatcagatattttgttattgattttgttttgacctacttcttcaagggcagcacaaacatcaacgcatcttgtattccattcagttttcttcaatctgtagcccatcttaacaagttccaaaacctgttggaattctatgtcgtctgtgtggaaatcaggaactaaagacttgaagtcttctgggtttcaaataattgtattcacctcaatctgcgaagatacaataacattacaaatcttgagaaagcagaacttcaaatctcaaaaccatttaaagaattctgtaaatagacaaaagcttacctcagaaacatcatttacaaggtttacgatcttgaaaaactctggagtagtagtgcttttccacttcaatatcaatggatattcagattggaattccttatctttaactccatatgctgcaccaaatgctggaactgcgctcaacacccatattgttagcgctagtccaaatcctctcaaatcatatttctcttttgcccaagttttctcgtccattctcagaattgaatttgatagaacactgaatgcttctttaccccacggttgggctgtgtacatctcaaaatcaaaagcatgctgcaatcttggcaaaggtatcttctctttttcatatggtgtcaaaagaattccttcagtcaacactactgcagcaagacacaacttttcttcatcttcaacagcaggttcaccttccttaggttttaaaaacaatcgatcttcgagatcaccaagagtataggatcctttactagcccaaaagtatggttcttttacaagatctttcccctttcgtcgaagttccctatgaacaggttcacattgaattcctgtatgaacaaaagacagtgtagagactattattacaggttttatagtaaatactttaaaaacgattgtaaatcatgtttaacacttttaaaagtttttaaaagcttttaaaatcccttataaatcattcaatgccactaacttatggtttaaaaacgattgtaaaccatgcagacacttttaaaatctcttgtaaatcattatatgacacttacttatgctttaaaaacgattgtaaatcatgtttaacccttctaaaagcttttaaaatctcttgtaaatcattctattcaacttacttatgcttaaaaaacgattgctaatcatgtttaacccttagaaaaggttttaaaatcccttgtagatattctatgccacttacttatgttttaaaatcgattgtaaactatgcaaacacttctaagatcccttgtaaatcgttttaagacacttacttatgcttttaaaatcccttgtaaacgtgtttaacacttctttaagcttttaaaattccttgtaaattattctatgctaattacttatgcctaaaaacggttgtaaaccatgcataccctttttaaaatcccttgtaaatcattatctgccactaacttatgcttcttaaacgattgttaatgaagtaaaccccttttaaaagcttttaaaatcccttgtaaattatctatgacacttacttatgttttaaaaacgattgtaaactacgcaaacagttatgcaaatgccttgtaaatcattctacgacagttaattaagctttaaaaacgattgtaaaactttattacctgttgtgagatagaactctctcaaggagaaacggataggttgagaatcaactctaaaccaaagagttgatccttttgttttcactctctgctgcatgagatagtgaaagatttttccagaaaatctgattcccttcttagccttcatttttggtcccaattcaactagaggaccaagaaacgaacttctaatcttctgaaataaacactcgcctaaagcttcctctactttactaactaaattccaatccgagtattgttgaacggttcccagtgcaatagattcctcaccttctctgtagatttgttcaggcaatgtaaggatttcactctctgaatccatctgcaaaacatgttatgaaacagcgtcagattgactataaaatcgattattaaaacggttaccgtcggatcaatcgatatctctggggattgtttgcgtcgtagagaaatgatctgaatccttcacagaagaacaggtttatcggagaggaaattcgtctgcgattttggggtttctcagagagaaaattcgtcggcgattttgagtgaaatcggagaggaaattcgttggcgattttgagtgaaatcggagagggaattcgtcagcgattttgagtgaaatcggagaggaaattcgccggcgattttgagtgaaatcggagaggaaaacgaagaagtttgtgccaaaacgaagaagtttgtgaaacgaacgtgaaacctaatcattcagagggtaagacagtcatttggcatattagaaggggtagttttaaaaatggccttcaggaaagggcacttttacaaaaggttattaaaataagggcaattttgcaaatctccctaatttttaaagcaataaaatatacagctacagtcatcacacatacagcaaaaattctacagcaaaaaatctataataaaaaatctacagttacagacgaaccaatcacacactaaattacattttctatctatcattaatagtatgttttaaaattagaagaaacaatacatatgagcttatagataatcatactaatttcgtaacaataatatcaactctttttaaaaaaaaatacatcaataggtatatccattttccaatggaaacttacaacaccatcaaaggacagcatagtatatttatttcttatataaacgtattatttttatagcatactattttatatcttaaattaaattattatactttgtattcattgaccatagttggccttgtactctctccagagttgattaacgtctttcccaagcaaatcaacaaagaagccatcattgtagtcactcctcatcttcttgttcagctccgccacaaatccattcctcaaatcgttacaatactccaaaaacctagcggtgacatcgtaaccctgatcccacctatcaccaccaccaggcctcacccaatgactcgcaacataacccgctttcagcctcacgtaatccgcgatcccttcgataagccctcccggagcccgacctgcaccgttccactgccaagaatggaccacctcgtgataaaccaccccggtaaatcccctccttacatatcctttgtcatccacgagagatcccgcgttgtaatgtatctcgtcttgcgagctgtatgctatgccgttactgttctccatgaagagtgtgatctttgtaacgtcctttctgtctgaagggttagtttgttggaacaaacgccacgtgaagtccgttgcatctctcagtgattgttcgccataactcacgccgccgatctcattccggaatctccttcctccaggagagtcgccagtattgtcgacaacagagaagtcaactgcactgaccaatgagacagcgagcattagagatattacaaggaaaattttgtgacaagccattttttttcttttggttactctttttgtattttggacgatgatctgtttaggtttagaggaagatttatatatagagaaaaaaaatatgaaagcgaaaaaatgaaaaataaacgaaagattagtcaacagaagacctttcctttggtattggatcctacaatggtgaaaacatttctaaatatatgctcattgagcttattagaagtgattgaaaatgcaatagctcaatgagctttattgaaaatgaaaagaagagagaaaggtgaaagctttaagttgtcttcaagagtaaaatagatttggatttgatttcatacaatagagactagagaagagttgctcaatgtggcaactctctaggttacacacatagttcacaatacatgaatatatatatgagagactacttgctagataacctaattacatgggtttggatgggcttctataaagatatagtttgggcttttatgtgtgttctaatattcccccgcaaacttggcgtggtgtggaagcaacatgacaagtttgaacttcaattgaaatggcagcacaaatggagatgacttgacaagagcatgagtagacaaagcaagatcacttggttgtagatagtagcatctcttcaccataaaatcagtctttagtgtgagaacttttcaggttcttttgacctatttgtctcacgaagagtccgggttttctttacctcgtttaactcccctaagctgtcccatgaagaagaagaattctcttcccacaactacttagatcctactagctatctgtttctcattctttagccaatcacaatttgcatctatatactcagtttctcttctctacggcattttatcgaacatcttacgtgcgtcaatcaaaaacttgtgtttgccataaaatcaacagagttttgcagcccataaacacatctttatcaaaacaaaaccaagaccagcttttagcccttccaagagctcatcaacagccaacgttccatgaagatagattgagcaaagtgctcctaatctgatttgtccaaactaaacaacctatttcattctaacttctcaattccagacctagaaatctaaaccaaccatcatcattactcttgttctgtttcagagcaaggcaaatacattaccgtttatatctccgatgtagctgagacaacattcaagtctggaattttcgtcgaacacctggcgtactagacaaggcagagtcatactcaagcagtggtggctctgatctcttcgtttaatacatagaaatcttcaaccaattctgcctctcttcctcagaaaccagtcttcaccttttcttctccaatctctcaagttcttgctttagctctcgttgcttctccttcatcagattcatcaagcttttgtgattctttaacagaaaactttgtcgctgacgagactggaatcttatccatagataatgagactaagatttcttctgtcgggtttactgaaagtgagagaaactaaagactagccttgctttagatattgtgggaaagatagaaggctcgacgtttcaaagagtgagcagagactaagatagtgagagtaaaaccataaatcccttagatggactgatgctctgataccatgcaaacatttctaaatatatgctcattgagcttattagaagagattgaaaatgcaatagctcaatgagctttattgaaaatgaaaagaagagagaaaggtgaaagttttaagttgtcttcaagagtaaaatagatttggatttgatttcatacaatagagactagagaagagttgctcaatgtggcaactctctaggttacacacatagttcacaatacatgaatatatacatgagagactacttgctagataacctaattacatgagtttggataggcttctataaaaatatagtttgggcttttatgtgtgttctaataaatggtagactcatcaaattgaagaacttgaaaatgaattgaaaaatattcctgatgagaatttactcctcgaggaataatctccaagaaattaaatttgatttgctgcttaattgaatttgctattttatttagtagggttttatttagtttcctcaggataacttaggcttttaattctatctcatatcacgttatttgttttggattttatttatatttcatggttacgttaatggatattggtttgtttttttaattatgaattaataaattcatattataatattaatttataatgaatatctaatacatgataagcttttgtatcattgtgataataattgagtaaaacaataatgtcaaatcggatt

SEQ ID NO: 229 - DNA, 55686 bp, Arabidopsis thaliana
aatgtatgaagcattactttcattctactccactaattttattaaaaacatttatcaattgaatactaatatttcaaggataaaacagccttgtagagagacacaaccttccgatgtagtgttgaaagacatgaatgacgtgaagaaagacacaaatggtcggaacaaacgacatgaaaggtcttgaaccacgaactgcacacagcagaaaaagatcgcatatgagcgataggagtaccacctgagggcacaataaaaaacaaagcaacatttaaatctacaaatctgaaagcttggaccaatttccgaactagatctaggaataacagaataaagggacattgggagaaagattcagaggtgaaagagacgacgagagagtccggtggatcgggagggttaggaggttccagaggagagagcgtcactgaaaggccaaaactgggcacacatcagcgaggccatggaagaaaggaagaggagggagaaaggagaagtttaccaccggtgggcgagaggccaaccgacggcgacgagagagaaactgatggaaaccataattacctagagatagtttagcatatgcaaggatttatacatttgttctagaggcacaaattcaaaaaaatatatatgtataactaactatttgattttcttcaagagttttcatatcaaaagagaaaagatagcaaaaagttgaagagtaatttaagtaacatttttagatctcacttcttgcatttgcatataacgatatattagagatttttgtgtcttaaattccttggtatgtataacgtctcaaagatccattacttaaaaatactcgcatgttattgtcaatgttaccaacttaccaaagaagatcatatgatgtttatagaccataaaatctaataacaagaaaagagtcaattgtaaaattactaaactaagaagaggttaggttgataacagtgaaactgtaaattttcaatcattatcgagtaatgaccattgagaaaaaaaaacttagtaaattaagaaaagtataataaattagtgtttgatatattagcatgactttctacattttaatttttattttaaatataaataattaagagttgtattgatggaggattttattcaagaattttattttaattttcttcacttaatttagttgattttttatttaaataacacatgttattttcttatgtgatgatgtgacgctcatatagacagagttggtcatgtttcatatatataatttcataccatgggttcaacatatatgtgactagttgttagaaattagttgataatatgaatataaatgatgtataaataaacagaaaattgaaatttaaatattttttttcttgcaatctgaattttatttatgaatgtaagtctttacaaaggaggtttttagctacattggctaatttcctgagtctgcttgaaacacactagtcgtatatattgaagaagctaactgatgtgttatgctattacagtgacagtttgtgaatgtaaagataactaataaaaactttgaagcccaaaaatctatatctagaagtaaactagcaatgtcccaacgagtagacatgtcgttgattgtttaatgagaacctcgcaatcgccttcaaattggactctcttatatcctcgtatccaagcttattgcaaagtcactaggagagcctttgtctctacctataaaactgtattgacatgatcataatcaccttaagaacatttacctctctcgtgaaaggactccagatagattaatttggaactatactacttcggggtattatacggttagatcgggatattggcttctttcccatgacccaactgatactcaaatcaaaccggttccaccatacggttcagtggagctgaagaacaagatttggaaaatccctattattccaaaaatcaaatacatgctctggaggactatattaaaaactttacctacttgtgcaagattaaccacaagaagcatgaatattgatgcaaattgtccccgatgcctcaatgaggaggaattaataaaccatgtactattcaaattttcgtatacaactatgatttggagaatttcaaattctccgattatagtaggacaccatttcacggatgatgcagaagaaaatatatcctttctcgttgatactttttcgaacaataatctaatagaccaacagaaactaactcccttgtggctcatctagaagatctgtaaagcaagaaacaattgtgtttaataagttcagagagagtccttcgaaggtggtttcacaaacttaagcaaaagtcaaagagtggattaaaaatgtgacagatacacaggaaatttctgctacaacaagaccatcatcattgataaaacttattgtacaaaacaaattgcttcctatgtcaagagtaattttgatgcatggttccacactaacaatttacctagcgcaaatgagtaagcacaaaaacaccgcgtaagactctaactcaacaaaatatgagttcgccctagttttcttttctctctggcccaaagcccgagagagaccattgaagtgaatcatctctgctatggagttccgccgttacttttcctccgttggtctatctcctccatggaaagtctttctcactcaaagacatcgcctagttgggctgcctccgacgtatctattttccggcgagaatctcttttaacttctctcacttgttgaaaagatcttatgacatgcttgtttaatcacagtctcatgtctctaatgcagccagttgtgccctcggtggtctcccacctgttggaaccaccagatttgtttaagctttcttcgtgtaggattactctggaggctacgccggtcattcaccgagatgggttttttccgttgtctctctttctccagatctcgtggaggcgcttcaccggaaattcctcaactagtgtcttcttcttgggatccgcctttgattcccaaagaattatctcccttcatgggaaatgctacaccgtcgatttttctcttctggctcttcaaaaattcgaacgctttggactcttcaagagtctggtgactccattaacattgggttccctttcggtcactctgtgtgatggacttctcaccactataatctctagattgttagatctggtggttagagatcttgtatcggccgagcatgtctcaccattccaccatcgtgccctaaagtcaaaccaccttctccacctcgtttgagacattcctccgcaaactggaatggttctccgatgatcaacgaccgccctcctctaccctcaaaacgctatagtttctcctagagtttctagtgatggacaaaatttgggcatatttagtagtgggctatgatctggatttgcttctaatgcactttacatatcaaatacccaacccaaaattgtttttgcaagagaacatcttcaaattcctccctctgggagagaccattgttatattatttcgattttttcttaacagagattaatattgtgttgtatctctttccaaaatctagagattgtataccttttgtttttatctttttagaagattctctagaacttgtgggaggatatactcttatgttctcgaatgattacccgatacttttggtgtcagttactgtccattttgtgggtttttggggcaacaattagaaatcgagtattgacatcagcttttagcttttgatgatccggttgttaaaaaccgagacttaacttgataagtttgggccaggatggtatgctcaaaggaggtgtatggtttttgaaaggtgatccctatatgatcatctcatacttgtcggcaacgatgtttggattgcgagagttttctctcgtcgtacttgtgaccacccttttcagagattgggtgtcttggcacttcaggcgcaagtttggaacttcaaaagcatatgaaaccttgtttgtttcgtaaagcgatgtatctcaaggtggctggcttcatggcatcgtgaagcattttgtaataccgagtggctcacctccacgttggaacgcgttattcttaacatctttagatcattttatctcttttttaattgtattttcttattttgttgtttatctatccggatgttgcgtaatgttcaaggtatagcagcatgtgagtacttttatttccatataggtttatcggtttttgtatggttttccttagcggagactcttttatctgtaacttaataaaatggtgttagaaaaaaaaaaaaaaaacatacacatagcgcaagaggatggattattcgggatcatgaaggaacaacaaaagctttgggatcttcatccctagatcatgtgaaaattgaaacatataacactttaatttacttttataatattggaaagaaaacgtgaagatccggaagcaattaccgtaaaatttagaggttaaaaacttcttttctttaaatgaattaagttagagaaaaggcaatttggttaaagaaaatatagtgaaaatttgagagacaagtcagcaaagtacatgtgacaaatggagaatgtttcagttatttgtgaatctattttttatttattatatatagatttcattgttcatataaaagtctgagactcttaaatagttttttcaagatattatatattttaaggtaattatatatagtagttattatttatcagattctaggtatttggcctctaattatgtgtagtagaaagactatataaattaaatttgtaaatatatttaaataatttaaaactttaacttcaagataatatatatagcaagacaaaatgataatatttacataatacaaattatctttttaaaaaaatcctaatataaaaaagtacatatgaaataagatccacatgttttaaatgcatcagacactaagacaagttgtataaataatttttcccacaaaccaaagaagaaccaccaaaatcccaatcacaatcccaattaaacaaacaaaaatgaggaaatccatctcaatagcttttgtcattgcaatcaccattttcatgtcacatcttaatgtttttacagtgtatagtttaacaccgtgtgaagaagcaacaaatcttttaacaccttgtttgaggtacctttgggctccaccagaagctaagccatcaccagaatgttgcagtggcttagataaagtgaataaaggtgttaaaacgtatgatgatcgtcatgatatgtgcatctgtttgtcgagtgaagcagcaatcacttcagccgatcaatacaagtttgataatttacctaaattatgtaatgttgctttattcgcacctgttggtcccaaatttgactgtagcacgtaagttttgttatttgaaactatataaaaaatatttttgcttatactatttggttaatatattaattttatttttcatatttgagaatatttcactcatatttttctcaataatgtttttttgcagcattaaagtttaaggtgaagaaaaaaaaaaggtaaagtgaagaagaagtataaatagtctcaatattgtaaggtttcgtttgtttaattttgattaataaaaacagagaagtttattctcaattaaagactttgagttcttgttgttaagatccattaatactcaaaacaaagaaatccgagcaacgggttttgttatgtgaatcaatagatctcggaaaacacttttcatattatcccatatattatttatacgtaagatccttaaaagattaaattgatatagtacttattaaattaaattctatacctttttgggaaaacattaaattgatatagtacttattaaccagaacttttctattgtagtttgatgaaaacaacctttcagtcaaaaagaattgtactactcatgcaattaaataaaaccagcagatacatttcattacatgctcatggtaattcaaagcaacagaattgttgaattatcgaaaacttgtgaaagttttttttatattttgtaccaacttttaaaaaaaaaaaaaaaaattacgaaatatgtttccatggatattatggaaaaaaaataggaacttcaaatcctttgaggatacaagctttttgtcgatttgagtcggttgaaaaaatttgcgaagatgcggatgaatatggtttacttctccaatgctccatcaaagtaatgaaatagaggagaatattaggagtgtccatgaaagtgacacttaaggttcttggtctaagaagaagatggtgggaggttgtgattaggttatgagcagaacaggtcctaagcgcaagggggtcaaccggtcaagcatgggcttatggtctaatatatgtttatgtatatagaatagtttttgcctcggaggctgctttcacagatccaaagcccggccatcctttggatatcgaacttctgaattcattatttttggaaaagatttataagacatggagattattactggaaagctcaacaggaaatagaggagcttctctcattgctaagagtcttaaaccataattgcgtatattctgttccaaacttatggagtagtaacctgttcttcatagaatttcttctcatgagagagtctctattcttttaaatgtaaggttttgtgtttggccattctttcgtccctactttttttttttttggtagataagtgtaactatctcttaacactaaaatatgtccatgttggctttaacaaggttagtttgtaattgtaatggttcctccttcatctatatattcatgttcagatggaaaaaggaaaccatataacataacccgcatgtagtcgcaacaaaccacaaagtatatacagtaacttttttacaatagggaatctattggcttctataagtgatttaataaatgaaaaagaacctgacaataaacaaggaataagaaagcaacttttgaaagtgctctccaaccatgtcccaatcattaatagtccaagtctttcgggcttatccaacttttattattagttaccaaatattatgaattatgaagtaatggtaaaggaataatgatcatgaatcatattatgattaaagcaaatgctataatgatttaatccaaaagaacagttccagaggcgggatttaaattaatctcctttggagaaaagatctctcccaacgtaccttgaacccagcatctccacctgggagatttaccattaggccaataacacgttagtatcaactatcaattaggttgtttgctttcatgttaaccaaaactcaaatttagtagtcattttagactattagttcctaatgattgtacaaacatttgattttggcttaagcattggaccttgtacgtaaggagagaggcaaccaaaaggcaaagccgacatccaccacatagtcactccaaccccaataacttactcttttaaacaagataaaactacttgataacaaaagtcacaagatgttaacaaaaaagcaaatttagtagccattttagactattagttcctaatgattgtacaaacatttgattttggcttaagctaagcattgaaccttgtacgtatggagagaggcgaccaaaaggcaaagccgacctccaccacgtactttgcctttatataaagatttaacacacttttaaagtcttgacatcattcattcacacaaacacttcaaacaatgacttgccttcttcttcttctcctcctcctcctcttctcctctgccgactctctgacgtcaccatccgacgtgtcagctttaaaagctttcaaagccaccgtgaaacccaactcaatcccaccgtggtcttgtctcgctagctgggactttactgtctccgacccatgtgcttcaccacgtcgaacacatttcacttgcggcatcacttgctcgtctgactccacacgtgtgacccaactcactctcgacccagccgggtacacgggtcgtctcacgcctctcatctccggcctcacagagcttctcacgctcgatctcgccgagaacaacttctacggcctaatcccatcctccatctcctccctcaccagcctcaagaccttgatcctccgatccaactcgttttccgggtcattacccgactcagtaactcgactcaactcactcgaatccattgacatatctcacaactctctcaccgggccgcttccaaaaacaatgaactcgctttcaaatctccgacaactcgatcttagctacaacaagctcaccggagccatcccaaagcttccgaaaaacctcatcgatttagctttaaaggcgaatactttatcaggacccatctcaaaagactcattcaccgagtcaactcagctcgaaatcgtcgaaatcgctgagaactcattcaccggaacactcggagcttggttcttcctacttgaatcaatccaacaagtcgatctagcgaacaacactctcacaggcatcgaagtcctccctccaaacctcgccggagaaaacaacctcgtagctgtagagctaggattcaaccaaatcagaggaaacgctccggcgagtttcgcggcgtatccaagactttcttcactatctatgagatacaacgtgcttcacggtgttataccgtcggaatacgaacggagcaagacattaagacggctttacttagacgggaacttcttgacgggaaaacctccggcgagatttgtgagaacagacgcagaagtaatgggaagtttggggaataattgtctacagggatgtccagggaaagctaagatgtgtgctccatcgcagaaaccattttacatttgtaagcaagcttatggtggaaaaccaaagtcttagttttgtcggtgtcggtgactttttgtgtcagtgattttgtaaaataatgcttttagtcatgagtttactctatagtcttggagaaatactaatatctatattcatcgagatcttcgtatgtacacaaataaatttacaaaaattggaacggaacttatagtatttattttgttgtattgtgtgtttttatatatttattgagatttaaattagatagtatactaaagtttggaatggttacggtggtctaactggatagaaccgtcaatagattggattgctttttatttattattcgtaaattatatatagtatatagtggtgcggacctaaaaaaataaaagaaaattgttgcggaccgactttaaactaatttgtagcgatttgttttcactccaaatatagtatagattcgactgttgacggattagtccgcactaaccacaacatccattcaaaacctaattgcggtccagtctatattatttttgggacatgcaacaaactgctacgaatttagtttaaagacggttcgcagttagttcgcagcggttttcttttatttttttggatctgcaccattacgaactatagtttgtgaatggtaaataaaaaacaatctgatctgtagacagttttgtatgcttggacaggtagaaccatttaaaatctaaatgagttgtggatgaaagcaaaatataaatcaatgcctataaaatgacagaaatttaaacttcactgattattctaatgcaacatcatataataaactaactgaaactgtattaataaaatgaaatattgaatttcttaatcaaacatatgtgtattttaaactatccagttctagtggaccaggcagtattgagaatctctaaacaagtttttgtaccatatgaatattattaattaatcgatagatgtctaaaaacaaagtgattttgtataaaccaagtcttcctctgacatcgaccctcttgagattctctgattttggcgaaaaaacaaactattttggctccttcaaagcaaaacaaaaataataattataggtattctttgatttttttagccatatattatatcatcataagaagtattttactaacattattatgatgatagactaactacaacataagcaattacaatagatagcttccatgtacatgcagaaccgtccgttatagcttccatgactacgtgaaacgattttgcttttgttttgtcggccattatattattttgatgaagcacaaaagggcaattacgcaaaaggttcagtaaggattacattaaaagaacagtccaaacccaattaaatcacacttaaaaagataattaataaacacgcagatgatttagtggctgatacgtgttttctacacgccacgcgaaaccactgcctgttcgccggccaccgctagattccgatgaaccgccaccaatcagccattgggcgatacggatcgattaagaggaaaactacttcaaaattcaccgaaaaacaccaactcccgaggaagctccactactgaccacacccaaattgatgtggcctaatctttgctctaacatcacgagcaaaaggaagttacgaagatatgacttctcgaacagattggagagatcgaaacggatcttgaagatagtcggaaacatcgacggatgcatgaaaaagagactgttttcgttagagcaagagactagaccggacttggccggtaaatagattctgactaaaggccagaaattaatcccgtacatagacgagagtatatacaactccagaccgatccaaaaaatcaaaactcgatgggcattagcttctcctttctaaaaaatatagatagataagaaaggaacaatcattttttagcaatcatattttaatttcggaatagcgaaaatagtcttttctctaaaaagtagaagtgagagaaatgaacttctgcttgtgaaattattctaaaatatccgataaacattttatcaataatttgtaagaattgcaaatttaaaaaatcgaaccccaaatggcccaaacctagcataaataaataaatctttgatctttggacgaggagacttctacttgtctgccttcttcaatcataattttatggtgcttatatatcttgcgacttaaccatcgtctatactctatagcttaaattaaataagcatcaatatcaataaacacgaaactgaatcattaaatcatatgttagtcttcgttcaaatggcgacaacactatagctgaatcacttttgaatggaataaattattaatattaaaaatgattagattaacggtaaagatgatgattttttttttctagaataatgatttaatatcagaaaaaggtttaaaattgaatgatttttgcataataaacactaaaactagattttaacccgcggtataccgcgggatgatttattttttaaaagtaatatctattaaaacttgcaaattttatttttatataatatttatattttacagtttataattgttattaagtaacgctataccacgaattcatgagacaattgttaaaaaactgaagtttaacccctattaaaacagcatattaataatattttaaaattttataaatattgattcaaatacatccaccatataacccaattccaaaataaaacccgttctataatttctttatccgtcccgtattttttttttaaagtagtaatttttaaaatttaagaattatttattatatataaaagttttgcaaattgtatcattctctaacacatttatattttatagtttaattttatatatagtaacattatacataccacataacatctttggttttatataatcttttctaaattaggatgatttgatatgtttaatattagtggtcttaaaaaataataaattaaagatttaacccgtattcaaacggtggattaattttatatattttttattaatgttgattcaaaaacccgtctctccaaatccgttttgccaaaaagccatttattttattaatactaattttatttatgatatgactctgaattataatatgaacattttagctaataacataggagtgcaccatatttatttaataggagaatgtaccatataacccgaatgcacttttatccaaatccaccaaaaaagtcttgcaagaatactataaagataagaaacgatagtcggttttgataggtataagattagcaaatatattaggtagcttacattagttaaagaatacaaattgaaaaggtctattacactttattcgaatataatatcaaaacttatataatacaaagatttgataattttttaattgttgaatacttttctttttgtgctaatttttatgtgattaagatttaattgatttcgtatataaaatattaaattgttttacgaacttatttgtttatgggagatttgcaaaactacccttttttaactacccttttgcaacaatacccttttatattgttcatttttaaaaatatcccttctattgaacagaatgaccaaattaccctcatctaataagaacatgtaattggaaactgaaagtttcccgccaaaaatttatttttcccgccaaaaaaaaaattccgccaaactttttttcccgccaaaacaaaaaaaattcccgtcaaaaaaaaaaatttctgccaaaattttttctcgtaaaatttttttcccagccaaaaaaatgcttttaaaaatccttgtaaattttttaaaaacacttttaaaaatccttgtaaattttttaaaaacacttttaaaaaaccttgtaaagttttttaaaagctttgctagttgctaaaaactcttgtaaatcattttaaaatctcttaaaatctttataaaatctttaaaaatataggtaaatactttaaaacccctttttaaacctttgtaaatcattttaaaactttttacaatagttttacaagatttacaatcgttttttaagcataagtaagtggcattgaatgatttacaagggattttaaaagcttataaaagggtaaaacatggtttacaatcgtttttaaagcataagtaagtgacatagaatgatttacaaggatttttaaaaagggttagcatgatttacaatgttttttaagcataagtaagtgacattagaatgatttacaagggattttaaaagcttataaaagggtaaaacatgatttacaatcgtttttaaagcataagtaagtggcatagaatgatttacaagggattttaaaagtgtttgtatggtttacaattgttttaaagcataagtaagtggcattgaatgatttacaagggattttaaaaggggttacttgatttacaatcgtttttaaaacataagtaagtgtcaaagaatgatttacaagggattttaaaaaaggtttgcatggtttacaatcgtttttaaaggataagtaagtggtatagaatgatttacaaggattttaaaagcttataaaatggtaaaacatgatttacaagagtttttaaagagttttaaaaggatttacaaggattttaaacctttgtaaaacatttacaattctttttgatccattttaaaactcttgtgaacctttacaaaaggttttataaagatttacaagagtttttaaagagtttttttataatttcttttaaaatctgttaaaaactcttgtacatttcttaaaaccctttaaaaatctcttgtaaatcttttaaaacactttaaaaccctttaaaaatctttaaaaaactcttgtaagtcttttaaagccctttaaaatcccatgtaaatcttttaaaactcttttaaaatcccttgtaaatcttttaaacccttttaaaatctcttgtaaatcttttaaaacccttttaaaacccttttaaaatcccttgtaaatctatttcccgtcaaaaaaaaaattttacgggaaaaatgttttcgaatttttttttttggcgggaaactttttttcgaatttttttggtgggaaaattttggcggaaaaatatttttgaaaaaaaaatttgacgggaacttttttttccgaaaatttttggcaggaaaattttagcggaaaattatgttttggaatatattaggcgaaaaagtattaatatttcatttttgttaacctaaatcaatttacaaatagaagtaaaatggtcattaaaaatttaaatagggtataaatgaaaatggtaaatagaaaagggtagaattgaaaaagggtagtgtgaaaaaggcattagaaagaatttttctttgtttataatttggtaacaaatagatatttgaatattcagtatattttgcttcagtttaggttatcattgatgatccgtctttagatccaataagccctaaaattaagagatgaatattttcgttaaatgattttggtaaccttaatgacgtcattaaaggattttgtttttgattaaatttttctaatgacattgtcatataattaattacaaaaattaaggttaaatttaaaatgtacttctcaaataatatagaaatattctttcaaatgcctttttcacactacccctttttaattctactcttttctatttaccattttcatttataccttttttaaattattaatgaccattttacccctatttgtaaattgatttatgttaacaaaatgaaatattaatatttttcgtctaaataatttccaaaataaaatttcccgccgaaaatttcccgccaaaaattttcgaaaaaacaatttccctccaaaaaaaatttcaaaaacatttttcccgccaaaaaatttcccgccaaaaatattcgaaaaaagatttcctgccaaaaaaaatttcgtaaatattttttccgttaaagtttttttttggcgggaaatagatttacaagggattttaaaagggttttaaaatttttttaaagatttacaagagattttaaaagggttcaaaagatttacaagggattttaaaaaggttttaaaagatttacaagagattttaaagggttttaaaagatttacaagagttttttaaagatttttaaagggtttacaagtattttaaaatatttacaagggattttttaaatggttttaaaagatgtacaagagtttttaaaagattttaaaagaatttataaaaaaaccctttaaaaactcttgtaaatctttataaaaccttttgtaaaagttcgcaagagttttaaaatggttgaaaaagagttgtaaatgttgtttacttacaattctttttctaagagttaaaaactgcttgtaaagactttataatagttttaaaaggatttacaaaggtttaaaatccttataaatctttttaaaactctttaaaaactcttgtaaatcatgttttaccattttataagcttttaaaattcttgtaaatcattctataccacttacttatcctttaaaaacgattgtaaaccatgcaaaccctttttaaactcccttgtaaatcattctttgatatttacttatgatttaaaaacgattgtaaatcatgttaaccccttttaaaatcccttgtaaattattcaatgccacttatttatgctttaaaacgacttttaaaatcccttgtaaataattctatgccacttacttatgcttttaaaacgattataaatcatgttttacccttttataagcttttaaaatcccttgtaaatcattccaatgtcacttacttatgcttaaaaaaacattgtaaaccatgctaaccctttttaaaaatccttgtaaatcattttatgccacttacttatgttttcaaaacgattgtaaatcatgttttacccttttataagcttttaaaatcccttgtaaatcattcaatgccacttacttatgttttaaaaacgattgtaaattatgttttacccttttataagcttttaaaatcccttgtaaatcattcaatgccacttacttatgcttaaaaacgattgtaaaccatgctaaccctttttaaatcccttgtaaatcattttatgccacttacttatgctttaaaacgattgtaaatcatgttttacccttttataagcttttaaaatcccttgtaaatcattcaatgccacttacttatgcttaaaaaacgattgtaaatcttgtaaaactattgtaaaaagttttaaaatgatttacaaaggtttaaaaagaggttttaaagtatttacctatgtttttaaagactttataaagattttaagaggttttaaaatgatttacaagagtttttatcaactatcaaagcttttaaaaaatttacaaggatttttaaaagcatttttttggctgggaaaaaaaatttacgagaaaattttttggcggaaatgttttttttggcgggaaaaaaaaattttagcgacaaaaattcggcgggaaactttcagtttccaatttcattttcttattagataagagtaatttggtcattctgttcaagggaagggatatttttaaaaatgaacaatataaaagggtatggttgcaaaagggtattaaaaaaagggtagttttgcaaatctcccaataatatagtaggactagttattcttgattactgatgttcattttcagttatattttttaatatgatcacaaaatataactaaattgttttttaaatcataaaaacataaagaaaaaaactctaatgagaacttaacagaacttataaatatggtacaccgccaaatataaaatagcataaaacatcgaagtttatgtcgtcagaacaaaacaattataccaattttgtaactatctgtatcagccacttccccaggaaacagctgtttcttggctctcccatttttttggtgcctgctgtagtaatagtttttttttttgttttatcaaagaatattcaactataattaatgtttttgttccactcataatacaatttcatcactttatgctcaccagcaaggtaggtaagagcctcatccattatctaattattataaaattatttatacaattatataaaacaactagaatttaacccgtggtacaccacgggcaaatattttttcatatataataaaattaaattttatggttttatatttagtgttaaagttatataattttatattaatattgtaattaaaaaaattagtgatgataaaataattaaaattaatatatcaatccaaatccgtctcgctgtatttcatatcaatctaaacccgtcctgctatacttctcgtctcatgatattttaattttttatgtttaaatattaataacgtttcataaaggtaaaatatatcaatcatattctttaaaaataataattgtttttgactttagtgtaatgtcattctttgtaaattcttactttactaacacaaaaatacttaaaaaaaggtacttcaaaatttttaatatatataatgttaatttttggtaaaaattattataaataaatatttagtttaatcataatttgggattgatatacttgttttttaactaactatttttattttaataacctaaatttagtcattttgttaatattatttgaattaacaatatcaacttaatacatgtataatttatttatcccagaaaaaagaacaaaattattttgtacaattgcaaatttaaaacgaaaaatatggattgagaaataatttgggtttcaaatttttattacgtaattaattttttaataaagaaaatattaaagcatatattgtaatataagattttattcattttattaactgaaaataaatgatttagaacgaaaatcatggtgattaatgctaattggaaagattcaaatatttttgtgatttttttctttagtttcctcaattttagtaatataatagattttatatttagatttaaaaataagtttactaaaacaataaatgttaatggcatgccattataaataagtgtcaagtagaggatttatttgctaaagtggctgcaaaaatgtatatgtaagatgagatgatggaaaagaaacgagcattaaaaaatttatgacaaaagacgcaatctgaaaaaaataaataatagaaagtaatttgatataattttttttttaagtgtaaatatataaaatactaaacaaaaatatataattagaaaaatgcaattttaaaacatatttgatgagcctattgttaatataagaaatgatagtaaaatctgccaataacactctgatctcaaaccaagttggttagttgactcagtggagaataaggaactcaatcgtgaaaaacgcttaagagagattccatacaagagagagatgatggttattatgaaccaacatattcttacaaaaaatatgtttatttttagtattttaatgctttgtgttctcttcaaattttttttttttttttgtgtttttctctgtttctatttttcttcaattattgcacataatttttttttataaatggtatatattgcaccaattcatcaaatatactaaaaaaatgcaacaattcatcaaaaaaactaaatagctacaacggttcatcaatatatcaatggttacaacagttcattatatagattaaaggttgcaacgattcatcaaataaattaaatgttgcaacaattcataatataaacaaaaagttacagtagttcatcatataaacaaaatattgcaatgatttaactaaacggtatcaacaattaatttagaaaaacctatacccagaatacacgaccatatatatctaatataccaaaggttacaacaattcgttaaataaattgaaaagttgcaatgattagtaaattcaactaaatgttgtgatagttcaattaagtatttgcaataattttttaaaatatatatttagaaattgaaaaatggaaaataatagtttatgaaaatttatatcaagagatgtgatcatatatatttaatgcatcaaatgctgcaatgattcatcaaataaacaaaaggttgcaacaatttataaaataaaactaaaagctacaatgattggtcaaataaacaaaatgttacaacagttaaacggttacaacaactctattaaaaattaaacataatttgttttatgtagttacaatgttacatcacaagacataactgtagataactaaatattacaacgattcataaaataaactaaaagttgcaacgattcaaaaatcaaatgttgtaatagttcaactaaatggttgtaacaattcattttagtagacaaaatgatgcttttctacaagttagatccattaccagaatgtaagtcgttcgacatattttaacacacatctaacatccctcatacaatactaattcacttgctcctaaatgaaacgcaaaacgacggtgatgtgtaggtcattgtgagaaataattttgatgagattgttcttgaagaatcaaagaatgtttttgataaatcattgcaacttttgattttgttttatgaaccgttgtagcttttagtttatttgatgaactattgcaactttcggtatatttaacatatacgatcgtatctcttggtataacttttcataatattgtttaatttttaaccattaaaacaaatattgagatacattttgcaactgtttcattaaactattgcaatatttagtttacctgacgaaccattgtaattttcggtttattttttgaactgttgtaatatttttgatataataatagtaatccgaataaatgtcttttgcaattgtgtctttataacataatttacataattttgttattgctttcttaattttattcagtaatatgcatttatacgaattgcaattttctaagaaaatataaccgtaaaatatatgtttttagtttaaaacagaaaaaattattttaacgaaaagttgcaataacaaaaaaaaacacaattgtttacaactgcaatatttattaagattgttattattatatagatttatattcttatcaaaaataaaataaaatatgttaaattctaaagtaagaacgagaaaatattcatcatgtaaagggtgtacgtaaactcgtaaagatatataccctagaaaaccttattcacaccataatatgagtaatagtcaaatatggttctcaatgagaaacattgaaaacaaaacaacataatcatacaaatatagaacgcagaagagagctattttggttgctcgtacgaatcagagcgtataccaaacaagctagtacaaaaatacacttgccctttctggtgcgttctgttttttacgttggagtaaccatttaaagccttttaatacctcggacctcggaccagcttcctctcataggaatcactccggaaactactaaccgaagtagaccgttcgggtttgttggggattgttgtcgatagccactcaagtccttcgtataatccttgcccagagatagctgaggttccttgtataagcctgcaccaatcacaatcacaaaaattgtttttgtttatccctctacctctaaatatatatataaccaacacgagaggaagtttttagtattattaccaacaacgtttggataggctgtgtagaccaagtttgttggcaacctcggctacaggtaaagcatttctcgaatcttgcttgttcgcaaagacaagtacacatgcaccttctagttcattctgtggattttttttaccaataaagaaagttgttagggttaaaaaaaagaaaagaggagacaataagtaacattttaaagtttcatatgaattttacatcggttagtatgcgatgcagctcgtttcgagcttctgataacctttcactatcgctgctgtccactacaaagatgagcccctgcgcgttctggaaatagtgtctccacaatttgcgaatctgttgaaccggacaggtcaagcctggagaggcaaaggaagagaaatatgtgtttatatgcacttatagagaagtaaaatggagtttaccttctcttgtcctcctatatcccatacagtgaaattgatgcctttgtattctactgtctcgaggttgaaacctggaaaatcgcaaaacaaccaaaaaccaaaaaaggttaatcatcaatatgagatttatcaagctattaagaatattcttcctcaccaatgcaaacacaatcaaaggtaaataaaaatgtaactatgatctagtatctacacatgagctatgatccacaataaagatacacaaaagtatatatggttggagcagttctaactagccaaacaaagtttccttcataatcctcaataaatagatatatagagtgaatcaacatcttgctctaacttcagaatcaatagatagaagtctcaacagaaccaaaaaaacaagagaagaaaagtccatgtcacataccaatagtaggcactgttgtgacaacttctccaagcttcaacttgtaaaggatggtagtcttccctgaaccatcaagaccaaccatcaaaatccttactttacttttaggaagaaaccttttcgctatacgtgaaaatctggctcccatgtagaacaaaaaacaaaaacaaggatcttagatacagtgaaagaaacacagcttctgatatttcaattcaagcttggacttatatgagatctatgaagagtattttacacacatgagagaaaagaaaaaataactgaaagtttgatttgcagattgtaaaggcaagcaaaaaggcaaagtcccattagaagaaaggctggaaaagaataaattccctaaggaagagaggtaatgttgtgtccttttccaaactcgaaagctcattaggacacagagcaggactggtcagattctgtgttctgtctttctcattctagaagcatatatcagaatcttattccttgagtacatcaccagcgatatggaatattattagaggtgcataggaaagacacgaaactggaattgcataaagatggtaaatggaacaaaatatcaaaccggatttttgataagcaataataaaacagagcataagtcttattagaaacaattaagtaagggaagatgatcaattaaaaaaatattaacttcttattttcattagaaataaatcattagaataaaaaaaccaatacatatgatttcattagaaactgatatgcaaaaaacttgagtatataaatttttaatctaaattttgtatgataatttttaaaattcaaaattgaaattttagtaaaactttaatgaaataagaaattaatatttttaattaataatataaataactattaattaaaaaaataacttcttaaaaaaaattacactcttaatttagttttgaaattgaaaaacaaactattataagaattaatgcattcaatatatatacaaaatatatttatattggatatagattttattattattatacaacacaatatatatttttttaatattaaaagtaaattgaaatattatttttgaatatttttgttggtcaacgtcggaatcagtccagcggttaacctgagattctccatttataatgttgatcatataacatcgtatacttcgtatatattgtcattcaatccatatacttcagttagctgaatatcctagtatacttggcattgatggccatgtggtttgctaaacttcaggtagttgacaattttttttcaaattaatatcaacaaatcattcatttagttaatttatttcatatccaaaaaatgttgagatttctctttttttttttttgttaaagaaaatgttgagatttctcctatgaatatatacggaaagcttaagtttattcacataatgtcagaattaactggaaatcgttttacttgaagtgactaaaattatttgagagtttttaagttcaactgttttacatttatttacttgttttatcatctttacgatatatatttataagaaaaaatcaggtagaggtgtgctagtgtatatgaaaaccagaagtggcttaagaaaaataaaaccaatacataagataaaactttcaaagtaattaacatcggtttgaaaaaaaaaaaaaaaaaaaaagacgagagcaacaaacaaaataaagtttccttttatcccacattcaaagctttatttagatgaaaggaagtcataagaaaaatgaaatattaattaagaacacaaagatcaaagattcttagattgatttcatataagagaaaaggagagttgctaggaatctaaacttaaatgaatctaaacttgctattaaatcctaagatacatgggtttgtaggctttgagagtatatttagtaacttcaggcttatcatgcgacaatatctgcgcttcttagatatgctctaacaaaagataccatgatacttttatcccgaaacaaaaagaaaaaaacgaacaacaattcaaatgacacaaagtaatccatttacattgcaacaaatatatgatatctttttaagaataaagtaaacaactaaacaaacattttctctagcacttgcaccacttccttcatagacggtcgcttttgaggcaaggaggagacacattcatagcctaacttcaagcatgcgaccgcctcatcctcgcggtgagccacctcaaccctaatttccccatcgaccaacttcaagaaccaacttttctcatcagtctcagaatcgcgaaccaaatctcgatcgaccgaaaaaactatgcctgtgagaagttccaagagtataacaccaaatgaatatacatcccatttggggtttggcttctggcttgtcgaccactctggtggttggtcttgtaagctcgacaatggcccgtccgtgagtaaatgggccgaagtcataatacgatcaaggcccatatctgtaattacaggctcaaactcggagtccaagagaatgttattggccttgatgttgccgtgcacatgcttcttgtcgtggatataagcaattcctctagctattcctcttgctaacttgagccgtgcctcaaaggagagaggtttatgagaaaacgagcttgattttgctgttttcatatcaaacaaaattaatgtcaaaatatcaagattcgtaaaatagtttgtttgttaagagcaatgggctaacatgcgctgactagtagtgcgtattctagcaaatattaagtaacgtacgccgtttgtagaaacttaccggagatggaggatagaggtaggtttccatttgggacatagtcggagatgagaagcttctcttctttcccccaaacgaagccacgaaccctaacgagatttgggtgacgaagtttagcgataccctgaacctccttttcgaattccttaaatttcgccgccggacaactctccgccccaatccgccgcactgcaaaagccgcaccgttctctaacaccgctttatacacaattccgtcgcttctgttggttccaagtacgtaagctgatgcctttagtagagtatctagctccagctgagtttctccatccactgtcactagttgagtttcagtattgtgttttactcgcccaccacctgttcgatcaaatgcctcaacgggtttttggttctctatgtcactctcggatgacaccgacgttgtttcttcgtaccttctgcttatccatgaaccgcatcccatttttgcaggcggagatttcgtgaactccaaggcgtcggcgacgttgtgtttcgatttcttgacggataatgtatcgtttttctccagacatttttgtaagacgttgaaagtgctgtattcttggtagcttctacgtttcttgagctggtatatgtagaggatgaacatggctatgatagcaagaccagctatatctgcaagtgtaatgccgatgattgtgcttggttttagtttgcttttggctgtttgatttgttgattctgttgaagagtttgttggtgttggagttgtgggcatgactgctattgcaggtgaagtagtttcagagatatttggtgggtctgatagagtagaagggattgaacaaagggtctttaatggctgaccacataagcctatgttaccagaaaaagactcggtcttttggttaagcaatggtggtgtgttagggattggtcctgttagattgttgaaggagagatcaatgatggcgcttgctggaaatttttcggcgaaaggtggagaaatcatgccggagatttgattgtttgataagttgaggtaaaggagacttgttcctctgaaatctggaggaagagatccgtctagaagatttgaggagatatctagaacctgtactgcttcaaacccgcttggaatatcgcctgaaaatgaattcttcgccaaggaaatgactgtcagattcttgggaagtgagagattgggagggatttttccggtcaaggcgttggcagagagattcaagagctgcagactagccacgttgctgatactacggggtagttcaccagaaaccttgttgttaccaagggacagaatacgaagctcactggcgttggacacagaatccggcagtgatccatggaagaaattgtcggagagatccaagattcttagatgtaggattgaaaacaagtcgggagaaacagaaccaagaagctgtttgttgggaagaaccaaacttgtaactctaaacatgtcaggggtgttgggaatcccaagctctgtgcatgtaacaccggtccaagagcacggtgtttcatcgtcgtagttccagtttcgtagaactaagagaggatcattgaggatggaatacttgaaagagagtaaagcaacaccatctgtgttaagagcttggataagagtaggaagatgaagaaggagaagatggaggaagaggttgcttctgttggaagtcatggttcgagttcttaggttttctctgttctctatgagtatgtttatgaaaatgcctatacataggatagagagatggtgaaccactgcaagtaatgattgttttgttcaccaaattttttaagatattggagcaaagcaaaactatgaagttctgcttagagaaggtgaggttgaaagtctgaaagagataaagaaaggggttggtaagttttttattctttaaaaagtgtttcataacattaaaatcacgacaccgttgacctgaacttgtataaaactcggtccttatttatagtttttttttttttttggtctaaacaaatgaaatgtgtgtatctaaaagtgaagtaagtgaaacaaagccattaaatcatttgttagctccttttaacctcacactttgtaatcatttgcagtagctcaaacaaaacatgtaaccaaaaatggttgaaaaacctattataacacccgtcccgctatacaggccaaaatagcatgttattcatgcggtcttgccaaaacttttctttatttaaaattcaccaattgagacttactaacctagggaaaaaggggtgagtaaaacaagtttactcaatgaggagatcaactctgcccactagacatacaataaaaaaaattcaaatataatcaataaccattacttagcatagattcagaatgtctaacaatcaaacaaacaaacatgcgtcttgctcacaacaatatattttactttcatttttagttttagtattttactttatggcttcacaagcctatattaactttggctacttaagcttattaaccttggctactcaagcctattttctgcaagaccacggtccgtaactcgatccttcctctcattgctagtcagtggttaatgacctgaaacggacccgtcggccccattacagtccaacatccttaaatatcttttccatactttttagttttatgttctcatatacataataattttgtaatttaatatatattaaatatatcaaatcatgttaccaatgcatttcaaatatcatgttactaaaaacctaacttcacacaaattcacataaatcaacaaggacaattctcgagcctatacccagtaactatcaaagagtatagaaggaaaaagtttactgcatatccgcaaataccaccctcaccttagcctagttgaagatgaagaacaactctcttctcctttctcctttagacaagttactagcttgcttccaagaacaccttcatcaaccaagaactaaaacactgagtcttgaagaccctgaaaagcttaggctcaaaccgatcttgtttgcccaaccaaacaataaaactcatcatggttattccatacaaaaccgtcacagtaacgtatatataagtcaggaactaaccgttagaaacgtgatcccaccgttgattatgtagccgatagtatcatgaataactccaaaaatttacagtttgatctgacttcaataaaagcttcaaacgctgtcgtcaacaagccatctcgaactgtttttttagagttttctagatttgacagactttgcaattacttgtccagaaagaaacgtgcataacttcttgattttaagtctgattgaagatccgtcagttgctgtggattttagacagcatgttctttctagagacaccttagtccttatctgagtccctctggtctgtcgggaattcaccctgcaagaaacattcttgaaactgttcttcctctttcctcttttctcttcttcttctttctttttctttccttcgactgatcacaacaccaccatctatgatctgctacaaaatatactcatcactggtttgccatcatcgttgaacggtctcgtctccgtagccattggttccggtgatgaacggttaagatccgtgacgtctcctccatcaccgcttccattttcttcgtcacaaccgatctcttcccatccttctattcttctccagtcataacatgtcctctttgttagatcaagttctattatccaatggtggttcagctttctcactcaaatctccacggatgacctatcaccatgataacaacgaaacagtgactcacgatctctttcttttaatgaacgaatgacaccaccagcactagtacaactatagcttctccactctcaatgatttaagtgctgctcctctcaaggggttttgattcgtttctctctttgacggcacactaagaaggagatagatacaccaatttatatagacacacaacacacgacaaaaacccttgtcgtattatagtaatgtgtttaactcataatgttaaaacaaaatcgtctaatatgatcgggagggggtgttacacctatatttaaaatgaaaccctcgaaaaggttataacttataaacattaaaaataacatattttctatcatattccaatgattatgcctatattggttgcataaaaaggtcgaagaagtgagattaagaataatagaataaaggaaatctagattctggcgtattccaccatctcatacttgtgtttaactttatctggggtattcttgttccactcagggaccaatttagatacaatgcccaaacttgtccctttttggaaagaatatggaggagtcctcttccacctttggtaaacttatctagtaatttatataaaattttttttttttttttgtaatttgagtattactatgtttattataaaacattttttaaaatttttcttaaaatattatattttatttaatgtttttcatacaatataatccaaaaggagacaatatacacacttttctagattttatacacataaaataacacagtaacatattaatatgttattttatgtctataaaatacagaaacttgtgtttgttatatggaatatacagttttggttgtaaatgttgatttaatacatgaatagacgtatttctctattcaaaatttatacttaatgagctttctaatttgttctcaaatcaaaggcattttatgtaatattttataataataaaggtttatttttcaaatgttcttcaaaaatacttatatagatgactttgtcaagattattctagaaccaaaaaaaaaaaaaaaagcgtcaaaccgagtcagattcctcttctagtcaaaaattataagaaagtttcaaagaatgaaacattatgttcctataatacctttttgtttaacattataagttttttaatcattaagatcactaatattgatcttggtttcttttctaatgattttttcataactttttaagatatgtttaagaaatttataagaatttttagtaaaaaagatttatttttaatactgtcgattcaaaagaatataaattatttagaaatatttaaattttatattatttcaatactactatgtttattataaaaaaaaaatctcttatttttgcttaaaatgttaccttttattcaatatttacttcatacaatatagcctatatatatataaacacattactatgttattttatgtgtataaaatacagaaaattgtgtttgttatatggattatacagttttggttgtaaaatgttgttttgattcatgaatagacgtatatctctattctaaatttatacttaatgagctttctaatttgttctcaaatcgatggcattttatgtaatagtttataataataaaagtttatttttcaaatgttctacaaaactactaatatagatggctttgccaagattattctagaaccaaaaaaaaaagaaaagtgtcaaacctgagtctgatttctcttccaatcaaaaattatgataaaatcctaaagaatgaaacattgtgttcttataatacttttttgtataatattgtgcgttaaatattattttgtatgaaacctgcaatcactatgtatgcataataaattattttttatgtctatataaacggtcgaattcatttgatataattcacaattgacaatttcaattacaaaaaataataataacaaaaaatttcacttttctctcattttatttcagtatctctatataactgccgcttttaatttttttcttatttatatttttatctactataaactaaatctttatacaaaatctctctctgctcttgccgccgcttagtgaaaaattccagatcggaggctggagagtggtggctttcatagcaccggctctgacctctccctagtagcttaattttgttttagttcttcgttttcttcttgttgtggctttgtttggagaaacctttctccgaagttggagtttgtgttttcttcccatcttatttgcagaatttcagatttcgtttggggaattgtttagtttgtttcgattcttgagattgggtgtgttgaggaagcggttagagtggctagatctgtaagggtttctgtttacagtaaaattgatgatgccggatctattcgatctacggttggttcgatgaataatgccattgtattttgcttgttcctgtctcagttctttatgcctttctcgggtcaatctatgtttttgccgttggtgtggtttggttgttggttagcgtttgcgccgttcaccatttgtttctcctttacaccccggtctcgtcgtatcagcttgcagttctcttttggttctttccctttgtaggcagaggcttcgtttggtttgaagttgtgaattttctctatgtttgcagaatctcttctccttgttgtggttccctgtgtttgatggctggctcgagttttcgtctttctcgcttctgtgagtggtgattttcgagggcttatgcttcgctccttgtccttgcttttcagatctgttgagattggatcgcgttttgaaggattctaactagacgtccataggcgtatcagacgtcatcgtcacatccagaagcttgtttgaggctctcttagtgtttttgcttgctggattatgatttccttggttcttggtttcgagagattggctctcatcgtgataggaggtagttgttgttgtctttgggtaagcagggggcacccttgatgaatctcttttgcaggagttccaggagaagatgtttcctaggtttcaaacctatttgtgtttgttctatgtttaagggattgccctctttcgaaactggtttgaaatttcttgctttgtaattctagttgtgatccttgtttccctttgttagggcctagttttcggggaagtttcgttttcctccggctcttgtctccggggactgtttcgttgtccgctggctttagcttcctttgtttgggcatttgtaatctcaccataatttcatatcatgcttttcaatgaaattcaggtgacaaaaaaaaaactaaatctttatatataacattgtctattttatggtagaaactccgtaaaagattgtaaaaattatgctaaagaaaaagatattctgttggaccaaaaaaacaaagaatgaagaaaagaaaatattctcaatgggccgttaggtagcaaaagcaaaaagcccattgcaactgtgaagaatagacgaagccttaaaagaacaccaattcgctactttactcttaaaataaactctccactaaaaaatatgcaatcactactcttgccgccggcgagttcctccggcgtatccgccgtcgcgctacggccaggtttccagcactcatttaaccaccaaagcctctctactcgctccctgccattgtttaatccacttctcttagctccgaagaagaaaaccaccatctcctcatatcaatcgccaccgtctctgtccgtctacggtttccaaatcggaggatctaaacctagtttcacaccatccacggtggcattttcatatccgacttctccgtcttccgttcccggtgataatgaggtcgacaaagcaaaactcgctcaggttctctatccatttcttcgcctttttcacaagctagctgaaattgaatgtagaaagagagaaaatgatctaacaaatcgaaattagttacaatctgcttttgattttaggaagtagataacaatttaggatttgagttttcagaattgaaattttgaaaagtgcttagtgtgaagaatctttatgcagtaactgtattggtgtggaagagattttttttgttttatgagtatgggtggtttattattcacaggttgcaaagagattggagaagacttcaaggtactttaagagactagggagtattggtttctgggggcagcttgtgtcaactgtggttgcagctgtgattctatccttctccattgttgtaactgggaaacctacttcacctgctactttctatgctactgctagtgggattgctgctgcgtttgtctcggttttctggtcgtttgggtatattcggctctccgagaggctccgtcgaacttccatcgaccctgccaaggtaaatatgtcgttctcttcattgtagttcaatcctaatcagtgaacacccatacaatagcgcttgtaggtacgtatggtcaactttgtttgttaaagaccggtctgtgaacctagatttagtagcagctcttgaaccttggatcatgtccagtcaggttgcccaggtcacccaatagcggttactactcctacttgagtcctgatactcagttttgtagtttggtgtctaaaggaaaaaatccagttttaataaaggttgtgttgttgcaggcgccgcctcgcgctgatgttgtgaaaggtttgaggagcgggattatggtaaatattttgggaatgggatcagcactactcgggatgcaagcaacagttggatttttagttgcaaaggctttaacaacttcagcaaaccctttctaccaaggagtctctcagggatacagtcccgttcttgctcttgatgtcttcctagttcaggtattaagctctaattgtgttcttattataagtcttactttatttgtgtaagttcactttttgacttgagagccatttgtgcaggcatcggcgaacaccttactctctcatttccttggtcttgtttgctcgttggagctgttgcggtctgtgacagtgcccaattcggaatctgtcgtagttcctaaggttgcttgagtttctgcctttttcagcctcacttcatgtattcataaacgttgaaagctggggctgttgtttccttttataaccgagaaccaacgattgcggattcaatggctttgttagcaacattattgaactacataactcaaaatcacaattcaacataagaagataaaaaactgaagaacatttttcattctttcaattccagtatctcgtaaatcacataagagactaacttgtttttttattgtctccatataaatttcaagcactagtctcgagcttaaaaccatttgctagcccgaagctgccccaatacgctgattagaatcacatttagttcctgaagttacacagacatggacttctctatccacagtgtctatataaagagagaatcaaatgaagggttggttcatgacaaaaccacactcaagtctcaacttctctaattcatctacaatcatagctagttacgtcgcctgttgcactctttacttagttttaccttcccactcagtccaattctgtcttgttttctttcactgcatccaacgaaaagagtactaacagattagtattggtctatgaagaggatatcactttggtgtgatatgttcaaagaagcaaatatgcaactggtatcaacacagaacacgcaaaattgatgtaccactgatatctatataaatacttaacagtcaacatctaagcatattttgttgatgtgttgtagttctattttataaacaatatggctgatgagattctaaccggtgaactcctcatctaattgaatacaccatcaaagaaacttgattaatgtgatgagtctcaaaactctctactaatgctcaaacaaaaccctgcgcaagtctataatcccctcctaatgtattctccacactcttttttaaaattttcagctatcagctaatgtaagctctgttgttgagctggcgaagctatgcctgaaccaacaaccctaggctagttgaaatattagagcactaggcttaacaagaacacctttatcaaaggaacaatgagcaatgtatcacaggactaactgaataaaatggtttaagaaggttcagtatgcttgcctattgcatcttctttatcttatttgtgggcttagcaataatcttctgtagtaatctttcatcgatcttcctgtactgtgtctgaatgactcgatgagttaaagatagcttctcgtcaataagatcctggtatctctcgtacaaaaagggaatcaacagactcagaacaacacctgtccatttatatcacacagagaaagtcaattagcaagtcttgagtacaaaatgtatactcttccccttgtggagatacttataggttctatcaataatgaacaatgtaaagaacaaaggaaaaacaaaaaaactactcaccaagatagagtattgtgaggaagtttaagaaatttccaacaaatgatactgtccacaacacaacactcacctaccataagcaatctcaatgtatcaatttcaagtagaaatctattggaaaaaaacaaaagggacaagtttgctgacccgaaagagttgctttgcatttcttcccacgtaaatctcacgagcaacagcgagcacggtattaatccagactcgtatagcatcagccaccataaacacaaattcctcagtgatttcaagattaggtagttgaggcataggcctagtcaataacaatcacagtaaatttcagattcagctttagcacagaggtaatgcaaacttttcttcatacttaaccatatcttatctacaaattagatacctatagaaaagaatagcagatttggcccagaggcataggtctggtcaagaaatttcagattcagctttagcaaacatacttaaacctgtaaccattatcttcttatctacaacaaacttatgcaaacattgtgacattcttcttcactaaaactatgcaaaccaaaaataatgtgacattatacaatcaggtttagatgatgatacctattgaagagaatagcagatttggcccagaggaagagtataacgacggagagaagctgagtattaacaacaaaggggaagaaactgtatccacatttctcaaagaggaaccataacaatgtcgttgatccaagtagaagaaaccctccgcgtcgattcttccacatgattaaatctgcaactgcatcagttcagaaatcatatgaatcggtagatctacacgttaatggagtcgtagaacaatgaaacaatgagagaaagagagaagaaacctgagccgaatcgtatcgattgatgaacagattcttccattgcagcgaatcaatatctctcacgaatcccaaaattgttttgagtctcttcgttttacgcacatagtcgtctcttcaatttaagcagtttgtgcggtctatgtcaccattcatggccttaactaaatttcttttttgcttttaaaccattcttatctttgagtaattgatctgattctatcttttggcatttcttttttttttggttcacaatttttgttgttcctttaatctccattttccattgtgaacaatatatacattactttggaatatagagatgttaaatcggtgtatcaacaattcaaagatggggtatttttatattaaacggaatgctttttgctggaacaagttgtggtagtagcttagtctggaaagctactacacactctgagtctgatgatccattcaaatacttgacatctctcgagggacatcatagtggtgaagtcacttgttttgtacttttgttgttggaggtcaagtgctatactctgtcgataaaacaatcaaggtgtgggatctcaacaccctgcaatgtataatgaccttgaagcaacatactggcactgtaacatcactcttatgttgggacaaatgtctgatatcgtcttccttggatgggaccacacgattggcacactcacaattggtcctcaaggattgctattcagtggacacaaaagtgggaacttgcgtgtatggagcttagctgctggcaccaaagtttagtcgttttaacaattttcgactaaagaattttggtttacttgtcaatatacattggtggttgatttgatgaaccctaatccaatacaaaagccgattaaaacctgctccatttctttttcccgtacattgttgaaaacaaaaggaaagaaagaaacgaatctcacaaagatagttttggaatcatgtaacatgtcacaataaaagctatgaacggttctcttggaacttgatattaaacattggacgtaaaggttctagcacagactcttcttctacttcatcttcaccttcgtcagatgatatttctcctactctcggttgctttacttcttcctcagtagtgtttggtttttgcttcttctcctgtttcttctgcttcttcttttggcgtttcaaacgcttcttcgatgttttttcctctgcagctttctgtttctcttctcttcttatagtaaactctgccatttttaaccgcttgttatagtcaatatccatccttgttagtcggtcttgttctctccgcctcatttgccggtactgtaatagaaaaacaatgcatcagtattgcacaagtttagatgtctagtataataagaaaatgatgtacacacgctttatcaataatcagggccacacttcagataacactcagccacaacctatagaatcaacacaacgaccatcaaccattaattactaatacccacatgagcttctcgcaactaatactctcagttcaagctctaccgactaagtaatcaacgtcacaaaacacttatagactaagaaatttaagattcctatcacatgtacaacaaggaacttctagtaattaatcgactatagcttcgaatccacacttagccatgcctaagaacaaaagaccaggcattcttcacaaacaatccagctgattttcagttactgaagaacagaattcatatacagaagttgaaatcattcacagatcacagccatcaaaagactaatacaggatagtctatggaacattctatcaaactcttatataggcataaaggcattgtgatccatcacaaaactaagaaaacaatgtcaacacaaagtccactaagataattcagatcccaacaatgaacttctcgtaattgattaccacacctaactacgcctaataacaaaatacaaagccttatctgcagtttcagattccagatacaaagccttatcgatttaagagaaaggcttagtttagttacctgatggaaatctccagaaccagaaccagcggaacttccagaagtattactaacacgaacaggaacgttctcaaggatacgtcggagctttacttctagatcttcttcatcttcaagcatcaccggcggtttatactcaacgatagacgaagatcctccgtgatcagccttcttcgcttccatcaatgccgacgccgtagtggcagcaaccaccaatcgtgtgtcgccttgctttggcttcccggacgacattgtcgaaaccctaattccggtcacacaatttggggattttttttcctctacgatttttcgtcaagacgataatttattaattttgctttgaggtctgtaaaaattattgtcgtctacatataaaaatagaagggctttttgggcttgggctgggtttgtctattttttgggttgggtgtattggacttacctcctccatggtttttttttggagttaagtaaatctaataataataagacaatctcaataaatagtcttttacatttttttaatggttgcgttttttctttgtcatctgaattttattagaaaccaaagtaggatacaagttcaaatggttacgtttatatatcgtaaattttcgttaacaaatttactgtaactttttcgggttgcgtctcttaattgtaacttttagtcgaaacatttacggttgttcttttatcgcaagcacttttgaatggttgtgtttgtttatcgcaacttttcgatagaatatttatgagttttttgggtttttctcggttgtatctttttatcgtattttttcaaagaaatttgacggttgtgtctttatatcgcaaacacttctgaacggttatgtttttatcgtaaatttttattaaatatttacggggttttctgatttttttcgttctgtctttttatcgtgtattttcattgaaatatagtcaggacttttttacggttatatcttttttagttgggtatctttttacgattgtatctgaattgttgtatctttttatataacgtaactttttgttacatatttatggttatgttttttggttgtatctttttatcgcatattttgttgaaatatttacggttatttttcacagttgttttttttatcgtatctcatcattaaaatactctttaacgttaaagtcgatggtaacttttgttcataactcttcaacatacatttttttatattttcattattaaaatatgaaacaaatttttatatccgcttagttgaactactgcaacatttggtttactaacaaatcattgtaattttctgtttattttaggaactattgtaacccttaatattaataaaaaccgttgcaacatctagtatatttgatatctataatcgtgtttctcggtataaaacttcacaaaatatatttttaatttgtgtaaatgaattttcgcaaaccatttaattgaactaacatttaatttatttgactaatctttgcaaattttgatttattttatgaatcgttgtgacatttagtttgtttgacgaacgcacaacctttggcatatttaatatatgtggtcgcttgtctctatataaatttttttttttttttaacatcttcttttccattgttattatgatcaagagttttccagctgtaaggctgacgaaattacaatcggaatgtaatcataaaataaaataaaagttgaatttactaaaatacatttaaatatttgcaattgttcagttgaaccattgcaacatttgatttttctgacgaaccattgcaatttttttttttttttttatgaaccattgtatcatttaatttatttgacgaactgttgcatccattgatatattatcttcagtagcgtccttagattataactctttttcacctgtttgcctctttttatcgtaatatttttgtaacctatttttcttttagtttttttctgaacaaatgttttatatggttaaatattttcattgtaactcttcattaaatatttaatacataataaaaaatcaaaataaatatctcatatggttgagtcttttcattgttacggatagtaaaatatttttatttattttaaatctgaataaatacatattatggttgtttcttttcattgtaaccctccattaatattttattttaatttttaataattgaaaaaatattttgtacaattgtattttacaaagttgcatctggtcatttaaaattgtgtcttttcccctccattttcgtcttttcttcaaaatcgttcgtaaaacatttttattttatttttaatttgaataaatagttttgatggttgcattttcttatattgaaactcttcgttaaatatataaatttattaattagaaattgtttttaacagttatgtctttttacaatgttatttctagtcgtttagaatcgtgtctttttccccatttttcgtattgttttatcacaatttttttaaaaagttatatattttacaaacaattgtgtcaattaaatgttcatatattttgaactttatatattttgtttaccaaatattcaatctacacaacatcgcggtggaatacattcttagtatttatcaataaagaagaaatagaataatttctaacatataaatatggagagttactaaaatgtcgtagaatcaaaagggagaatttgaaacaaaaacattcttaaaaaggttttgttcatctaaattttttttactcaatttgatttatgtttacatgctttatttctaagcttcttattacatactccaaaactatgggttttatcttttctttctttcatgacatcaagaggagttacgttggagcaacaaatatgtccataactactgcaaaactaaaagcctttttgtgtttctttaaatgcggttgactagcctagtgttggcgtctctaacgtctttaactaggctagatttcaacaacttatttctcataatcacattcatcctattcgtatcaaatggctagtgatagcatcatttgagtattggttttaacttcagcctcttaagcatgctttttttagttttatcttatctgattttttgcacataaactctactatttgtgttttgtttacaaagttaccatgtttaaaacttaaaaggaacaacaattgcatatttccttctcggatcaagtttcatagcaggaggaactgaatcagacaaatacgaactaaatcagagatgatgaattgatgattaagatatagtagggtgttgggagaatagagagagtcagagactagagatactagagttagataaaaatatatatatataaggaacatcatcgtcgtagactagagttagactactgctctcctccgactttccttgtgattccagagagcttcactttccgattttagttcttttttgtgtttcccgtgtatcgggctttagcttccaaggatttctctgttttccgccgacataaatatttcaaatccgcatttcaaaaacgtattctatccatgtattcctcttttgtattatataatggaaatctttcagtaaaaaagaaaaaaaaaggaacatcgtcgtgggaagatgaaaagacaataaagctgaaattaaaatttaacgagagaaggattctagggtttttaagaatagctcatagttgtagcagcaataaattcaagtgcaattaattttaaaaacaaaaaagtaagttaatattaatgtttaagcataaatatctaaatatttaaatgatggatttaatttcccacacgcatagtaacgtaagtcgcacctcataccaaagcactctagagcgagagcccttgtgatagtgcgtagcctcatctaggttaggcaatgaattgtgagccttacattgccatgagcttaggcgttgcctaaacaagccatttaaaatacatgtagatatatttccccaatatatttgaacccaagaacgttttgagagataagatgtgaaagtttaattttgccaaagttctagaatttaagattttttttgggtcaaactaattcataatattatttaaaattcaaacaaagagtgtggaagataatcttaacccttacactcgacaaactagaagagaaattaaacaagtcaccacaaaggaaataagatagagagacatcaaatcgataaattatctaggttaaagctgtgaagcttttcgcctaagaagagatcccgatgagtccatgaacattctccagccgttgaatggtcactttaacttgtgacgttgaaaaataatttgaacttccggtcctcgacgaacagagaaccgttgcatctagaacataaaagaataaatgtaactctagtttatgtaaatcttacttaaaagaatagatctcttctaagagttcaaaaggaaacaaaacaacttcgttcctaaagtcacaaaacagataagttgatatagatatgtcacatattcaatggctaaaagagactttcaagagaattagttagagcatcatcattagacaatttttgatagatgtctttagtataaattagtaataaaattaaagacatccctctttttcttgtgtctcaaatgtcttttcaaagacacaaatcttaaactaaagacacccactatttgtttattattatttgtattagttttatatttagagacacccacaaataaatgaccaatgtgggtgttcttagagccctggtaggcagagccgtgcctattaagataaaaaagaaacattcgcctacgattacaaaaaacgaagaggctatatttgttaattacatgtttataagtattatggaagcaataacgttacaaagattaatacaaatgacaaaggaaagtagtataatatacaatatatacaaggaatctttaatacacttaaggcaataacttaaagtcttcttttctcacttctttttttcctatctcattaaattttcttttctcacttctttaatacacttaaggcaataatcatatttatcaaactttgttaattatttttatatatagatactatattttggatattaccattatatatatatatatatattaaatttttattaactaccaaaattatattttattttattaacatcatgcactataccgtttgaatggtaacacaataataatactaacacaatttactaaattacacattataatcaacctaattttttttttggcatatttttgttctaaattattttttttgttttgcttaaaattttcgtaatttattattaaactttgaacattaaaatattttttttgttatgtgtacattattttattaaaactattaaactatattttttcgcctatggcatcaaaattcctcggcacggctttgctggtaggttttctctattaagaacaaatcagataataaaataaaccaatgtccataaaacaaggattcactcctcacactgctaaagcatagatggagaaacatcaaaagctacattgagcaaataaccaatataaattgaaaattaattcaaggtttctaaaatttttttaaaaaacaaagttcacttatttaattaaactaaagtttcattagaatggaaagaacatgataaggatgcttagtacagcctatagccgcataagctgccacaactacttcaacttcagccacttatcccattgccgttgccattgccaccaaaggtgctgcttcctccgttatcaccatttccattgctttctctgcctctatggttgccacttctttctcccatttcaattctgtcaccgtaaatcatgcggtatatctcatcttcgaccatgaggtgatgcctcgatgacaggaaaggctgagtactctcccatacgtcagatgggttaagttgcaccgtgctagtgcttggacatgacaaattcattggtgcattaatcattgagatgtcggatcttcctaagggactacaaaaagaataaaaatgaagatttttcatcgattaataaaataaaataaacataagaaattttattgaaaatagtcgaagacatgaaatatattttacctatggttcaaaagtggatgtgaaaggtaatgcctagctctcatcacccctggccgtacaaaactccagaaaatacttttgtttgatggtacatgaatatgcggaaacaacggatatgggctgcgataagtgaatggtggtagtatcacaggtgaaccattaggagtagagacttcttctgtgtatgtgtcctcttggctacttgaatgtgaactctcagagaattcacgagcaaagtactcagtaacgtagaaagaacactctacataaagacatagacccctacgatgttttgacagagcgggatgttaaagtgcaaattttgccacaagttttacagcattaaagtattaatgtaaccatatttagtgaaaatcttactcaaaaggataccgttgacctaagcatccaaaagggcacacctctgattttacaatctacaagatacacaaaacatcattcaagtattactctatacaagaaactcatttcatagaataagatctgttcaaaaacgaaacaaatattaccatctgagaaaaggatccaggatcattgtcttcttcttcttcttcattattagcaatcataccattgggattgaagtgagtaccgtctgaaaactgccaatgacccggttctatatttctacagtttggacattccatgaagccctttgcattataggctgagccgatacagtctgtatacaaagaaaacatgtcaacacaaaattgttagatgtctatgaaataacaatagaccaatgtattggatgtatcaaatgcaagtagattaaaaactcaatatatacttatgaatgaattgaataaaaatgatccaaaatatcacaaatcatatatcacaatcttaaacatataactctttcaaagtacgtattttcttaatacttgagaatctaaggatccatagttctagaaacgaattgaaaaggtaagtattttatatcactcatataaacaaaagcacataaatgatcacaaatgaaaattatattaaaaaaaaaaacaaagtaataatttggtgtgcaaaaaacttcaaataaattaccgaggtgaaacttgtgaacacatttaagtgtaaccagtgttcgttgaacatcattctcattgaccaaagccccacgacaaatcgaacacaaatccaagtcaccgagataatctgagtcttttggagaatcatgattctcttcatcaataagattctgagaatcacgaatctcttgatcaacatgattagaagaatcatgattctgtttagcaacatgattcatagagtcatgattctcttcatcaacaggattcagagcatcacgattctcttcatcaacaggttcaacgttgaggtccaaagtttcatcaacaggttccacgttgagatcaaaagcaaatcttttgccttcattaacattgctacttcctgaactcttagaatatattctctctacttgtttattgactctatgaaactctaaaatggatagtttatataagatgggtgctactcaaaattttactcttctttagactcttttgccaccttttgaaaaatgtaattattaccaattaataaccgatatttaatagttcgcgccatttctatatctaacgactttgtctggtagattttatttaaaaagttgttagagatattactaaatatctcgtgccaattttagctaacaactattatggaccaattatatcatagtaatataagatatatctagtttaaaattatttttggccaattatagtaaagtgtctctctatttctatctaatgactaatgtcataattgtatttaatgattatgtaacaaatagaactaaaatagttaaaatatcttttgctaattacatctaatgactgatgtcaaatatcattaaaaagataaaataatattttgtaccaatcatatctaaagacaattgcatgccaaatatagataaaatttgtaattgacaccaactattaatgtgtattacaacaaattatatttaattagtatttttgggaaattttttatttttcaactttttatatttatattttatggtatgtagctaaaaaaatccaagagttgaataaagagataaatattataaattatattaaattaattaatgagttggaaaaaacaccaaaattaatttatgaaatttatagtatatatatatatatatatcattgtttctacctttttctactttaatgcattgaatattacaaaaaatattattactactaaatcatatatatgaaagttggccaactctctccatatgattgacacatcatcactttaacatttgtcatgtgtccactgaataattaatgtaagttcttcaacttctaatttatagattaatgatgtatttattatttaattttacaaatttaattgtactaatactaaatctattttgttattatatgtttttcaataaaattattttattagttttctcatactcgatgatttttttttttgtaattttaactcaaattatgagtgtatagtagtcatggattagttaatagtttgaatagtttgcatattgttatatatctatataataaatcgccgagactgaaaagtatgtaagaagtttaatcatcaaattcttagatttcgaaaattccaacattaccctctattaaattggtttaagacgaagattgaaattgtgtgtataatacattgttgagaatgttgttaagaaaaaatattttaatactaagaataattacttattacatgagtgaatgattagataattaaaattatatttaaatgaaacgatacaaaaaatctgaaaataccgcagcgtagcgagaatgattacctagtccaactaaaaagagttgtttaaagcctctcaatatgtccacatcagcaaaaataaaatataaaaacctaagaagaagccatgtcacctcattgtcttctttctttggataaacctatgagcatcattgaaaagaatagcaactttagtttgtgtctctcatccacgttatgaagatctcatggagaaatactagctttaactatgttgaggccataaagaggtgccgaaatcataacatagtagtaggttatcctgagtctcatcttgatgtgaacgaatgcatcattgactaaggatttgcattcccatgaagcaagtcgaacccttgtgggaaacatgtccaattgagaaatccatatcataaaagaatacattagacccatttgaaccaaataacatcatcccaagatactttgtttgctctagaccttaaagattcctaagtatggcctgcatgaaatccgtttaagttgcatggatcagccactcttgagtgtagaggtaaccgtattcgcaaaggtccttatgtctcaaacgtttcaggatatgacccattggtgttcacgaatcaaactaaaaacactcattacagccatattccactcgggcattgtataataagtttctcagcaaaaggtcttaggtttagtaaaacattccaattccaagtgttccaagttgtttcttcaagcataagtttttttgtaatattgtattattcttgtatcatactgttatgttccatgaagatggggtatatcctttggatgttctgctaaagatctgtaatttatattgttacataactagattctgtaactaaaattttttaaattttaagttatatattttgttaagattgtttgttttgtttaatgtttaagattgtataatagtattttaatttttaattttagaatttcacatatggtataaagttttattttaatatcgattcaaacccatcctaccatataactccgtccaatgacttttaaacatcattttgttatccttttcaataatattttaattttaaaaatatataattatattaaatctaaaaatttatttaagtttctaatctaaacatttaatatcgtgtatttaattaacaattaaacagaagtagaagcctgagatatcgaatacgcccactttaataatcattgagacgtaacttatattgctagtaatgacaacatttttctagtgcacaaagaaatcaattaatgtcaatgacgttaaattgtatatattgctaatatttattgcaaaagccaggttttgtagccaaaatatctccgaaaatatgtatattgatttggctatagaatcaacttgctaaagtgaaatattataattgttcaaatattataaacttttatcaaatttaaaatattataaatatttgaactttataataatttataagaaatttaaacattataaatatttatattttttactacaggtgaaatcttattattaacgggcttgagtcgataataatacatgacaatttactacggttgaaatcgtagaattaaaaaccaaaaaataattatacaatcttaaacattaagtaaaacaaaaaacattaacaaaacatatacaactaaaaaattatttttttcttaaaaagcatctcgattattttgtaagaagtttaaactttataaatatttagactttatgcaacatgtgaaatcatagaattgacgggtttgggttgatattaatacgagatggtatactactggcaaaatcctaaaaaataattaaaatataattatacgatcttaaacactaagaaaaacaaacaatattaacaaaacaaatacaatttaacatataattattttaaaaacaaatctcgattcttttataagaagtttaaactttataaatatttaaactttatactatctgtaaaatcctagaattgatgggttttggtcgacattattacgaaatggtatactacgggcaaaatcgtaaaattaataattaaaatacaattatacaatcttaaacactaaataaaatatacaatattaacaaaacaaatgcattttaaaatttcaaatttatagttataaaatatcgtctctcggtgtatcatacatttaaatcaaacaaaataatagcatatatctatagatcattctaaaaagaaaatttagttaataaaattaggtttgcggtgtaccactagttaatctctaatataatacataaagttaaaaaaaatctcaatatagttctctgcatatattatgatttgaaatttcaaaagcggacatatattacccaattgataaaaaatgtatgtggttaacgtcttatatcggctaaatatttagacaatgatttagaatcatattatacattagacccagatccaattaaaggtgatcattttattattttaacaccaccaatattaaacatataaaatcaacttgatttaaataagattgtatgaaaccaaaaatatctcgtggtataccgttacttaataacaattgtaaactataaaaaataaatatctataaaatgatatagtttataaattcttatctataataaataattagtaaattttttaagccactacttttcaaaaataaatcatcagtgtataattaatttatttctcgcaaacgtgagagagaaaagtaattttgttttatttgttattccaaaatgataacatctctagtttaactttgtccatgagaattgagatgtgcgtattaacaatcaacaaaaaaactgctctgttctttctcttagtagctcaatttagcaaatttctcaacgccgttctctcgccgtcccaatcctctttggtttaagaacttctccctcttcagtatttcttgatagttgagcggagcctctgtccgaagatattccggttttacgtcagagtttgcaatctgtcgctttttaaccgttagtcagcaaagttggtttctgtttcttcccgttacaattctttgtgaattgttttgaagtgattttctcggtaaggtcaattcaagagtgatctttcttcatgactatggatctagataaagctataatgaagatgtcaattaaagatgacgggtctttgattctttccaatcaagctaagtttagctctatggagaggaatagttgtagtattatgggcagatttctgaatccccctcatcaaaggatgtcaaattggatattagacatgcctagaatttggcgtttatactcaagggtccgtggcgttgccttatcacaagaacgataccaattcttcttcaaataagaggaagatctacttgaaatcctaaaaacgggtgtgtggactcaagatggtgtgttatcatggatcgttgggtggaacaacagccggaggagtacttggtgtttcttcctgtttgggttcgtctccgtaatattcatgtcaattattatacggaggagacgattaaggaaattgcttcttgtcttggagaggtttaaaggtggaattagatttggaaaagtctcaagctcaagactatgtgagagttcaagtggtttttgatgttaggaatccattgcgtaactctaaggaagtacaagtgcctactggtgaagtagtctcagtcacttttgattatgagcatatccgaaaaagatgttttctgtgccaacgtcttacttatgacaaagctgattgtcccagcaggcaacaaggaagtcggcaaattccctggtgagagtttaaagaaggtccatgtgaacttaaagtctgataagattattaatcccttggtgggaagggattttaaggatattcaggcagataaagatgtgaaaaagaaatttggggtcataatgaagcgacaagatttagtagttcaagatcatgtggtttctcctccttcttcaccaaagtttttgatgttacctgaggaattgcaaggatcgtcaacggcaactcattctcaactgatgcagtctcctttagagaagccatgttctgaatttatttctctggatttctcgtcgggctttaacccctctcttgatcaaggtggttcctcagggttgagtatcaagcagaaaaatcctagaaagagcaaagctctagcgataaggaaacaagtcgtgtcttctttgactacaaatgatattgaggttagttttaatcctaagtttgacattacttacaaaaggaagaaccagggatctggaaatgaatcgttaaaatgtcttaagagagatgataatacggtggttcctagtgaaccaccacaatatcaataaggcatcctaagttggaattgccaaggtttgaggaatccttaaacaattcggcactttaaagaaatgaaaaagaatattttctggatattttattcccatggaaaccatgaattctgatatgtttattctgaaagtctttagatggttaggttatgattactttaacataatagaaccggttggaaagagtggtggattagctattttttggaaaaataagctacaactagaattcctttttgaagataagagtctcttggatttaaaagtatctcaaggaagtagaagttggtttgtttcttttgtttatgggaaccctgtgttgcagctcagatctcttttgttggagaaattaagcagtattggtcttttgagaaatgaggcttggtgtatgattagtgatttttcaatgacattttgtctaataatgagaagcttggaggcactgctaggttggtatcttcttttcagcctttcaaggatatgctatgtaattgtgacatgcatgaattaggaagttcgggtaatggttttacttggggaggaactcggaatgcgcaatggattcaatgtaagttggatagatgttttgggaactcggagtggtttactatgttcccgaattctcatcaatggttccttgagagattgggatctaatcacagaccggttctggttaaatttgtgaatgatcaagagctgtttagaggtcagttttgttttgataaacgttttgctgaggatcctcattgtgcatatgctgttcttagatcttggaatggtggtaattctgaaggtgcttcttcttctatgcttcgtttgattcattgtaggaaagccgttagtagatggaaaaagcatagtgattttaatgcttagaaccggattttgaggttaaggaaagatctggatgatgaaaaaagtgagcagtatccttgttggactaaaatctcagatattcaagctcagttgggggttgcttttagagaagaggaatctttttggagactaaagagtagagacaaatggctttttgggggtgatagaaactcaaagttttttcaagccatggtgaaagctcaaagagcaaaaaattcgttgagctttttggtagatgagaatgacaaggaacaaactttgaacagagagaaaggcaggatagcagctgaatattttgaggatttgtttacatcttcttatcctgctaatatggatgttgtcttggaaggcttttgtcatcgggtttctgaagatatgaatcaagatttaactcaagaagtcacaaaaacaaaaatctttaatgttgtattctccataaatgctgacagtgctccaggtcctgatggattcactgctttattttttcagaaaaattgggaattagttaaggatcaaatcactgcagaaattaaggagttctttcgtactgggattcttcctgaagagtggaatcacacgcatttatgtttgatcccaaagattactaatcctcaacgaatgtcagatatcagaccaattagcttgtgctcagtcctatataagataatctcaaaaatcttatctttcagactgaagaagcatcttccaaccattgtttctcctacacaatctgcatttgttgctgaaaggttagtttctgacaacattctcattgcacatgaaattgtgcatagtttacaaaccaatcctaagatttctaaaagttttatggcatttaaaattgatatgtcgaaagcttatgatagggtggaatggccctttttgaaatgaattttgattgccatgggttttaatgataaatggatttcttgaataatgggttatgtgacttctttctcgtattcagtgttgataaatggacagtcatttggtcttattaaaccagaacgaggtatctgtcagggtgatccaatctcacctttattatttgtcatatgcactgaagctctggttcatattttgcagctggctgagaataattacaaagtctgtggtattcagtttaatggatgtggtcttacaattaatcacttattgtttgcggatgacaccttgttagtgtgtaaaacaaccaaagatgcttgtgaggagcttatgaggtgtttatcgcagtatggacttatatccggtcaactgattaatgtagagaaatctgcaatcacttttggagctaaggtggaggaggatactaaacagtgaattaagaatagatcaggtattcagttagaaggttgtacagggaattatttgggattacctgagaacttgagtggttctaaacaagatttactgggcttcatcaaagagaaaatgcattcaagaatgactggttggtatgctaaaactctatcacaaggtggtaaggagattttgttaaaatccattgttatggccttaccggtatatactatgacttgtttcaagttgccaaagagtttatgcactaagctcactaatgcaaaagcagatactttttgaacacaaattttctcaatgcacctcaaggaactagacccccatatgcttggagaagtattttatatggtagggcattacttaaagacgggttgaatagaattatagggaatggagagcaaacaagtgtgtcgattgataagtggttgtttgatggtcaaaatcggagaccaatgaatattcatcctttgatgaataagttgaaagtgagtgagcttattgatcctcttaccaggaattgggatttgaagaggctcggagatttatttcctgtgacagatattcaactcattttgcaacaaagaccagtcagcaataatgatctaccatgatctttttaaagaagctgaagtctgtccttctattaatcctctgtatgataagatttggtctcttgaaacggctccaaaaattaaagtctttatgtggaaagtcttaaaaggtgcacttgcagtagaagacaggttaagggataggggatcgaagaatgctgatgggtgtttattttgcaatgaggatattgaaacaataaatcatattttgtttccatgtcattttgctcgacaagtttgggctcttgctctccttcaatcccctgcaacaggctttgggagttctattttcactaacatagatcatgtgcttcatagttcacagaatttgggattttctagacaatggagaactgtcaattcttggatattgtggctgttctggaaaaacaggaataaagttttatttgatggtacaggatctacaacatccaacattgttgctaaagcttatgtggatagtacacaatgggtcaatgctcaaggcaatgggacttctttggggcatacagctgttcagaaatgggatcatcctccagtaaatgaacttaaatgcaacattagtgtggcatggtctggacaacagaaagttgctggtacatcgtgggtggtttgtgactccacgaagaaggtattgtttcatagtagacgatcttattctcaagtacaatccctttttgatgcaaaaattaaaagttgggaatgggctttggagagtatgaatcatctgcactatgataaaatcacatttggttcctcatcacatgatattattaaggctttgaacaaacctaaagaatggccggtgatgattggtcatattgtagaattgttaagttttactaaagataaaccaaactggtttatgatgatggaatcagctcagtctaacacaggtgcgtttgaaatcgcaaagagtgtcatcacaggaatgaggtggcaatcttatatagtaaggagctttccccaatggttgagaagtctgtttgaagcagaaatgactcagcatccgagtttttgaggattacatctgtttgagttgcaggtttggtaacaggtgatattctgaggtttgacctcatctcaacgtggcaattctctaatagagggatgcaaagaactgtaggtggaggtaatcagattgggatgatatgtggttttgttttttagttagtttcctctgtcataggttttctttttatatttttctgcagttcttttagtagtcggtgatttttgttttgtctgtttttaaattttgaaatttttagaggtctatttgacaatttttattcattttggttaggtctaatcttttatatttctttatgtcgaggtctctgtgaggtcttatatatatagttagtcgtctgtagtttttttaaatgttcatccctttcttgtttctctcttctacttgaaatatcatggcagatgagctttgggatgaaattcaaaacttggagcttggtcaggaggatccagctcttttcattcctcatgaagcatatgttctagtagaagatcgaaacaagcttagtttgactgcaaggtctcttaatccacgagctcataatcttaattttgtcattgctgctctgcctagatcctgtggattgacatcgcatgttcatggtagaattcaagatgctacttatgttcatggaaccatggcttttcaataattggtttgttgcaaatcatagataggagcctgctcatgccttaaattttgtgactatcatcgaccttagggtgcagatgcgaggaattcctcttccctatgtttgtgaggagacatctttggagattgctcatgaacttggtgagatcatcactttggacttccatgatgcaaccactactcaaattgcttatattcgagtccgagtgaggattggaatcactgatagactaaggttcttccaaaggatcacttttgattctggggagactgctctcatcaggttttaatatgagaggttgaggaggatacgcagtagctgtttttgagttacacatcacaggacctattgtccttatcgaccaagattacctaattatggaagggaaagaactgtattctatgatgaaaggcttagatcgactatgaattctcagtctcaaatgactgagtcttcctttctagttcctgtgaaccctcctccaagaattgctaccccaccgttgaatcatggagagtttgttgcaacccatcctcattttcctactccaagagaaggacttaaccaacatgttaggggaacttcttatcaggggctctatcaaggctaacaagtctccacagattctaatatcacgtcttcggtgggaacaacagtcacaactggtactcgtcgtgtttttgaagttggtcaatcttcaagaaggtttgaaacagtggaaacaaggaaaaggcaagaagagaaaggatcttataatgaacaagatcaagcgcacatgaaggaaggaattc

SEQ ID NO: 230 - DNA, 89301 bp, Arabidopsis thaliana
gaattctaaggttttgacaaaattaatttgaactggctctgattggtgataacaaaaagaacaataggaatatgaatgaaagagaataaaagaaaataagaaaaaaaggaaaataacaataagtaggaaccaagagtaacataggaattgaacaaaatgattattgtaatagtaatcaaaaaggtgaattaatagtatttaacataataattagtaaaaaatcatttatttgaattttgtttattaatttcatttaaaattaaagttctgcataaatttaaaataaattatattataaatttctcttcaaaacatttatttattttataataaaaaattaaattatattacaaatttaaaataagtttcactttaaaacatttatttatactaatttaaaataaatttataacattcattaaattgaaagcttgataaaaaaaaatttatatatcaatatatactaaagatatggaaaatattatatatagaaatataaatattatcataaaatctattttaaatttatttaataaataaaaacgaattttatttttttgttcctcttggttcttttacaattttggggtgaaagaattttgttttatcattttttttttaggaatgatgaggaaaaatgtaggacccacatatctgaaaatggaacaaaaataccttgcaattggtaaaaaaactgaagaacaaagaggaacacgactttcctactcattcatttacctcaaaagtggttaccaatcggagcctataactaaaaatgaacacttataaacgaccaaaaaaaaaaaatgaatcagtacatcataaaatttgacctaatttcgttctattttgtaacggtggatttgtatatgaattaggcttaagcccacttgggacgacccactataacatttttaaaaaaaaatattgacaaaataataaagtcataattttttatatatatatggtctcattagtattataattaataaattatatatatatatatatatatatggctagatgagaggtctgagactgcagctatttttattatggcttgccgagaaactcgagcagagtgttagaacattgattaaaagaatgaagatgtgatggcaattcctgaaagctatcgttgtatcagaggaagccggtgcatctatgcatggattcacctccatcttttcactgacatcatgtgcaagtgacatctaagtttagctgatttagcaactgtttatgtttgaaagaaaataagctaaagcttacgattttggtagagccatgactttttatgtttgcatgtttatccctacagtatacagagaaattgacgaggacaatcgtctttctctccataatctacaaagaagatgtaagtacctttgaatccagtagaggtgttttaatgtgatgaatataagaaagtgtataagatgtgtaatgatctaatgattgtcatgattgaataaaggaatgataaaatcacagaatcggttagtctggagctttaatcattgtgaattggtgacaagtaaaaaaaaactaatatacttttctctcttctctgaacgatcactaccacattcaagaatcttttttctggttattagtgtgtgctaccacattatattacattgaactcactgccttttttagtatattttttttctttgaaaacaataagacagtttgttcagttgttgttctgatcaccagaagaatcacaaatcagttcttttacttcaagaactcggttcaagttatatggaacagatgaagccaaattatatttaaacaaagactatttaagaaaaagaaaaaaaatgcattatacttatttctacttttttgtataaatataattttttttcacaaaaaacggttttccaaaaaatgcaacacaaagcggagtgtacaccaatgggattggatttcttagctctttatatccaattgttaatccatgtttatacactaataaattcagaaaatgcaatttattgtagaatattgatgtaaacttatcaaaaagcatatatatacatatttacgatatggtttggaatttttggctataaaaaaaaaacataagccatatatacacttaagcaattatttagtaaataaaaataacatatacaaaatatcgtcattgttttgatggaccgtcgaattaatttagacaatgttgaggaaacattttaccgcgagcaaaaccatcaacattctcgcacaccgaagtggaagaaccatctttgactccattctgttttatattaatgtcaattagctccacatttttgcatggaaagattttgctacattgcagattcattgctactttgttcttcgatgttccatatatgttctttaacttgaggttttggatttgaacgtgagactctccctggaaaaaagtaaaaacaagttgtctttagtttttttgtttttgtgataaaataaaataaaataaaatggagcttgttttcgcataggaggttaacctttctttcatgttcacaaggtgggtgaggacaatacttctgatcaatgttgattggttttccaacatcaatcatctgaatattctcgtacacgaagttcgaaacgaggatcttcgaagctgaagattcccaagttttgatccgaataccatcgcttgtaccgttgaaaatgacgtctcttactattaagtccttcgcgtctttctcatctttgttttttcctaaacttccaacactaatcccatgtccaggaccacaattgacgttagagatattgaggttagtggttccagagagaattgcaatacaatcgtctcctgtaccgatgtttgtgtcagagatttgaatgttactacatgaacccatcttgataccgtcggtgttgggactatcgccgggagctgttatagtgacaccggtaatgttaaagtgatggacggagaagaagttgaaatgtcccattttgctattgagagatgttatgtctttgatatttgagttgttcacgaatgcaaatcccatagtctataaaacatttcaagtttattaaacgacttgttactttctcaaataaaaaacaaaaaaaagacaagataatttaataagttatgtatgataaataatgattgaatatcactttttattattgtataagtatcatatcaaacattttgtaatacgctttaaatgtaaataataataatataagtgaaaactcgatgaaaaatcttaccatagctagtttaggacaattggggtttgtgtggcagtcattgtgtggccaagactgttttccttggccgtcaagtgtaccagaaccagagatagaaagattgttgatgtacctaaagttgatccacgtgtcttgcttaatgtcgcttggatttgcaggagctaataaagttccatcgatgatgaattcaataggatttttgcatagacccacaaactctacaccaccgaggtaaaatgttccttttggtacataaattttactacttccacttatccttttgcaagcacggctccatatactcgtgaatgcctaatttcatatgcgttaagaatgacactggttaattactaaacaaaataaataaacaaatattagaaaaattgtatttatgtttcgtgtttgtatattggtgatcatatatgtttataggtgtgtgaataatattcaaatgtttttatcttaaaacttattggtggtaaaaataaaaataggaaaatatttgtttacatacattggcgttatcagtttttccgtctggtttagcaccatggcgttggacgttgaaaacttttggtctgacggtggagcgacttgcaacaacaatgaaaaagagacagaagcacaaagccttaaacgcaaaggaaatgcatgccatcttattattttgtttaaggtatatatatggaaatacgagaaacttgttgtttatcaatacttgttctgagagataatgagaattgttggcatacttaatctgcttatatagagttagcttgtctctatgaacggtaaaaagaaacttgattattgttactaagtaacaactaaaatagggttgtttttttggtaaggcttgtgaatgatatttaggtttttgagtgtatatggtttatttttttggttctctcctttaaaacagaatcttcaatttggtgaatgtgacaatcacatttaccaattaattgtttttttgttgttttaatttaagttgcataaaaccaaattgtttttctaatgcactattttttatttgttccaattttaacggatattaaattttactattttagttattttgttaactaatatttgttcaagatctaaaaacagtttagaaggaaattataacatgaaagatcattagcgattgtgggtgcttaaccaatatcacatctcgccttcaatagagggtgaccccgtcattaaccagatttagggttgggcaaaacaaccggatccgatacccaacctgatgcccgaaccgaaaaaattgggttaggacaggttagggttttaggtaattacctcattggataaaattttagtgaatccgtagataccgagtcggtccaaggattactcgttacctaaacaggctacccaaaaacccaaacataaatttaatatccaaaatattaattatatttaatcttaatataatctaattatctaagattataattataaatctaaatatgtaaattaattttagacctaaatatcccaaacaactaaactatttaaaaattatttgttatgtttgtcaaaatttagtaaaatatattcaaatatgattaactttattaaaaataacaaattttaatgggttttttttgtttgggtacccactatctacataaagtatacttgtttctatttattttggatatttttaggacctgaaactttttacccaagccaacccaaacccgattggatccgatccggatcagaactgaatatttagaattacccttattgggtaattagtgtgtgctaccacattatattacattgaactcactgcctttttaagtatttttttttccatgaaaacaataagacagtttgttcagttgttgttctgatcaccagaagaatcacaaatcagttcttttacttcaagaactcggttcatgttatatggaacagatgaagccaaattatatttaaacaaagactatttaagaaaaagaaaaaaaatgcattatacttatttctacttttttgtataaatataattttttttcacaaaaaacggttttccaaaaaatgctacacaaagcggagtatacaacaatgggattggatttcttagctctttatatccaattgttaatccatgtttatacactaataaattcagaaaatgcaatttattgtagaatattgatgtaaacttatcaaaaagcatatatatacatatttacgatatggtttggaatttttggctataaaaaaaaaacataagccatatatacacttaagcaattatttaataaataaaaataacatatacaaaatatcgtcattgttttgatggaccgtcgaattaatttagacaattcgaggaaacattttaccgcgagcaaaaccatcaacattctcgcacaccgaagtggaagaaccatctttgactccattctgttttatattaatgtcaattagctccacatttttgcatggaaagattttgctacattgcagattcactgctactttgttcttcgatgttccatatatgttctttaacttgaggttttggatttgaacgtgagactctccctggaaaaaagtaaaaacaagttgtctttagtttttttgtttttgtgataaaataaaataaaataaaatggagcttgttttcgcataggaggttaacctttctttcatgttcacaaggtgggtgaggacaatacttctgatcaatgttgattggttttccaacatcaatcatctgaatattctcgtacacgaagttcgaaacgaggatcttcgaagctgaagattcccaagttttgatccgaataccatcgcttgtaccgttgaaaatgacgtctcttactattaagtccttcacgtctttctcatctttgctttttcctaaacttccaacactaatcccatgtccaggaccacaattgacgttagagatattgaggttagtggttccagagagaattgcaatacaatcgtctcctgtaccgatgtttgtgtcagagatttgaatgttactacatgaacccatcttgataccgtcggtgttgggactatcgccgggagctgttatagtgacaccggtaatgttaaagtgatggacggagaagaagttgaaatgtcccattttgctattgagagatgttatgtctttgatatttgagttgttcacgaatgcaaatcccatagtctataaaacatttcaagtttattaaacgatttgttactttctcaaataaaaaacaataaagacaagataatttaataagttatgtatgataaataatgattgaatatcactttttattattgtataagtatcatatcaaacattttgtaatacgctttaaatgtaaataataataatataagtgaaaattcgatgaaaaatcttaccatagctagtttaggacaattggggtttgtgtggcagtcattgtgtggccaagactgttttccttggccgtcaagtgtaccagaaccagagatagaaagattgttgatgtacctaaagttgatccacgtgtcttgcttaatgtcgcttggatttgcaggagctaataaagttccatcgatgatgaattcaataggatttttgcatggacccacaaactctacaccaccgaggtaaaatgttccttttggtacatagattttactacttccacttatccttttgcaagcacggctccatatactcgtgaatgcctaatttcatatgcgttaagaatgacactggttaattactaaacaaaataaataaacaaatattagaaaaattgtatttatgtttcgtgtttgtatattggtgatcatatatgtttataggtgtgtgaataatattcaaatgtttttatcttaaaacttattggtggtaaaaataaaaataggaaaatatttgtttacatacattggcgttatcagtttttccgtctggtttagcaccatggcgttggacgttgaaaacttttggtctgacggtggagcgacttgcaacaacaatgaaaaagagacagaagcacaaagccttaaacgcaaaggaaatgcatgccatcttattattttgtttaaggtatatatatggaaatacgagaaacttgttgtttatcaatacttgttctgagagataatgagaattgttggcatacttagtctgcttatatagagttagcttgtctctatgaacggtaaaaaaaaacttgattattgttactaagtaacaactaaaatagggttgtttttttggtaaggcttgtgaatgatatttaggtttttgagtgtatatggtttatttttttggttctctcctttaaaacagaatcttcaatttggtgaatgtgacaatcacatttaccaattaattgtttttttgttgttttaatttaagttgcataaaaccaaattgtttttctaatgcactattttttatttgttccaattttaacggatattaaattttactattttagttattttgttaaataatatttgttcaaaatctaaaaacagtttagaaggaaattataacatgaaagatcattagcgattgtgggtgcttaaccaatatcacatctcgccttcaatagagggtgaccccgtcattacccagatttagggttggggaaaacaaccggatccgatacccaacccgatgctcgaaccaaaaaaattgggttaggacaggttagggttttaggtaattacctcattggataaaattttagtaaacccgtagttaccgagtcggtccaaggattacccgttacccaaacaggctacccaaaaacccaaacataaatttaatatccaaaatattaattatatttaatcttaatataatctaattatctaagattataattataaatctaaatttgtaaattaattttagacctaaatatcccaaacaactaaactatttcaaaattatttgttatgtttgtcaaaatttagtaaaatatattcaaatatgattaactttattaaaaataacaaattttaatggttttttttgtttgggtacccgctatctacaaagtatatactcgtttctatttattttggatatttttaggacctgaaactttttacccaagccaacccaaacccgattggatctgatccggaccagaaccgaatatttagaattaccattattgggtaattagtgtgtgctaccacattatattacattgaactcactgcctcttttagtatttttttttccttgaaaacaataagacagtttgttcagttgttgttctgatcaccggaggaaacacaaatcagttcttttacttcaagaactcggttcaagttatatggaacagatgaagccaaattatatttaaacaaagactatttaagaaaaagaaaaaaaatgcattatacttatttctactttttttgtattaatataatttgttttcacaaaaaacggttttccaaaaaatgcaacacaaagtagagtgtacaccaatgggattggatttcttagctctttatgtccaatttttaatgcatgtttatacactaataaattaagaaaatgcattttattgtagaatattgatgtaaacttatcaaaaagcatatatatacatatttacgatatggtttggaatttttggctataaaaaaaaaacataagccatatatacacttaagcaattatttaataaataaaaataacatatacaaaatatcgtcattgttttgatggaccgtcgaattaatttagacaatgtggaggaaacattttaccgcgagcaaaaccatcaacattctcgcacaccgaagtggaagaaccatctttgactccattctgttttatattaatgtcaattagctccacatttttgcatggaaagattttgctacattgcagattcactgctactttgttcttcgatgttccatatatgttctttaacttgaggttttggatttgaacgtgagactctccctggaaaaaagtaaaaacaagttgtctttagtttttttgtttttgtgataaaataaaataaaataaaatggagcttgttttcgcataggaggttaacctttctttcatgttcacaaggtgggtgaggacaatacttctgatcaatgttgattggttttccaacatcaatcatctgaatattctcgtacacgaagttcgaaacgaggatcttcgaagctgaagattcccaatttttgatccgaataccatcgcttgtaccgttgaaaatgacgtctcttactattaagtccttcacgtctttctcatctttgttttttcctaaacttccaacactaatcccatgtccaggaccacaattgacgttagagatattgaggttagtggttccagagagaattgcaatacaatcgtctcctgtaccgatgtttgtgtcagagatttgaatgttactacatgaacccatcttgataccgtcggtgttgggactatcgccgggagctgttatagtgacaccggtaatgttaaagtgatggacggagaagaagttaaaatgtcccattttgctattcagagatgttatgtctttgatatttgagttgttcacgaatgcaaatcccatagtctataaaacatttcaagtttattaaacgacttgttactttctcaaataaaaaacaaaaaaagacaagataatttaataagttatgtatgataaataatgattgaatatcactttttattattgtataagtatcatatcaaacattttgtaatacgctttaaatgtaaataataataatataagtgaaaactcgatgaaaaatcttaccatagctagtttaggacaattggggtttgtgtggcagtcattgtgtggccaagactgttttccttggccgtcaagtgtaccagaaccagagatagaaagattgttgatgtacctaaagttgatccacgtgtcttgcttaatgtcgcttggatttgcaggagctaataaagttccatcgatgatgaattcaataggatttttgcatggacctacaaactctacaccaccgaggtaaaatgttccttttggtacatagattttactacttccacttatccttttgcaagcacggctccatatactcgtgaatgcctaatttcatatgcgttaagaatgacactggttaattactaaacaaaataaataaacaaatatcagaaaaattgtatttatgtttcgtgtttgtatattggtgatcatatatgtttataggtgtgtgaataatattcaaatgtttttatcttaaaacttattggtggtaaaaataaaaataggaaaatatttgtttacatacattggcgttatcagtttttccgtctggtttagcaccatggcgttggacgttgaaaacttttggtctgacggtggagcgacttgcaacaacaatgaaaaagagacagaagcacaaagcattaaacgcaaaggaaatgcatgtcatcttattattttgtttaaggtatatatatggaaatacgagaaacttgttgtttatcaatacttgtcctgagagataatgagaattgttggcataattaatctgcttatatagagttagcttgtctctatgaacggtaaaaaaaaacttgattattgttactaattaacaactaaaatagggttgtttttttggtaaggcttgtgaatgatatttaggtttttgagtgtatatggtttatttttttggttctctcctttaaaacagaatcttcaatttggtgaataatcacatttaccaattaattgcttttttgttgttttaatttaagttgcataaaaccaaattgtttttctaatgcactattttttatttgttccaattttaacgaatattaaattttactattttagttattttgtgaactaatatttgttcaagatctaaaaacagtttagaaagaaattataacatgaaagatcattagcgattgtgggtgcttaaccaatatcacatctcgccttcaatagcgggtgaccccgtcattaaccagatttagggttgggcaaaacaaccggatccgatacccaaccctaagcccgaaccaaaaaaactgggttaggacaggttagggttttagaaaattacttggataaaattttagtaaacccgtggataccgagtcggttcagggattacctgtttcccaaacaggctatccaaaaacctacacataaatttaatatccaaaatattaattatatttaatcttaatataattaattatctaagattataattataaatctaaatatgtcaattaattttagacctaaatatcccaaacaactaaactatttaaaaattatttgttataattgtcaaaatttagtaaaatacattcaaatatgattaactttattaaaaattaacaaattttaatggttttttttgtttgggtacccgctatctacataaaaaatactcgtttctatttattttagatatttttaggacctgaaactttttacccaacccgacctgaacccgattggatccgatccggagcagaaccgaatatttagaattactcttattaggtagtatattcaatacccattaaattcaaacccaaacgggttttacccaaacccgaatggattacccacatgcccagccttacccaaatacttagtcgattctgcacactcttatcaatcagttttacttatttcttcttcaaattctctctttttataggaatattattaaaactgatatcttgtagaaataagtaaaactattttatcataaccaaaacattgtatcacaacaaaaccaattaaaaacattctgactgataaaaggttcaaagcctacaaacaaaaataaaaccactaattgagaaacacttaatctgacaaaacaaacactaagtacctggtcactagatcgaattcgagcagcaaacaagagctcgaagccccaatcttagaacccttttaaaacaataaatcacaaaagcaaagtgggttggtttatagactttggtttgattcgatttactagatttgatttgttttacacatttgagttggttcactttgataagattcgaattctagacatgtaccatttacaattcccgctagatttataccataaaccggatttttttcttttaaattcgtaattgattcacaattaattatataaatcttgatttttaaatataataactcatatgatcatatcacgatcgtatgtgttacaaactttgaaaatcaagttttatattgtcacgatcgtacatattactaactttaaaaataaactttatacaataaaatatgaaaatagctttagcaagaaatgtgcttaaaatatctagattggcttcaatcggaccgataaaatcaacaatatgatagaccgtgaagatccattaaatgtgggaatcaattaaaagttaaaagataacctataataagaactaaaattaaaaagaagttaccaattgaaaaatagagtataattctactttttcgacatcacttttctcattagatattaatgtttgcaaaaagaaactatacttaaaaatataaaatctaatcacaaaaaaaataaaactactaaaatctaagataagataaagatatgaaattcatatttatattaattatttttaaaaaatactcagaaaatagtgcggaattttcaaccttgtaataaaataatagttttataaaattaagtaattaattaatttgtattactttatgtttgattcatctagattggattttgtttctcatatcttttttttttttggtttgtgtttaagaatccacaatatattaaaaaaattaagatttaatttaaagttttaacaaattttaatttagtttagtatataattttattaatattattgtgttattattaagatattcacatgaatttcttaaactgatgatggagatagagatgctctaacactaaccgttactatgtaagctgacataattaacatccgtttcaaagttttcaaacccaccggttcttgctcttgctccagaaccggaataaacccaaaaatgtacaaaagcaacacatctatttctctaaaccatcaccggtttataaaaaaaccttcttttttttttttgtctataaaaaaaccttcttaaagagacaaaacacacatttcgtctttcattatttctatttttgttttgtcggacaaaaaataaaatgaagagcaacacaaacactaatctgattctcttccaccaccactctccactaacttcaaaatcaccctccgccgtcgccgccgcgaatcaccaccgtttcttattcatcttcttcctctctttcttcactctcctcttctctttctctctcttctcctcctcaatccactccaccacatcctctcactctctctcctcatctccctcctcctcctctcttccaccaccagtcctcgccgcacttctccactacacttcctcatcaccaccaaacacatctatgtcctttcttgaactctccaccatctccaacatcattcactctcatggcccagcttgtaacctcttaatctttggactaactcacgaatctcttctctggagatctatcaacttccaaggccgtactgttttcgttgatgagagtccttactctgtttctaaattcgaacagagtaaccctggagttgaagcttacgaggttgtttactcaactaaagtctctcaagctaagaagcttcttggttattacaagacccgacccgagtgtagacccgttcagaatcttttgttctctgattgtaaattgggtattaacgatttgcctaattttgtttatgagattgattgggatgtgattttgattgatgggcctcgtgggtatgcttctgattctccgggaaggatggctccgatctttacttctgcggttttagcaaaaagtaaagattttgggacgaagacgaagaagactgatgttcttgtacatgagtttgggagaaagattgagagagtgtacagtgaggagtttctatgtgaagagaatttgattgaagtggtcggagatttagggcattttgttgtggcggcggcggaggaaagagagagttatggtgatgggttttgtcggaattcgacgagattgtcggagagttttacggcggtgagtggtggcgatgaagaaaaagttggtgttgatgatgagtgaaaagtgggtttggttttttacttttggtggctcttttgtaattaaatttagcttttgaggtcttctttttttttgtttttgtttagtcttttacttcatttggtttttgaatttaggagaacggttacacttgaaagttaatatgtaactaaattccaaaaaaaaacaaatgttactctattgatgaaaaaagcatcaaaaaacttgtgatgaaatttatggccgtattaaattgggtaagtaattgagaatgtagtagaccaacttttggatttatatatgtctggatttgtaaatttttgaaaatattacctccctagtttaattaccattaaatgttagtttcaactaagggttggcattccggtttcggatcggatattttaaatttttagatttagaggtatagaacccgttcgagtaattcttgatttcgggttcggattgggtttggattatacgaagttctcaataatcaaatattatacccaaatcgatccagactactcgaaaatacacaagatatttaaaacgttgaacactttttacccaaatttatttaaaaaatgtattaaatatctaaaaatattttattgatatgttcggatatcggtttggatcggattcgggttctggttttcgtgttttgaagtatagaatccgtttgtatattttaaaatttcaggttcgaattccgatcaggtttttcggatcggattcggatcgggtgcttgggttcggatattatgtggaacctctcaacttccttttttacctttcctattaaccaattctaaacccaaaaccttcaaatctcggtttggtttggttcaagaaaacgattttgtttttaataccatgcctaatatttactatctactttcattcctgagatttttggcagtacaaaataacatttgttttggctatgtaattacatttttttggggacaaaattcttacttttatattggaataatttgttttaaaatggtctaaaaatgtgtcggtggtgacagaagtccctgggaaagcgggacttatctcgcaatgtggcttccccttttccagctctatcacatacatttagcacttccaattttgtttaactttaatttctagaaacactaaaaaacatatttatttggttcgtcccatacacagttactagtgacaactaatcatgtttcgatttataaatacgatgtctgagtagagttgagttccatttatgttttccggtgatatgaacaaaattgaatgccactcgttggtggtggatccatatatatactattattattggaacacaatttgaagcattgttatacaaacgacctaaaaactactatgaagttgagttaaagagccaaaaagtaaagaataaatatcaataaacaaattggaaaactgccacacaaataggtcttttgcaaagaaaaaattagaagagatttttgtttatagtattactcagtattaaagaaagcgggttagacggccgtttaggcgtcccgtaggtaataggcgcctttgtaccgtttcgacctttttgaaatcggttttgtcaagtaaatttgatggattatacggatattaagcggatcagatgttcatttggtggatttaggcggggtaggcgcatctaaatatatttaatattttaaaattttttaaaaaatatatttaaaattgtgtttaaagatacctatatttttattattttattttactttagtttaaaatgttaaatttaaatgtagtttcaaaactttgataatttttagttttttacaacaaattttcatcattttgtgtagtaaaatataattatgtattgttttattctaaaaccgcttaaaatcgcctaaattttgactaaacgttttagacactaaacggagagtcattacctatttagcggctagcgctttctcgaacaactataaaaatttcgggaccgatagatgttcgtgaggctagtagttcgcttctgttaaccgttacccttctttagtatactttttttcttctttttctctagtatactatatattttttaattactcacggtgcaatcgacgacaaacaccttatataataaaaaagtatatcaaaattaaatattttatgtgtgttaaagttatgattcataacttatgaacaaggtgatatcaaaatggccttttatcaaggaagtgctacggagacctctaactaaagtaacgtataagttttgagtattattattgagggcatggaaacgcgtgcagataagaacccaagaaccttcttcaagaatatactgttggatccgatgtctccgacgaggctcgtggctcaagaacggagctcaagtcttaaaggttagtctaggtgccactagctttctttatcacgtgctgcacgtgaatagtttgcatatgtaacgaagtaacgaaccaaagagagaggagctgagaaagtgagtgagagagataggtgtcggtgacagtgatagtgggggttcattttttatgccctgtgctcttgaatgtagtagatgataattcgtctacgtaagatatgtattatgggccttctatggcctactaggtttctttcaagttgtaatgatttgtttcttgggtatgacacgagttgaacgatttagcggtacatacatatgaggaacaaacctataagctataatccctatgataagtgcttaaccatgattgaaccatggtcaaagagaaaagaagaattgataagtgcgttccttagatttaggagatcaagctccacgtctccatattcccactttgttaattgtgttccttgtttctaggattagttatcgttcccctttgctttcctttgtgtacttaaaagacttccaagtcacgaggaggaattagacttgaaatttgacaaaacagagtttatctctttggtgaaaatttatttttaaattatcatgctatcaccctaatatacacgatatattatcttcttctttaagaacataacaaccaaaagggaatactatagagaatttgggcctcacaaatatttaagtgaaagaaaaaatgtagtttcgtaaagatagagtgtttcagttttgcgatgccaaattaccctattttgttgagaggcgtgtagcaaactgttccattgcagagtcatcattgagattttgaaaacttctcgacattggtgtcgttaacgcgacatttttttctcatgctcctctcttttgcaattttgaacttgagaaaaagctatataataagatgtcgatgaattataaatagagacttatgttacgagattgacacattcacttcttgacataaaagagagtaaacacacaaacacgagaagtataggtaaaagatgttgcaaatgcattacataaaagatattgcaacaaaaatatatacacccattccacaattttatttttgttgatatctgcactttgatcggggcttttataatagagataagttggaaagtagacactttttctacaaataatttgcaaaataggtagtttttttaaacatatgagaaatagacacttttctctttcctctctaatacaactttttgcctaatagagattttagtaaatgacttatataaccttttgttattttgttatgtagtaagataaagataaaactcaaatcaaatcttactttttatttttactttatttgatgatatttcttcataaaaatttaccacataatcatattagttcttaaaaattttatgtgaatctaaaaagtctaattttgctatatttcaaaaatatgtagcattttttatttaatctcagtcgacggtgtacgtgatattgttaaaattggtgtactaatggtagtatacaacaataacgtaaaaattaatatataattactgatgtagaaaatgatacactgaatataacagtatacaaaatgatgtacatagatgatgaaaatatggtgtatataatcttacacctttaaaaatctatgagacagtgtactaacattggtgtacgagatgatgtacaccactaattgaaataatgatttatacattctctataagtgtacaccaagttttgtacactttgtctaccaatcttgtatgttatcatttaaaagttgtatatatcattctatccaccaatcgtcataataatttcaatcattttgtacaccattaagagtaacttaattatgtacaccatcatgtacaccattatattgaataataatatttggtttatacaatcattatgtttgtaaaatattaaaaacaatattacttatattaataagtataagagaagtcggtgatgatttatgaaatatcggtgtacacacttgtacaccaacgaataatggttagtgtacaaaacgatgttttaaatgtttgtgcattataatgatgatagataaatactctaaaagtcaatgtaatttttttttaaaaagaatatatattttttaatatttaagaaaactaaaataaaaaaaaataaaaagataaagacaaacaaaataaagtaaaaatggtttctcatataatttttatttactctcaagataaagggtattttagtatttgatatgtattttgtcttttagtctattagacaaattctctatctcacaaaaaacaaaaaaagtgtctatctctctaattttaaaaaaaattacctactttacaaattatttttgaaaaagtgtctactttgccaataaaccctttataatattgggtacattttgggccataaatttttaaagagcacattatgattaggcttatgaggttaggcagtttttggcaaatgaaaagacgatattgcccctaaattttcactccatcttctccgacgaactcaacatctttatcaccatacaattccaataaacccaataaaatcagttaaaagctttttgatgggagaaagctaaaccctaaggggaaactatatagggaacccaaagattctaatcttatataattagaatcaattaaaaatttcaattgtttcttattcctcttttaaaataaagcgagagatgatggaattatgattcagatccagcaattcaaattcaaagaagctatggagaattaccaccttcatcgtcgaggaagaagattggccaatcatagtccatagatctgaactttgtaaggcgatggagaagtaatggacatcaatggcgagtttagaggcagtagattctatgccgagagagagagagagagagagagagagagagagagagagagagagagagagagagagagagagagagagagaggtactacaaggagatgaaactcaattaaattgaagggtaaaacaatcatcatataacgtagaagtacctaaatttgtaagtacagtgagatgttcctatatccataaaggcgtacactttaatgtaccgatctcgtaattaatcccacttttctctaagaaactatggaagggaataactcgttgcaagtgatgagtttaatgtgatagttggaacatcttaattgcattgttacccttctttatattttaaatcccgaaaaaatattggtaatggttttttaaaaaaattgtgcgggtttatttaatcaaagcatttgaaacggattgtgttaaaatgataatttttttgttattaaatcataaaatttaaaaaattcttctaaagtctagtgttatagaaagaatgattttggaaagactttagatggtttaatttagtagattttcttagtgacatacaaagatctaaatctcattgtttcatgtggactagaaggagatttcacaccatcacgaaacttttctcaatttgcccaaaattatctaaaagcttctttataactcaagtcatttaaaaaatacatgattaaatggttaagaaggccaaagagtgacaagaacctcaagtcggaaagtcgcagatcaatccttcttctggactggcaggaaggtttgatcttcttctctttccggagtatgatatcaaatgtaaactgatgcatcctggagaatgatatcaaagcagcaagtttaggttggactagtgccgtgcttagactagtcttggtctaggacatgtttttaaaaattggctatatggtaatatttcaaaaataatactcaaaattcgaaacaaaatattagtaacaaaaactaagaccatgtacataggtgatacatttagagtatcaagagccataaataagtttttaataaatcagacaagacatttaggcctaataccgtatcagtgtaatgattcttttgatacccagtatcgggtgatgtggaggctcatgattcgtctgtgaaactggttttttctggaaaaaaaaaattctattattctctccgatagtctttctattgttttagctaactagttatattttctgcgagtgagtaattttgcaggctcttcgtgattatgcgatataattttgcagtaattttataatcctaagtttttatatatttattttttgattttccaaataatttatttttttaatgataccaatatcggtctcaccattggaaacaaatttattaccagtatcataaaaaatctcaaacaataaataaatattaaaattaatactaaaaaattgttaatgatactcatagagtatcaactatgtgcatgcttaatgtaaaagaaaatcaaaataagttttttctttgttttcatatgtttttctaataatattatctgtttttaatatttgttttttttacttattatatattactaaagaatatgttttcaagataagaaaatctcttctagataatgaaaaacgcatttttaattaaaaaaatatttatatcaaactaactaaatagtgggttattgttgatataggtactttttctgaaaaatatttgaaaatggatactttcacgttgtttgtaaaaaaggaacttttatatacgcaaattgactgttttgcccttatgtttgacttcttctccttgcttcttcttcttcatcgttttacttcttctctttattttttccagaaacttcaaatcttttaatcatgttgatggtttccattaaacaagctctcatagaagaaatgtataccataagaagatagtatctatggaacccaagggctccaatcttgagctccgataaaattgaattgaagagtgagcggggagaattgttgtttacacggaggtcgtgtaagaaagagacggcgacaaaattcaccggctctccaatgaatttgagctgattacggagagaaagccaatccaagaaacgaatgcatattaatcggagacgtgtatctctcctattgcgtttgatttaaaattattaatgggatatgttgtagacgatgctgcaatagtggaacaagaaaaaagaaacaaaatgaaatttttttttacaaagttgtaaaaaatgaaactgtaaaacgacattaggtaaaagtacctcaatttgtgaatactgtgaaatttttctatctccacaaaagcacaaactttaatgtgccgatcccataattgatccaactaaatagatatacttactttcttacgaaaatgtggtggcctataattttaaaaaataaaattgtggctggacctatttgaccactggactttcgactcaccactcagcaatgcgtgaaaatgtggcatcccctctcatggcgtaaggactagcgatacgagcggtcatcactgccactttggaagcagaattgagagatttactgattgaatctgattgttaataattagtccaagtaatcaatgccggaattctcttatctaagatccatgacatcatttcggacctatgaattagctcgaaaacttttgagtttttgtctcttgtttcattccaagggaagctactcaccataacttattgtgtgatcgaagttcaagaacttaagagctttaaattgggtatccactatgcaaaagtctttcattccatttcagttaatggtacgaattttaagattaaactacatacttgttccattttaatcatacttgttcaatgtattgaatttaatccttgcgtttattttcgttacgagcgagtctaacaactaacaacaaccaaacttaacaagattcaggaacagagggatcagaggtccagaacaaatagaagactgccacttcacatgttatcaaacaagacagtgccactacggttaatatcagtctgctccagaagaaactcaaaacctgaaacaaacaggtataacaaagagctcgaattaatcacttgagttcatcctccacgcatatgggcaccgagttcaccaaactgatcatccgcttctacggtgtcatctgagagacggactgcatcaagcttctgcttcagaagatcaatggcatttagtaccagttgggaagccttcactgcacctgtggactcaacagtgaatataaaactgtcatctttcggactgatctcaatgagtcccggtttccccattgcttcagctttcttgatcacttcttcatcgtaagtgtatgcttcaggatcaaccactacaacctaagaagcaaagtataaaaattacagttgtgatgattcaagcaacagacttcaaaagaaatggcatactaaattccaacgataaactactgtaactgttataatgatatacaatgttctctagcgggtcaaaggaaaattgtcagttgtggtgagtcctagtaaacactgaaccattaacatgaaatctccaagaaaattcaactggtacagaggtactacaagtactatatcttctcctttctttattccctttaccattcgaataatttgaaatctctaacatgaaatcacaaacaaaagttcaactggcacagagatactccaagtgattcatataatttgcagtgattagatatagaaagatgtttcagtttggtaccagaagtttagcagttatttgattcattccgatgactggcgtaattctcctaaagagctaagtagtgctatctaacagaaagagaagcacagaaaagagcaaatgcactaaccacatcacatatatatatttcaaggcatggcagtctataaagtagttcaatcatatttaagtctcaaagctataaacttgtatagctgcattcttccaaaacgtgaaaactaacctgtctggtgactggatccatgccaaacactttggtaggactgctctcaatcaagtcgatcttttcctcgtctgacaaagtatccatcatatcttcattaataattatgtcaggctcatacataaacgtaacagtagctgcaggagaccatttcgcatgatctttcccaatccctttcctcgctatcgctctaagcttcaactcttgtccccgacgcagtttcacaatgataattcccctgaaacccgaaaccaaaaacagagtctttaacccacacaaccaccataattaaacatcaaacaatcacgaacaagaagagtcatgcaaagggccatcgaaaggaagtatttttcatcctcggaatgctaaaagatgcaaattttgtttcaccattgcttaatctctaacgtttcacaactccaatcgattcataatgacaaaagaaacaccacatttctgcatttaacaatctaatgatgaaaagggacttacttgtgctcgcttgaatcagatacagacgagtcaatagtgaaatccacaggagtaacagtaggatcagcactgtacaaatccctactagtaacatctagggtttgatcagtaacacacttagaactaagccgaaactcaacagagcaaaactcgcattgtccatctccatcacaagcatcacaatctcgagagaaacgcatgctcatagcacgttcgctagtgagaggaatgagacctaatcgatgagcaatgaactcgtcgttgagtacagatgaattaacctcgatttcgactagatctattgcgacggtagggacttcggagatcattacgcgacggagagcgttggccatagaaacgtcggtttcacgaagctcgaacttggcgtaatcatctttaagctcacggatcttgatctttgggaatctttggtatgtggcaccgtccatttcaaaagctaatcggtggtttctgacgactctctggacctttattagggttttagggataatgaattttcaatttcttcgccggagaaggagataggagaagaaatcagaataaagcaaaagtgagaaagatataaatattagagtaatgtttaaagttgggcctatatgggcctttttaattcttttggcgaaaagtaatgtcaccaaatttcaaacaggcccatataagcccaactcaaatgtttttttttataccttttcctttttcttttttctttttttttttgtcaaacgtatacctctttatttaagttcttttttcatagattcttttatcgtactcaacaactctacgagatctcatagtatttagtgatattatagtcatatatttgggaggaaaacaccatgtatcaaaaaatttgaaatgatctcatagtaccattaaccattacaacccaactaattttactcatcaaaccaattgactcatcaactcatttgacccatcaactcatttgagtcaaaattttgaactcattagagttcatgggttgagttgaattgagttgacccataaattttgacccattttgacacccataatcaaaatgttaacaagtttagttaagtttctttaacaatattaaggacaagatgttaacaaatattttaacatgtgagtgttaaaggatttcatcattctttaatcaacaagcactgcctaatgcattatttagatcatcacaaggaccatcgttataaactcttacaatgcttatccctttgattactctaaagaaaatggagaaatgtgtaatttgtcaaacatccaatggtaagaatacattagacaccatttatacatttatctaaaccaaaaatactcaattttattttaagctactagacaagaacatccaaagtttattattatctctcacaaatgattaatttactctttgtctacgaaaatagaatgcaaaaattcccattttataaaagaagaaaatggttcggccaaaacaatacgacaaaaataaaataaaaaaaattgggtaatgtttgtacaattaaacaagttatatcatttttcctacttccaagaaaatgagagtgcaactaataatatgtgtctgattaattttcttcatatgtatagtgaaatctatataaaattatatatatatacaaaaaaaaattcatagtttacaaagaaagcaataaaaacaatgtaagtgtttatttattattttaaaaattgggtattgtttaggctatggttaaagggttaagaatacaaattaggagtatttgagtatttggttagttaaaaactcttttagttttgaaggagatcatcgagatactgtggcgaatttgggaaatcgaggcattgtatttagaaattttagaacatcaagatttagggaatgcaagatctatggaatttgtaacacttaggcaagatttaaaaatctaagaatgtagcagatctggattctagggagatctaggagaaggtttgtgatagaactgatgcttggaaaattctaattgaagaagacattgtagcaaaactaagatagttatttatatatctacaaatctaatatattttgatgctatatttgccagatgtcgcacatgtacttaaagcatcaacccaaagttggcttaatgctgctgagtggacaacgctttatgacaacaaccatttactgttccttgaaacaagctctttcactatacttattaaggaagacggactctatacagttgacaacaacttcatgcaggacaggaatacctggagagtaataagtacccactccacttgcagaaatccaaacgttgtctacgatgttaagattggaagaggactctacagattttatgatgattgggattgtaacaactgtttatatatatatatatatatatatgaatatattttttgtggaagctcccttgttccaatggttgaccaatggtttattagtgcttctacaccaagaggtctggggttcgaatcccagctactgcgatttattagcaaatttacagattaatggaggcaagtgtgcaggagatctccaacgatgtacgattataaccgttcgccaggattctacgcagagaagatattgaacatgtccatcaagcgtatggagaaagagaagaaggtgtcatatgtcgtgaatttaataaggatcggaaggaaactatatttatatataataaaattatatgtctgttttttataaatatagaaattaaaaaaatattttaaacattttaattggaagttactaactaaaccagaaataaattgataaatagaataaggacaaggaaattatacaattatttaactaatcctataagatttttttttgtaaatactcacatctatatatataaaaaattatctatattttctcatcaagaaaactaactttttcataaatactccaccgttgacttaaaataagtatgaaaatagccaaatagccatgggtaaaaaataaattaatctcaaacaaaagataaacatacaacaacgtattgtaatttatataaaaaagagtaaaataagtactaattacacgaaatccaaaaaaaaaaagtcaatattggaatattaacaacttaagagaaatatccaacgagaatcatggggaaaagcaatgtcatttaataaaatagcatgtcatactaaaaaatataggagtaacgtgtgattgttatgcaagtggcgatggtggttgttgatggttacgaaagtggtaatagaaaaacggatttaatgactcttgattgatcatctttatatttttgggggatatgcaaaagtaccatttttgtactacccttttgcaataatacatttttcttttatctatttttaaaaataccccttctcttaagtaaaatgaccaaatgaccctcatctaatgagaactctttaatagttttctatgtaacaaatttttccggctaaaaaaaatgcatttaaaatcattgtaaatattttaagaactctttaaaaaaccttgtaaagttgttaaaaacccttataaatcatttaaaaacctcttaaaatctttataagtctttaaatacatatataaatactttaaaacccgttttaaaacctttgtaaattattttaaaacttcttacaatgattttaaaagatttacaaaagtttttaaagagttttaaaagaatttacaaggattttaaaaaaccttgtaaatctttttaaacccttgtaaatcatttaaaaatattttataaaccctttaataaattttgaaccattttaaaacttttgtgaaccgcttacaaaaggttttaaaaagatttaaaagagtttttaatgggttttaaaacccttgtaaatcttttaaaaatcttttaaaaacccttgtaaatcctttaaaacccttataaaccatttaaaaatattttaaaaatccttgtaaacctttaataatttttgaatcattttaaagctcttgttaacctttacaaaaggttttaaaaagatttacaagagtttttaaaaggttttaaagaaaaattctttctaatacccttttcacagtaccccttttcaattctacccttttctatttaccattttcaattatactctattaaaatttttaataaccattttacccctatttgtaaattgatttaggttaacaaaatgaaatattaatattttcgcctaaaatattccaaaataaaatttcccgccaaaattttcgcgtcaaaaattttcgaaaaagaaatttcccaccaaatttttttttcaaaaacatttttcccgccaaatttttcccgccaaataaaattttcgaaaacatttttcccgtaaaattttttttttggcgagaaatagatttacaagagattttaaaatggttttaaaatattttaaaatatttacaagagattttaaaagggttttaaatatttacaagagattttaaaagggttttaaaagatttacaagggattttaaagggctttaacagacttacaagagtttttaaaagatttttaaagggtttaaaagtgttttaaaatatttacaagagatttttaaagagttttaaaagatgtacaagagtttttaaaagattttaaaagaaattattagaaaaccctttaaaaactattttaaatacgtaccattctttttctaagagttaaaaaatgattgtatagactttataagagttttacaaaggtttaaaatccttgtaaatccttttaaaacttcttaaaaactcttgtaaatcatgttttacccttttataagcttttaaaatccttgtaaatcattctataccacttacttatcttttataagcgattgtaaaccatgcaaaccttttttaaaatcccttgtaaatcattatttgacacctatttatactttgaaaacgattgtaaatcatgttaaccccttttaaaatccattgtaaatcattcaatgccacttacttgtgcttttaaacgattgtaaaccatacaaacacttttaaaatcccttgtaaatcattctatgccacttacttatgctttaaaagcgattgtaaatcatgttttacccttttataagcttttaaaatcccttgtaaatcattccaataccacttacttatacttaaaaaaaacattgtaaaccatgctaaccctttttaaaaatccttgtaaatcattctatgtcacttacttatgctttaaaaacgattgtaaatcatgttttacccttttataagcttttaaaatctcttgtaaatcattcaatgccacttgcttatgctaaaaaacgattgtaaaccatgctaactgtttgtaccgaggttgtaacaataattattaaggggtttggggagaacggagtagcttctttattaatgacgaacggaaaagacggtaatttaacagaacggagaaccgtaagtacagaacggagaaccgaaagtacaaatcggaaaaccagaaaatacaaaacgggaaagcaagagataacagagctaggcaactattctctcttaaattctctaggtaataactcctgctcccttttcccaatagtgtcttctgctatttataggctaggagctgacctagggtctcccctgcggttttacgtttttaccctctcaagtttgtcgggctgggccgagcagctttcatctgagccgacttgatgttgttgggccgagcagctctcatttgggccgagccggacgatctgatgggccgttcttctgatgggccgttcttctgatgggcgttcttctgatgggccgttttgacttattcattttgtgcttgggccaaactgggcatgaagggcaaggcccgtatcccacaattagtccccccctaatccggtaaatgagagcttgctcgaagtcggcgggtttctgtttgaaactaggatcatgcccgttcggcgtgaacaacaggtagtgagttttttttgttgtcttgaatagattttttttggcgggagttgcgggtcgcgtttgcttaaccgagaagtcggaccgttgaggttgcattaattattttcgcttacgcgggaagtcgaatttttgtaatattatatgccatattcgtttgatattactgtatctcgatatctgctggatattagagcttccatattttcatactgttgcatcttaaaatctgctggatattggcatgtttccatatcccctaactgttgcaccttaaaatctgctggattttggcatgtttccatatccactgaatattgtgatgtttccttctctctatttatacacctttcttcttcatttttcttctagtttcttctcttcacaagaaaaggtaaatttcttcttctcccccttctctcttctttctctctctagctttatgctttaaaattggagtctccttcttgcaaaccctagccgtcggttttgttttaagaaaaggggagccgccaaatatggcggctgagcgaaccggcgagctcgaatttggattagaggaggtcgtcgtacccgagcgagctgaagaagcgcccactgttgggattagtccgattaatcgggaagcagttggagagctcggcgggcatatagctcggcacaatggttttggtgagggtgaagttgcgagaaccgagtttggtccaagttgcgagacggtcgaacggagtagaggcgagttcgacgtgcgttttctcgctggcgagctcgtcgatggtgacggagatgagcttgttggcgttgcgggagagaacggcatagtgggggaagagctcggcgtgtgttctaacggaggtgagctctctggtggcgacggagagattaacggagagagagaagagctcggtggagagagagaaggactcgtcggttgtgaaggagagatcggcgtaagaagagtggatgtagcggtgcggccaagcggtgaaacatcgcgcgagagaccaaatggtgacgttctcgagccgagcgtgcacgagacacgtagagagcgagataaatgtggtaacaacggtcaaggagagcttagcaaaatgggtgatccgcttcaaagagacgttcttggagctagtagggtggcgagcgcaccaagccctgctcgatttggtaaggggaagaaccttgatgccatacttaatgcggagtttggtgggtttgacccgatggatgatcgcgactttggaggttttaatgatttcggagaggaagtctcatatgtctacgactgcgagaatgtcgatgaagattacattagcgatcccgagggagagcttggtgagaatggtggattgggccgtcttatgatggagaacgggtttgataatttggttgtcagtggtcgtgacacgggtgctcggggtgcagttggtacaaggcctgttagcaggattgaggagcgacgcaccggtgactgttctgctgtcagaggtaggcagattgttttaggtcttcgtgcttcttatttcgagagggtcgtagctccgttagatcatggttcttcgctatgtgatgatcaatcattagcggacatgcttatcctctgtaatgcgccgagagaaatagagctcctcaaaccggattcgctacaacgcccttggactccaccagaaggatacatatgtttgtatgaggcgtactttacacgttgtgggcttctgtttcctcttccaaattttctgacggagtattgtgctagacggaatatcgcgatatctcagcttactgttggtgcgattcgcaatgctatcggactagcaatattgggagctgaatgcggtatcgagattgacactgatttttttgaggaggcgactactttctctagagtaaaagagagcccgggctcgtactatgctagtgctaaggccaagcataagattgtttctggtgctgtcagtaaaattcacggttggaagcgtcgttacttttttgtgaagttgagcgagttctcggtcgagaatcttgatacggtctttgttgatgattggaccatgtctcctggtagactttgttttgttgtgactttgcgggttagttttctccatcgttctaacttgtttttgtttcttttgcagaaccggtttttcgagttcgcgatttccctcccgggtttctcgataatattgcgagaatcagagagttgggtgctttgcattggccgaccggttcgtttccagagactcgccaaactcgtaagttttttttttgagttttttttttttttttttacgccatttccttagcttctcttctctttcttgtatgtttgccaaccaccaacggaattgccttttgtgatattggtttttgggtttgttttcaggtcctagaatgggaaagattattccgcaacttcctcgttttgtcgacgagtttggggagaatcccgatttgatgaacggcgtagagccctctccagttgttacagaagcgcgtttggacgttgagaatagaggtgacgagagtcttggtcggggttctgcgactgagagcgcgacgggggacgtcgtggtagatcgctcggagaagcgcccagtggctgaggacaaggggacagatggggacgtcgttcatcgctctgctctcccgtcgctcggaggatcaacgccctcgaagaagaggacttcccgtgatgatgcggaaaagggatctttcaaggttcctaaaaccccaagacgtgaaactacggttcgtggagcggtagaccatggcttctcttatcagtacaaggctaaggatatcgcgtttacgcaaaacgcgacttcttgtgctgatcttgtttccaggattcgtggtgcgagtgacgatttttcttcggttgatcgtttcgtggagagagagctctttaaggattgggctcaaaagacttgtcaggtttgttaatcacttcaatgtttcttgttgatgattcctcttttatgtttcttcgcttttctgtgacttttgtttgatgacgggttgtttggtatttcagtcgattggagcgggaaaccggctttcctcattccttgggtgtaaagccaaggtttccgctacccgtttggcgactgaatcggccgaatgtgaggctttgcagaaacttgcgaaggagctggccgttgagagagagcggtctgcgactctcgagaagcggtctagcgagcttttcgagcaggtttcctcgcttcagtcttccgtcgatgaaacgcgaatgcagttggaagcgttggacaagaggtttgcatcggagggtgctaggttgaggaagtcacggatcgagcatgttgccgcggagaggaagaagagtgataggtacctcgcccgaattgataggaagaggaggcatatcattgatactaatgccgcatcggacttctcttctcactcttagccaagttacagggactcttcagtgtctcgagaaattggttaagaaaaaggtggctattcccccggcgacaatccgtgagcttgaggtgcgagagcgaactttggacaatggagttcgtcagctggaggtcgccgacttgcttccgggcgatctcgatccgtttgaagaggtggaagccggagctgttggtgcgcgactcggagttgactcctgccgaccactgatttgttccgatgcttggtcgttgtttccctttgctatgtttctttttatcggttttctaggctagatccacatttgtgttttcgtggctagttggactttgatgcgtatgtttggcccgtcgttgggtctttgctttgttatggatattcttgcggttttatgttatttatagactcttttattgacgaaaattatgattatttgctttgtattattgcgtgagctttaagtgtgagctcggcatgtgttacgcctgcgaagtcgggtttgacttgtataatgtgttttacgatttttaagatcggtttataggaggcgtgaaaacggtaatgacgagctctgccgattttttgaagttcttggcgcaaggttatccttggtttacatttgacaaggttgtccttggcgtttaagcttggtttcaaaacatattatggggcaaggcgtcccttgacttatcctgtatatgtttggctcgaaacgcaaggcttacgtatgaagtatgcgagactggctcgtcgtactttgtaggtgcggcgctggtgtccggcatatcctgaaattgcttccaggtaggcaaaaacgtgcgagcggactcggcttactaatgttccgccgcctatcagcttattgggtgcgaatctgggtcggcggttaatctttaagtgtaagtttttgcttacttaagtaaagatatggattatttcgactggaacgggtttcttaggcccaaccgacgagcaccattgcatccatgagggaacgcgtttaaatgtttagatcgtgcaactagccaggaagacgatgtgggagaaaagtaagtatataaaagaactttttatattatttttttttatatagctgtgcctttgtgagaggttgcctacgtaccatttggaagggatcaagccgatcgtagttcgttttacaaagggttagctcggcaggcgagcgattttttttttgttttcttttgtgtcttttggttttagtagtagtaacgtttcagatttgccgagttccatgaacggggaatcggtgtgccatccatggtgagaagttcgtagacacctggtttcacgactttggatataaggtacggaccttcccaatgagctcctaacttgccagcgtcctgttcgaccgtgttttcgaaaactttacggaggaccaagtcgccttctgcaaatagtcgattctttactttcttgttgtagaacttggcagctgcttgttggtagttttggatacgaagaagtgcttgatcacgctgttcttcaagggtgtcgaggttgtcaaggagcatctggtcgtttagagtgggatcgttgattaacatagaacgacgaactgtggggaggcccgcttcacacggtgctaatgcttccattccgtatgttagagagaacggagttcggtcggttgatcggcgcggtgtcgttcggtacgaccaaagtaccccgtcgagctcgtcggcccaagctcctttcttttcatcaagccttttctttagtccatcgagaattgttttgttagtcgcttcggcttggccgttgcattgcggatatcgtggagttgatttgctgagacgaattttccattttgcgcaaaagccttcgaattggagtgatgtgaactgggtgccgttgtcggtaacaatttcgtatggaagtccatgatgacaaatgatgttcttccaaacaaagttttgcacttccttggattggatgcgagcgtacgattcggcctcgaaccatttggtgaagtagtccgtcatcacgagaatatattttttttggcgagaagcagggaatggtctgattatatccattgcccaccgcataaaaggataaggtggcatggcggtttggaggacttctgatggaatgtggataaacggagcgtgaccctggcacttttcgcaacgagctacgaatttttcacagtctgcattcatggttggccagtactgtccatgtttgcgaatctttaaagccaaagcgcggccgcccgaatggttacctccggctccttcgtggatttctctcatgacctgttgtgcttcctcgtcgtcgagacaagacaagaggactccagttgcactccaccgtaaaagatgttcgtggggaagcgtatactgagcgcttcgagcgcggagacgtcgtgctgcccatttgtccttggggacaattctatcggctatataggagcggatttcttctatccaattggttgaagcaggagaatcagagtcggctgatcggttggagtcgtctgatcggtcacaaccgctagactgaccgggatcgcttgaacagactaagttgccagaagggccggcatcttccgagcggtcggttgctggtggtaagataaccatgacgatgctgagttgttctgcagttaagtcgatgacagtatattcagatggtttggtgatcgtgccttgtatctttatgctaggaacatcgatgcattctaccgggatcacacgtcgcaagtcgggatcagatgtagaggcgagaacggctaaggcatctgcaggcgcgttatcgctgcgaggaatcttggtgagctcaaaaacttcaaaattgtaagagagttctcgtacaaccttaaggtaagcatccattcgttcgtttttcgcctcatagtttccactgaactggctggcgacaagttgagagtcgcagtaagcttgaattttctttacctcgattccatgggctaggcgcagaccagcgataagagcctcgtattctgcctcgttattcgatgctgggaaccctaagcagaacgattgctctagtatttcacctgtcggagattccaagcggacaccaattcctgagccgtgtcgagatgaagcatcgtcgacgtgcaagatccacttttcgacaggggatactcctgcgataaggtctggtgggagctcgatgagacttggcgcatgttcggttcttgtaggcaatatcatattcgctcaattctacggcccatttagcgagtcggccggattggcttggactgtgaagaattgttcggagcggctggttcgtaaggacttcgactgtgtatgatttaaaatatggccgcagttttcgagcagagataacgactgcaaatgctagcttttccagggtaggatagcgtagctcggcaccgtcaagtgttttgctcacgtagaaaatgggatgttgttctccacgatcttctcgtacaaggactccgcttacggccgaggtagacaccgcaatatagagatatagtgtttccccttcctcgcatttttcgtcccattcaaaccgtttgttggctcggagtaactgatagaaaggcaaacacttgtcagttgatcgagagataaatcgatttaaggcggcaatgcgtccgataagccgttgtacttcccgagtgtttcttggagatgggaggtcgattatcgccgatatttgcttagggttagcctcgatcccgcggcgagtgactaggtaaccaaggaattctccggaggttactccaaacgtacatttggacggattcaacttcatgttataacgattcaggacttggaaacactgtctaaggtgagtgatgtgttcttcagctcgcaacgacttgacgagcatgtcgtcaatgtagacttccatcgagtgatcgagctggtcggtgaacatttgattcactagtcttgggtaagtagcacccgcattcttaagtccaaatggcatcaccttgtagcagtatgtcccttggtccgtgataaacacagttttttctcggtcattttggtgcatcagaatttgattgtaaccggagaaagcgtccataaaagacagcagctcgttaccagccgtagcttccacaagtcggtcgatatgcgggagaggaaaactatctttcgggcaagccttatttagatctgtaaaatcgatgcatactcgccatttcccgttctttttcttaacgactacagggtttctcagccagtcagggtatctcacttcaacgatggaaccggcatcgagcaatttctttacttcctcgttcacatcttttgtgcgatcgggaccgagctttcgtcttttttgtttcaatggtttatatgtcgggtcgacattaagttcgtggcaagtaacggctgagtcgattcccggcatatcttcaacggaccatgcgaaagtagctgcattctggcggaggaaattaacaagctcattttggagttctgacggcaagtcaatcctgatgccaacgcagcgagacgggtcgctttcatcgatgttaacttggacgaccgttcctttttgagggtttgggcgttcatcttgagttgggactagcggcgcggtcccgctctgtaattgctatagtggtcgagcgtttcgtaactgtcgttcgatcatgaaacatgttcgtgcgacgagcggatcgcctcgcaatgtataggttccccggagcgtcggaaacttaacgcattgatggtaacttgacgcaacggccttcatcttgtgcaaccatggcgtaccgagtatgacattatagatgattggtttgtcaacaacggcaaattcaaaccaggagaccgttccaccaacgtagattggcaaggtgatcgtgccgacggtcattattgtgtctccgtcgaagcctgttagcggttggactttgtcctggaacgatcgaacatcgatttccagttggagaaggacatctttgaaaatcacgtttacagagaactagcgggtcgttttgagaattttcgtgacaatactttctccgatctttaattcgacaactagcgggtcgttgtgacttccaggaagagcgatatcggcctcagaaaatgtgatgggttcgttgcattcaacggcagaggtgtttttctcgatccatgcacgttgcttctcgccttggcggcgatagcttttgattgaccgaactgaatcgcggcatgccgtgaggccgcccataatcatatttctccgacgcttagaggccggctcgtcctcgaattgtcgtggtgcatcgtgatttcgtttatggggttctgctcgccggtcatcatcgtgaatgcgttctgctcgtcgatcagtttcgtcttgtcggcgtttatcgtcttgattatctcggtcggtattctcgactcgacgatgcgtgttgtctctgtcgtttgtgcccgtacgacgtcgatcgggctctatgtcgagatcgccttttttaaacttcgtcaggaggagagtttgtaattgtcgacactcgtcagttgagtgtcctggaattttatgaaactcatagtatttttggtctcctttggcatcggccgatcgattccacttattccatggtttatcagatcgcggtgccgtgtccccaacgtagtatgacgttcccttttttagtttctcttccttagcgtagtcagcgtcgtagtgctgtcgagactcatgatgcccctccttcggtttttcctttgcgattggtgctttcgccgagccctgtcgatgaaacggtttgcacaatgtagtgcatctgctagagtcgctggttggttaagcagaagatcttctcaaaatcgtgacccgtgccagagcgcattccgcagagccgcaattgcagcatcgtcaggggtggctacgctagtgacgatttctttgaatcttccgatgaaacttcggagtgattccttagcggtttgggccattgtccacaggtcgacattagaagcacctttctccatgaaaactccgtagtttttcagaaaactagtggtgagtgcgtggacgctgtcgattgaattggcttcaagtcgagagaaccaagtaagagcggcaccacttagatgtttcacgaagagttgacaacttccagcatctcggtcctcatcggagaagtgtgcacggccgatcgctatgcttacagacgtcaagaatggccttgggtcaacgagtccttcgtaatttgccaacttaattttgctgatgtggcgaatgcgaacgtcggagatgcacgaagtgaaaggagagcgttgcgtctcttccaatactttatctacttctggggtcgagctgacggcgcgatgcatcttggatgacgtatctttcaatgtggttcgtagttgctggagttcccgatcacgcgcaccggtatcatcgtcttctgttcggcgtgctcgagtgtcgacgttcggtcggttgtcacggttcggcgcattttcacgagtgtgctcgtcgatggacccaacgacgatggaggcaggcctgttgcgtcggtttgccgatctttccatgactggagttcgctggggcgggattgtttcgtcatcgctgagctgtcgacttgcgcgagctgcggaggactggagttgctcgatctgattctgcgaggcctcctgggcggcaactatcgcgttgatgcgttcggaagttcttgcgtcctgtaagtcgagtcggtcgaggaaagatcggatgacttcgtcgagattggttcctcgtggagttatctctcctaggtcggcaggagctgcgacaggagctgcggctggaggtgcgacaggaactgcggctggaggtgcgacaggaactgcggctagaggtggcatcgtcgggcgagctggtgggggcgtcgtctgccgagctggtggtccggcaagaggcgcgctggttccgactccttgctcgttcgaggtttccgtcatctcgtcgtggctctccgggattactggcaacatcgtatctgtttgtcaatatcagaagaaactctgtctggccccacggtgggcgccaattgtttgtacagaggttgtaacaataattattaaggggtttggggagaacggagtagcttctttattaatgacgaacggaaaagacggtaatttaacagaacggagaatcgtaagtacagaacggagaaccgaaagtacaaatcgaaaaaccagaaaatacaaaacggaaaacgggaaagcaagagataacagagctaggcaactattctctcttaaattctctaggtaataactcctggtcccttttcccaatagtgtcttctgctatttataggctaggagctgacctagggtctcccctgcggttttacgtttttaccctctcaagtttgtcgggctgggccgagcagctttcatctgggccgacttgatgttgttgggccgagcagctctcatttgggccgagccggacgatctgatgggaaatttttttttagcaggaaaaataaattttggcaccaaaaaaatagcgggaaactttcagtttccaattacatgtttttattagatgagggtaatttagtcattctgttcaaagcaagggatatttttaaaaatgaaaaatataaaagggtattgttggaaaagggtagtaaaaaaagggtagttttgcaaatctccctcttttaaaacccttttaaacccttaaaaaatcttttaaaatccttgtaaatattttaaaaccctttaaaaaactgttaaaatcccttgtaaatctatttcccgtcaaaaaaattgtgagaaaaatgttttggtggaaactttttttggcgggaaaattttggcggaaaatttagtttcagaatattttaggcaggaaaaaatcaatattttattttgttaacttaaaacattttccaaataggagtaaaaaggcataaatgaaaatgacaaataagaaagggtataattgaaaataggtaatgttgaaagggtattcttaccaattattctatgtttttaatgtgtctaatttaaaaccattttggaatcgttcaccaattctatgatgaatatttttaattttagtattcatatctataccaaaagttattgatacgtaatatatttttcattcaaataatttgagttattgatatatgatatatttttcattcaaataattgaagtggtgaaggaaacaatgcaacagtgaaatttatatatatatatatatatatatatattttttttacttttgaaaacttacaacgttgtcaattattatttttgttaaatttgaatttagttataagaaaataaacccgtccatcggaccagtctttatctatatatatgtaaaagtaaagaatgaacaacatatcattactcaccataaacttattttgtgactgacgttcatgaacttgaaagagctttaataaaccctcaagaggtatgcaatttaaaattggatatccactatgcaaaggtcttccatattgaagttcatgctattcatgtgttgcttatcttggaaagtttatgaatttttatgttacttaattcaaataaagatgttattaggtatcagtaggggtgtcaaaatgggtcaaaattcatgggtcaaactcaactcaactcaatccatggaccctaatgagttgaaatttttgactcaaatgagttgatgggtcaaatgagttgatgagtcaattggtttgatgagtaaaatgagttgagttgtaatggttaatggtttcaatggtttacccaattaacccatcaagttttgtaaaattgaattaaaccaactaaaatctctaaaccaatgtcaatttaagtctaaccaacacatctaaatcaatttaataaaattaatagttttccaaatttcttaaatatacaagggatgaaattgaaaaaaaagtaaactcgtaatttttccaccaaaaaacataaacccgtgattttcccgccaaaaacgtaaaactgtgattttcccgccaaaaacgtaaacccgtgattttcctgccaaaaacgtaaacccaagattttcccgccaaaaacgtaaatccataatttttccgccaaaaacgtaaacccgtaattttcccgccaaaaaaaagtaaatccgagattttcccgccaaaaacgtaaatctataattttcccgccaaaaacgtaaacccgtaatttttccaccaaaaacgtaaacctgtgattttcctgccaaaaacgtaaacccgagattttctcgccaaaaacgtaaacccgtaattttcccgccaaaaacgtaaacccgtaattttcccgccaaaaacgtaaacccgtgattttccctccaaaaacgtaaatccaagattttcccgccaaaaacgtaaacccgtaaaaagtggaatccgtaaatatcataagtttgatgataatgaattaataataattattatttattattgttttataataataatgttggtctggtatgagaagttatgggaaagagtatattacagcatttttaattcgtgaatttcatacctggagcaacttgacctattgactcatttactctcaggtgcacttaaataatttacggcgagcgccttagcctattactattactcaaaaatgtggtcgagaaatgtaagataaggattccggaagcattggaaattaagtaggaggaagacatagagtagccattacagttgagtgtttaacacgtaaataaattaatttaattattacttaaatgtgttaacccatttaacaactcaactcatcaaattaaatgagttatagtttgatccaatctatttaacaaaatgagttgggtcaacctataactcatttaactttaaactcatttgattatgagttgagttgagttgggttacccattttgacactcctaggtatcagcattaagaagaaacaaatatttttcatccactcacattttttttttaagtatacatatatatatctaacatgtggatatatattatttttttagataaattaatagaaaaatattaacttggttttgttagagtatctcactaatataatattaaacttttcaatattagtttaatattttgtttttaccttaattaatatcaattaaaatcttttttcctatattaactaacccattcttaacaatgacaacaaaaaaaacgccaattacgagagagttcaacgactaaaaataacccaacataacaaggttcaggaacacaaggatcagtcagaggtcgggaacaaagacaagactgccactttacatgttgctatcaaacaaggcagtgccgctacggttaatatattagtctggtctagaagaaacttaaaccctgatcaaacaggtaaaaaaagagctacgatttcatccttcacgcatatgggcaccgagttcaccaaactgatcatcggcttctacagtgttatctgagagacggattgcatcaagcttctgcttcaggatatcaatggcatttagtaccagctgagaagccttcaatgcacctgtggactcaacagtgaatacaaaactatcatgtttcggatggatctcaatgagtcccggtttccccattgcttcagctttcttgatcacttcttcatcgtaagtgtatgcttcaggatcaaccaccacaacctaagaagcaaagtattataattacagttgtgatgattcaaacaatagactgcaaaagaaatgagctaaacgcactaaacacttaaagaaaattcatacaccacatcacatacatatatttcaaagcatggtagcctataaagtagtacaatcatattgaagtctcaaagctataaacttgtatagatgttattcttacagaacatcgaaattaacctgtccggtgactgggtcaatgccaaacactttggtaggactgctctcaatcaagtcaattttttcctcatctgtcaaagtgttcatcatctcttcattgataataatgtcaggctcatacatatacgtaacagtagctgcaggagaccatttcgcatgatctttcccaattcctttcctagctaatgctttaagcttcaactcttgtcccctgcgtagtttcgcaatgataattcccctgaaaccaaaacaataacagtctaagaaactgcagaaaaaaaagccacagaactaccaaaaggaagactcatgcaaagggcatctaaagatgtcaaattttgtttagcattgtgtaatatctaagcttagcaattccaatcaattcataaagaacaaataatcactacaatgatgaaaagggacttacttgtgctcgcttgaatcagaagtagatgagttactagtgaaatcaacaggagtaacagtaggatcagcactgtagagatccctactagtaacatctagggtttggtcagtaacacacttagcactaaggggaaactcaacagagcagaactcgcaatgttcatctccattacaatcttcacaatcttgacagaaccgcatgctcatagcacgctcgctagtgagagggatgagactaagtcgttgagcaatgaactcgtcgttgagaacagaggaattaacctcgattttgacgagatggattgccatggtggggacttcggagatcattacgcgacggagagcgttggccattgaaacgtcggtttcacgaagctcgaacttggcgtagtcatctttaagctcacggatcttcaccgttgggaatctttggtaggtgacaccgtccatttcaaaagctgttccttctgacgactctgggactcttagggtaatgacttttcgatttcttcgccggagaagaagaagaaatttggagagagcaaagtgagtgagagtggaaaaaggtataagaagaactatagtagtttaagttgggcctatatgggcctattcttttgtttactgggcattttcaggcttctcataacagttattgggaatggtcaaaatgtctacaatggattttctgtttacatcaattcaaataatgacccaatgttattttaagactttttaatctttataatttgaattacataataataattttggaaatacaaatattaaaaagaatcgaaattccatatttttaacagtaacttggattaaaaacattatataaagagtaaaaaggattaaaaatgcattggttcataaagaataatggtaaatttgttgttttaatctttatatagtgtttttccaaaattattctttctaattacaattaaaatttttttacataattaattttaatggtaattatgtgaatggtttcggacaatgtacaagttgtactcatcattattccgcttattttcataattattccgcttattttcattgacacaattaaatcttgacctaaatctaaaagattacatataatatattttatccaacagaaaatataaattatttttaaaaatagaattttagtgggttttggggctttaagtgcactgatcatgtctggtccaaaattctaatattgctttccttttttatttttattttgccaagaaaccaattccgggtttaacttccttgtaaaaccatccttttcatatatatgatatttgcagtttagccaaaaaaaaaaagttgaattttaatcaacatttttaagcacgacggtttcaactagtagtaccatatcgcgggttataccattaccggaatttattagagattttcaaaatttacctgattgaaaattagcggattgtagtgttggagccaaactggattagtgactgagtcatcgggtttaccgggccaaccgcggttccgctcgaatctgaatacatttccctcgtcaaaataaaaaaagtcagaggacgattggtcgatgagaaaaacatttaataaaggaaaaaaaaatgaaaaaacaaatggggcctttggagcgatgtgatgacgtggcaacccccggagactttcaaatagcatattgagagttttacatgcatgtgaatatcaagggtaacatctagagtcatatgaattgcgcgtgttatgtcgttgttagtcgttcatgttaacaataatctacgtataccgtttgtgacttttaaaactaagttcatgaacctattacatatagatcaaaatctggaccataattttattggtgtattgttagaaacttaaagttcatatcactttctctatgtttcgtggcctacttgcaattttttaggaatcttttgaccattagttttttaaacgagtttaggactttgatcactaaggtaaatcgtttaaacaatttgggatcacttaattattgacatgattgtatgttttgattgggcatgtcaaacagatctcaatatttatgtaattacaaattattgcatatttcaatacatcaatgtcatggtcttcacaacgtgcctgacaaatcctagttgtttggattccaaattgttaataattcacaagagctctcccataggaagtttcttcgataattctgaatattatataatacaaaatcacaatttggagtttaaagacttttcttctattaaacaaaatagagtcacgtttggagttcgttgatagtcacaacttaacaatgacacattagaatattcaaagttttatcttattgatcagtgattgacattaaaagttgtaatcaagttatataagcgttgtaaactctttttgaatcatcttcacaaactaaaagtcaacatgtatcatatatttcagatctccggcgaagttatcaagggtttgggattgaagacgaaaattctgataaccatcgtctttagtaccttactaattttgtctgttatgttactttcattctcaaacaacttcaacaataaactttttgctgctacaatcaacggtaagaaagaaaaaaataagcatccatgttttgtcattcattgttagctcaaagaattctccttttgacctttttttttgttatatgttcagacgaatccgaaacaccggggcgggatagactaataggagggcttttaaccgcagatttcgatgaaggttcttgcttgagtaggtatcataaaactttcttgtatcgcaagccttcaccatacaagccgtctgaatatcttgtctcgaagcttagaagctatgagatgcttcacaaacgttgcggtccagggacaaaagcttacaaggaagcaacaaagcatcttagtcatgatgagaattataatgcaagcaaatcagatggtgaatgccgatacgttgtgtggctcgctgattacgggcttggaaaccgactactcactcttgcttctgtgttcctctacgctctcttgactgatagaatcattcttgttgacaaccgcaaggatattggtgatctcttatgcgagccatttccaggtacttcatggttgcttcctctcgactttccattgatgaaatatgctgatggataccacaagggatactctcgttgttacggaacaatgttggaaaatcattccatcaactcgacttcattcccgccacatctatatatgcataaccttcatgattcaagggatagtgataagatgttcttctgccaaaaggatcaaagtttgattgacaaagtcccttggttgatatttagagccaatgtttactttgttccatctttatggtttaatccaactttccaaaccgaactaacgaagctgtttccgcagaaagaaaccgtgtttcaccacttgggtcggtatctttttcaccctaaaaatcaagtttgggatatcgtcactaagtactaccatgatcacttatccaaagcagatgagagactcgggattcaaattcgggtttttcgcgatcaaggtggatactaccaacacgtcatggaccaggtcatatcctgcacacaaagagagaaacttttgcctgaattggctacacaagaagaatcaaaagtcaacatatcgaacattccaaaaagtaaagctgttcttgtcacttctttgtctcctgagtactctaagaaactagagaacatgttttcagagcgagcaaatatgacgggagagattattaaagtatatcagccaagtggagaaaggtatcaacaaacagacaagaaggttcacgaccaaaaggcgcttgctgagatgtatcttttgagcttaaccgataacattgttgcaagctcaaggtcaacatttggatatgttgcttatagtcttggaggattaaagccatggttactttatctgccaaatgataacaaagctcctgatccgccgtgtgttcgatccacgtcgatggagccttgtttccttactcctccgactcatggatgtgaacctgacgcatggggaactgaatcggggaaagttgttccttttgttaggtattgtgaggatatatgggggcttaagctttttgatgagttatagatattgtttatcacatttgatttgatttgattgttgaattattgaaacataggataaatgttatatatcttcctttttcattttattctatttaatcattagtattaatatgttactgcatagaaagatttagttgtctaaaacgtttgcgaggttttgtttggttataatattttataaatatcatttcacatttaacttatatcatttcaaaatataaatcagttggtctaaaatcataaaaaggttactagattatacaatatgcaaaatcaaatggaaatattgaaggagaggttgatgttctagccgttaggattggagggtttagatgcactcaatcaggatatggaaaaacttaaggggacgagttagtgaataagacaagccgtttgtgaagtggccaagtgtgaacacaaatgcaagtggagatcaccctttttgttctgtggcttcttcttctttggattaattgggtcatgggaacaagcttatttggacccattttgaggcctccttagtcatctcctaaaccagctcgaacctgggatggattccttggatcattcctcataaaataggtgattttttgatgaatattcatgcccatctcaaatcaacgagtagtttggccattgggtagtttcacaggttcgtggtacggtttgggtagactcattcgaccatctcttgatttagcccgacagtggacaattgtctttcgatcaaaagtcttaaaatatgttgtgtgctgatgtattctcaagcccacatcatttgtacatgaaaaattggtgttgcgtggtgttggtgagctttctcggttatgatcacgtctggattggagttgctggtctagtacggttgggaatgtaactacatgggtaggtagtcttctggtagatagattgaattcaagaagtaacaaatcatggaaattcgtttctccttttccattaacgtgttacccaaggaagaatgcttctctttggctatacgcctataccatcatgtgttgatccatttctgttcaatctggttttgtatgatatacacaccaattcagaacgtaacaagttttgtaaagaaaaaggaatagtaaacataggcatacacgccacatcatagactggtgttgcggagaggttaaacaaaataattataaaaagacaagaaatatcttgagtgagaatggacttggtcaaagggttgaggcggaagcatattctgtagcaatgtgcttaatgaacatgtcaccttcattaacaatcaaattcatcgaaaataattgggctttttttttttcaagtatgcaccctattttagagattcttttttttttccagatatttaacttaaaacatttattttttacagaatatattaaatttttatatgtgagatttaatttggattacttattctcaagtatatcttaagaatttaattcaacttcatatcaattgataatttggtatatttgaaaagtaagggacgagaagatatttaagaatgtgaatattttttgtttgtactttgtacatatatatctttctcgagtgaatgttaaactttaaataattataagaggctggaacatctattaatgattgatttgttggcaaaatcatgactcatttagaaaaaaaactacacataaacaatgaagattctttttaaaaaaggatatgatatatagtagaaacatgtataaattaatattcgataaacctctttaaattaatcaattattttggttctgtgttgggactagtgtaaaaattgatacatatcgataaattaataagataatatttttttaaaatcatatgtaaacatattgtctcattaatatcataaattaacaattctataaacttatcaatatatatatatatatatatatatatatatatattaaaatatatatattttagtgaaacattactccagtattatttgtttttcttaaatttatattaatttttggtagagttcaattctaatatttatactacaatctacaaaagtttgtgttgttttctaaacttaacaattgcttttgtacttgtaatttgatattgattataaagaaaaaatcgctttagagatataatgttttcaagaaattacaaaattagtaaaatctataaattaataatttatcgatacattaatacaaatttttggtcccgatattattaatttatagaagtttactgtatatttgacgttagtatgctttgtgtgacataaaaactcagtattatgtgatcctcacaaactaattcttgttcaatcttttccggtcattctgtactcttctttgaagtctgtagtaaactttccgatcatttaccgacttaccgtaagtaggttgttaaatttaatgaaatttgatcttcaaccaaaagaaaaaaagaaaagaaaaaaaaatcagtatgatgctttacatgcatgtacgtatcacatatgaagtcgtatgaattgattatgttatgttactcctaattcgtgtgtttatcttttgtgacttcgaaattacgttcatgtacagatttaatgaacccggaccattgttttattggtgtattgtttttttttttttttttatcaaacttctcttatattgaaaaaactaggtctccgtacaagaggaaaagagggcagcttttgcaagagcatcagcttgccgattattttctttaggaatgaaattgaaagaacaacaagtgaaagtagaggatagagcaaggatgtcgtgtagaatcccgtgaagttcctttgattggagcttcgaattaagggctttgactagggttaacgagtctgaaacgaaagagatgtgagtaagggccaatccaattgcaactcttatggcgataagagttgccaaagcttcggccattaacggtgagccaacatgagctacagctaaggagcctttgctaaaggtgcgttcattgttatccatgaagatccaacctaaacccgcatgtgcatcagttttccaggaggcatcggtgaggcaaataaaagggtttatcaggaggagaggtttaaaaggcaatttcctgagagctctccctgaaacaagaagcgactgagcctgctgtcattctttcgctcggatgatggccagaccaagagcatccacaacagggatacttttcttgttgaaaatcaattgatttcgagacgtccatatagtccagaagatccagggagcgagaggaccaaggccaatgccgataggaggtaagcagatcaacttaatagctgcaattaaaccttcagtgactgactaaaaaatactcggattgaaggaatccttaaagggggcttttctccagatctgggaggcaaaagagcactcaaagaaaagatggatttcagtttctcttaggccgcagtgggggcactttaatgaatcaactatctggcgctgtgcaaggctttctcccacctggagagcattttgagccatcttccagagcaaaagcttggttttaggtgaggacttaacagaacagatattagctttccagtcaaacggcgtctgattagaagaaactgcagagcttgattctgaaacagggggtaccaagggagtgttagtttcagcaagagcatggaagtaacctgatttggttgtgcaaactccatccattataggcaaccaaccccaaatatccggtgctcctgttttgataggcttgagtcgaagtatgtcactctcatagatgggaagcagccttttgatgagactagtattccattcaagagaacccggaaaaagaagatcagaaacaagccagttttgagtatcttcagtaggaggtcccattggagcctgaggtgagattagtgatagctagggggaacgccagataggtgtagagaggccagagccaatgagacgtccctggttaggtttaagcaagtccctgccaagacaaatgctgcgccatccatgggatgctgagtttggaacctaacaatccgtaaagctggagaagttgcagtactttccaaggagcactttggctagcaggcatgtgggattaaggggaagtctccaactgatttttgctaataaagcagtattaaaggtttgtatatccatgaaccctaatcctccctctttaaaagattttgtcattttgctccatgctacccaacacatattcttcttctcagcttttgtatcccaccaaaatcttgtaagcgcagattggattctcttacacagattatttgggatcttgaaacaggacatggtatatgaaggcatagcagaaaggacggatttgagcatggtgagctttccagcagtagagctttccagcagtagaaaggaacctagtagaccaactgagagttcgttgcttaatacgatccacaatcgagctgaagaggtctttctttttcctgccaaagagcttaggtaatcctagatatttgccttgtcctccttctttaaaaatattaagctctctctgaactcttagtctagtatcagaatcagttttggaagaaaaggtaatagaggacttctctttgtttatttgctgaccagatgcaagctcatattgatgcaggatctgcttcagtttaggacagcttttgggatcagagcggcagaaaaacatggtgtcatcagcaaataaaagatggttaactcggggactttgtttggatactcgtaatccaaccaaacttccatgagagagagccacattgcataacccggagagaacctcactgcagatgataaagagatagggtgagagagggtctccctgcctaatgcctctttcaggtaaaactaaccccttagcttgaccattaaagagaaaggaataggataccgtgcaaacacattgcatgatccaagatatccattgagtatgaaaacccattctagataaggctgtctctataaagttccactcaagtctgtcataggctttgctcatgtcagttttaacagccatgaagcatcttttctgtgctccagaggtcttaagatagtgaagagcttcgtgagtaatcaaaacattatcagatatagctcgttgaggtacaaaagcagattgggtttctgaaatacagttatgtagaactggttgaagtctcttagctagcagcttggatattatcttataatagactgagcataatgcaataggtctgcagtcaaaaactttttgggggcttgtgatctttggtatgagtttaacatgggtatggttgatcttctgtggcaggacctattaatgaagaaagcttggacttcagaaatgactttatcacaaactgtatcccaattcgactgaaagaaacttgcagtgaagccattaggacccggggccttatccggatgaatagagaaacaagcaagcttaatttcggcaggagagggtaacatgataagcttttcattcattgctgttgttatacaaggtttaagggctgcatttacagtggtaatcctgtcaccaggcacataggtaaaaatttgttggtaataatcagagatagcagagactatctcatcttcctcataaactggtaagcccgctgatgattcaataactgctatattgttgatggctcttctattttttgtagcagcgtgaaagaaaccagagttcttatcccctagagccagccagagattacgacttctctgcttccaaaaagccttttctctttggtaagcactcaggagccttgtgtttatggagtcaatttcctcttgaggtgagctgttgctggatatttcatcctcaagttgttcacgaagcgtgaaaatctcaacctggctgttaagatgatgttgtttactccacaatatgatggaagaacgacaagcaaaaattctgtgatcaacagttgcagacaggtttgagttccatgaatccaagactaatttcttgacctcatcattatccttcagcctcctatcatatctaaagatacattttcttttcttagttttcgggtcaaaggatgtgacaaggggacgatgatccgatccttcaaagtgaagatattcactgcgacccgacgggtaagccatgatccagtcactgtttgccataagccatgcgtgtgtcttttgcccctccaggatagaaatttgcccgtgtgatttagatcatagaggtcacaagaagacatcagagatctcaggtcagagaaagagccttccggtcgagggggggccaccaaccttcttagaactgtgtatgatatcattaaagtccccagtaagaatccaagcagaagagttgaaggcaggcagatcctggatttgattccagattcaactctcttagtcctgtcgggttcaccatagagaaaagttgagtaaaagcactgacccttgactttaatctttgtgtctatgaaatgttgacaggaagagataatttcaacttccacattgtgcttcaaaaacagggcaagaccaccagatcctggggaggatggtggaaccaagtggtgagaggagtaatcaaggccatgaaggagttgtaagacattttcagagttgttttttgtttccataagaaagaacagatcaggaaaaaccgatttacggatttccatgattctctggactgtcatggggttccccaacccacaacagttccagctcaccattcttaaggaagaggggttggcagattctgaaaatctaccttctttttcctggatacaggaatcagatcaatttttggagtagtagaggaggaagctcctagggtgcctcctgcagagaggttagtgttcttggcctgagatttagaacttgatgaaccagggatagtttgaggcctagggggaataataggagatcccgtctttttcctagatttggagttagaagtcttactcggagaaccctgggtaaaatttctcttatgagactttgtgcctagaagtttaatggcaggtttgttggcttgtcttggtagaggaggacgacctctacctcttttagttgggcagcaggaacacactctaggtttgagcttgtagccaaagaccctgggggaatttcagtactctcataagctagaagatctgagccagaagcggctgagaggataccaagagctgttgtatccatcaggtttctggtttccccttgaaaaaccctgattttccttgctgcattttctactggatcaggacaagagaggtattggactgttaaatccctcaactcactcatgacttggtcttttgtaggtggaggggaagaaacttccatcccaagacttctgggatcactgccttttaaggttggaggagtaagaggatcagaggaggcaacatctctctcaagaggggggcgacaagccttggacccacttgatgacgtagcatggagtcctgctgatgaattagatttctctcgccattggagttgctgaggtggaaaaggagcaaaccctccatcctgatggtaagacttagaggaatcctgagaatgatgtctgcgttgattatctccatatctatggaagttttctctattaaaaaatcttctctgaggggagtatctgagagtagaaggagacttggatcgaaccccatcctgattcaatcttctttttgcagagtttactgcctggtgagggatagcacttctctcagagcgctgagaggaactcctgggggcgatgaagttgtcctgaggaatgtagtagttccttgagcttgattttgaggcatggagggaagcagattgtacaggagaggggttcctttgtgtttcagacttctttgcaacaccagggcagtgcttttcctcatgggtaaggcggtggcaatgtcgacaatgatttttaaggttcttgtagtctagataaaccacagcttctcttccatcggggaagtcaacaatcgtctctttggtgataggttgtaacccatctagcagaacctttattttgactgtcgatgaggtaatctcctggtccatgactgtaccaagctcttcacctatggacttaagcatttcaggcttccagtagtgcttgggaagaccttggagttcgatccaaaaaggaatcaggcaagggaaagatggtgagataactggttcccatttttgcaagataaccatccattggtcaaaatgatatggcctattatcaagaacttgttgaaggtcctccgagaaatcaaacttgagttgaaaaactccctgtcctaggtctgaaccagtggctttacccctgagagtccatctgttagacaagaataagaagagagcccacagtcgttgtccagagggattggtgagacggccaatgagggttagggcattttcttcaatgagatctgaggtatcaaggtcaggaccgcggattcgcttacggggtggaggggagtaccctctttcaattccttttcctttctggttatacgggatacggtttgtcatgatgatgagtgaaaggaggcacttgcaggttgggttaaagcttcgcaggaaagtaacacagctgaggtagggtttaaaagtttgaaacggttgagagagcttaaatatccttctacctccaataaatgggagattagacggtaaaacaaccttggtaaagaagtttctgagactttaatgcagattgcgcaagagagaaaggagttcggagaagaactttgatgaacattgatgaacattcatatggagaaagcgttataccgttggatcttacctgccacttaagcccagtggataaaagagggattgcactgttcagatctgggtattagttggttccatggtgcctcgggtaatgggcctaggtaataggcgtgggagagatttttctgctactctcaattttgttttttcaaaaaaaaaaaaaaaactaacttatactctagtttactcgctctctctctccataaagccttccctttattatttttattggtgtattgtgtagagcctctagttcagatgcaattttgtgattgtttcaagaccgattttcaatcgttttggaatactttttaagcgtttgttaatcgagtttaggacttttactatggtaaatcggtttagcacaatacacatgactttatgttattcattcttcattcgtatatggataaaaaatcagcgatgctaaacagatctcaatatgtatgtgaacttgtgaagtagcaaattgttgcttattccactatattaagtcaagtttccacaatgtgccagacaatccctagttgtttagattccaagatttcgacaatgtaacacccgttaataattcacaacagctctcttattggcaatatattcgataattattaaatacataaatacaaaatcacattttggaatttaagacattttacaattaaaaaaaaagtggaatcacgttcaaaggtcgttgatagtcacaacttaacaatgacgcattaaagtattcaaaagtctatttaactgatctatgattgacacatagaaatgaagctatataaaagttgtactctctttttgaaccatctcacaatcaaactcaagtcaacatgtatcaaaaatttcagatctccggcaaaattgttaagactttggggctaaagatgaaagttctgatagcagtctcctttggttccttactatttatactatcatactcaaacaactttaacaacaaacttcttgatgctacaaccaaaggtaagaaaattatccatatcttgtgttttattgttaagtcaatgaatcctcattttggttttatgttttcattttgttgtagtagacataaaggaaaccgaaaaaccggtggataaacttataggagggcttttaactgcggattttgatgaaggttcttgcttgagtaggtatcataaatatttcttgtaccgcaagccatccccgtacaagccttctgaatatctagtctctaagctcagaagctatgagatgcttcacaaacgttgtggtccagatacagaatattacaaagaagcaatagagaaacttagtcgtgatgatgcaagcgaatcaaatggtgaatgcagatacattgtatgggtggcaggttacgggcttggaaacagattacttactcttgcttctgttttcctctacgctctcttgaccgagagaatcattcttgtcgacaaccgcaaggatgttagtgatctcttatgcgagccatttccaggtacttcatggttgcttccgcttgactttccaatgctgaattatacttatgcttggggctacaataaggaatatcctcgttgttacggaacaatgtctgaaaaacattccatcaactcgacttcaatcccgccgcatctatacatgcataaccttcatgattcaagggatagtgataagctgtttgtatgccaaaaggatcaaagtttgattgacaaagtcccatggttgattgttcaagccaatgtttactttgttccatcgttatggtttaatccaactttccaaaccgaactagttaagctgttcccgcagaaagaaaccgtctttcaccacttggctcggtatctttttcaccctacaaatgaagtttgggatatggtcactgactactaccacgctcatttgtcgaaagccgacgagagactcgggattcaaataagggttttcggcaaacctgatggacgtttcaaacatgtcattgaccaggtcatatcatgtacacaaagagagaaactgttacctgaatttgctacaccagaggaatcaaaagtcaatatatcaaaaaccccgaaactcaaatctgttcttgtcgcatctctctatccagagttctctggcaacttaactaacatgttttcaaagcgaccaagttcaacaggagaaattgttgaagtttatcaaccaagtggagagagagttcagcaaacagacaagaaaagtcacgaccaaaaggcgcttgctgagatgtatcttttgagcttaaccgataacattgtcacgagcgcaaggtctacatttggatatgtttcatatagtcttggaggattaaagccatggttactttatcagccaacaaatttcaccactcctaatccgccatgtgttcgatctaagtcgatggagccatgttacctaactcctccgtctcatggatgtgaagctgactggggaactaactcggggaagattcttccttttgttaggcattgtgaggatcttatatatggggggcttaagctatatgatgaattttagttctattttatcacatttgattttattggattattgagtttttataatctaaggaaaaaatgctatccgatccctctttacagtttacacttgtgtcctcttcttatgtattaatatgttagttttcttaaaacgtttactaggtttgtatggtttataatattaaataaaatgaaatttacatatatacttgtatcacttaaaatcattaagactctaatttaatttatatcattgtgatgttttctcgaggttactttatgtgtcatgaagataatggagtattggagttgtgaggtatcatgcgtcgtcgttgttctactctagtccacctttaaagaatataaaaagagatatttaatcaatgttatgcgttacaacattttattatcgaaaaaacgttttgagtataaaagaaaaaatagagaaattttagtgatttccgagatataatattcacctgcaaaagagagtgctgattttacacaaatattgagagcctgatttagattatatgcaagatttaaagatagcctatgaagaatatatggcacaactaaaaaaaatattgcaaatatgttatgaaaacatctaatgtaaatgctaattttaatttgtactagataaagtctcacgcgttgcatgagcttaaattaatttaatatgtaatgcaaaactctgtaaccttttttttttttttttgcacctagctaggtatgtaactaattatatatcaaactaactgaactaaatatttataatatttaaaactttttaaagtttgaatccttaaaaaaaaaaataccggagtaaaccagttaacattcttaattttggatgtctcataaatcaagcttcttgctcattcgtattaagaatcattttatcctttttgtagtatgattttgaaccattgcccagttttttaagtaatgtgggactgtgtacacatatttttttttattcatcgattgagtaatgtatgtcattttttaaaatttgaattatatcatatgcagaaaaaaatctaacatttattaattatatgtatttttatataaaatcaaattaaactagaaataagaacaaataaaagtgaaagaagaatttatatatttatatttaatgtaggtaaagagagtttaggaaattagcaatgttagtcaaccaggttgttcaacaccacataatttgcaatcactgaattatatggtgtaacaaacatatatactgacttttgaaaacaatctcacacgctcctcaaaatttgtagtccccctttgatgaagggctattcctctaccattcttgggacctcatagatggcaaagtactcaggacgaaacccctctatactatcaaatatctaagctacttctcaatccctccatgagtaaatttttctttattcttttgttatggtatctcttaacactttattcttttgttatggcatctcttaacacaagttttattaacttgcatatatcaaattgacgggttactctattttcatatattgactttcacaattatattttctgtaaaagctagaactaaatagaataaaatatatccaacttttaaagggattaaaatttggaaaactatataatatatataccaaattgactactttacgggttatcgggttcgacgacaggtcagtcgattaaattttgtttaatgtatctatggagattaaattttttgtaatgtttaacaaaatatgaagtctaacaataatgataaagtgattaaattttttaaatcaactaaaattaaaaattaatactaagatagtaggagatcactaatgatgaaattaaactaataaaaacgaaactcggatgagatcgactggaaatgccagagaagaagagggaggtgtgttgagtcatatatctctgcttgaaaagaattgaaaatatttttaaaataacgtaaatacactaaaaccctatattctaaattcaaatgtattctcgtgaatcgttatcctgctggttcaatcggttcatcggtcgtgggttaatgctaggtattaagggttcttatggttttgagattgtcaaatattagcgctaacccaaactggagaagtgtctaggacgcaaattaactgctcggaccgagtagtctgggtcgtgcatgaaaacactacttaatttatatcctctatcgtgagttttttagaggttctttgtgtcttgaagacaatatattacgaaaatgcagactatacaaacacaacgatctttataagtcctctgtttatgagctttcgaatcttcatcattcttggtgaggttattgccaggtttggtttatagagctttacctcaattcttgaggtagtgttctctattttgtgaggttttcaccaagaagaaaaaaatatcactctatgtatttacttaaagttaaaacatattaactctaaaggaatgataggcaaagatgccaagcatttttagaatacccaaattttttattcgaatattcaaaatttacccgaaacccaaaattttatctgagaatctaattatttatcagaaaatccgggtattaacccaaaatttttggtattagttccaaaaagggcctgaaaatctataatcgaacccgattagacccgaaccaaaacagaacagatatttttgatttatccgattgggtcctaaacttctctatccgaaggacccgtacctgatcgggttttactcaaacccgaccacatacccccatctttagtattctaactttttcaggctcctagttctccaacttgtaaatatgcgtccgtctttctcttttcccacctctgtgccacttctatatatgcatctccccatgattcaagggatagtgataagatgtttttcgaccaaaaggatcaaaatttaatcggcagcgtcccatggttgattgttgactccaatgtttactttgttccatctttatggtttaatccaactttccaaaccgaactaacgaagctgtttccgcaaaaagaaaccgtctttcaccacttggctcggtatctttcatatcgtcacttggtactaccatgatcacttatccaaagcagatgagagactcgggattcaaattcgagtttttttgcgatcaaggtggatactaccaacacgtcatggaccatctcatatcctgcacacaaagacaggaaactcctgtcaatatatcgaacatcccaaaatgtaaagctgttcttgtcacttctttgacaggagaaattataaaagctcaaggtcgacatttggatatgcttcttatagtcttcgaggattaaagccatggttactttatctgccaaatgatctcacagctcttatttcgccgtgtgttcagtccacgtcgatgaagccttgtttccttactcgtccgtctcatggatgtgaacctgactagggaacccactcgggaaaagttgttcctttcgtaaggaaagaagaaccaaattacgttttcgtattcataaatagtgtgttaactaagaatttattttagggagatggattcactttagtacaattgcaactgttgagatgatattaaactttacatgagtagaataccttttatgagttaaaagcgaaatgttatggtggacatatgacaaaatactttatgtgtatgatgattttttattatatgaaaaagcatgttcatggttgtagttaaaatctaaaaataattttatcacctaaaagaattacaaaagatcttagattttttttttttttttgttgggtaataataatgtaacaaaaataaacagctttttagcaagtaattatcatgtttggaattttgtgttttaatgatagcataaaagtttctagacttttaaagtatcaccattttgtctaacaagttatgtttgtaatggcttaaaaacaataatgaagatagtaaaaccaatacgatgtgccttaaaagattaaattagtaccaacaaaagctaattaattaaaataaatagaaacaaaagtattttataatataaaactaatgacaattgttaatcaatttattttttatatttatgttatagttttttcaatggtgtatttgaaatattttttttgcttaaaaatattttaaaaatatttacgctataatgcataatatttctaatattaaaccaaatttgtcctaaagaatttctttctttatgagaacaaatttttaaacaacagaaataattcaaaatatatatacaaaagaaaatttatgttaaaaacatcaaaaataaaagagtataatacttttgattacactatatgtcagtatatagctactaaaatgattactaaatccaaaattattttaaaacaatcgatataaataaacccttgggtagcatgggttaatgagctagttaaatgaaaaacttgaagacgaggttggttctctagcagtttacatgcacgcaatttggatatggtaacttatagtagggatgagttagtgaagaggccaagtgtgaacacaaatgcaagtggatatccttctttttgttctgtggcttcttcttctttggatgaatcgggacgcattccttttaagactccaaatgggtctcctctccatgtcaaggtattaactggtgagaagtttggcccacgagttccttatccggatcaattttgaggcctcctcagtcatctcctaaaccagctcgaacctggggtggtttccttcgatcattcctcataaaataggtgatttgttgatgaatattcatgcccagctcaaataacgaatattttggccgttagatagtttcacacattcttggtaccgtttgagtagactccttcgacaatctcttgatttagccccggcaatagaataatgcctctcgatcataagtctttaaatgtgttgtttgctggtgtattctcaagcccacgtcatcatttgtacatgcaaagtttgtgttgggtggttttggtgagccttctcagtcttctccgcaatcatatctgttgatccctttctgtgcaatctggtttgatatgaaatccacaccaattcagaaggtctcaaaggaagcaactggttcaagatgaacgtaccaagcaattggttatattagggcttaggtatatattccattagaagaagaacaagctaagtgctatgctatcctctctcttggttgcgagtgtgagtttcacatgtagattgtaatattgctaaaatgtagtcatgtctcttcttctttctttatcgtgttgtatcgtagatcggataagggtttgagaagttatatagcttgtaacaaacttgttagaacttgtaacaatcttcataagattctggttttgaatcccaactcgtaatatatgtgttctttattttgcatcattctcttggaaatctcattcctattaagcaatgtctaatcgggaactaattatagttgattaagattcacaaacaaggcttgttatctgaatctgctcaattcaaagtgatatattcgacgcgagactgatgttttaggagactcaagaagatacattcatcttgttagatgtctcccattatcatttataatttcacaagttttgtaaagaaaaaagcatagtaaggtataaaacatagacttacacgctgccacatcaaaatggggttgctgagaggattaaatcaaacagttataaaaaaagggagaattagtagagtgactcatatttcattcagaataactagaaaggaatggtaaaaatatgagttatataggtaataattatgcctaaaatatccctgttttcctttgcagaaaaaataatattacagaaataccattactatttaattccagcatggcaataaaaccacatttatttacgaaactgccatcgtcgtttttggtaaatctgtggctcttgttacgacagatttgttttcgatcacagattttttggtcaaccacatattttttacaacagacttgttttgtaccacaaattttactggattaagttacgacatatttttattttttcgcagatttgtttattgtgacagatttgtttcatatagtctccacagatttttctaaactttcaaaatttagaatgttgaaatcaaatctatcactgatttgttttccatacagtagatttttcttaatggtggcagcagattttctatttgtaaccaaaagtctgttgtgttataacagatttgttaactcggaaaaatgttatatagtcatgatagagttgttttgtgtaatcacagatttaattaacttgttaacaaatctggtgttttacaacaaatttttgttaaaaattacaattactacacagtcacatagtgataacagatttgtttttagtgataacagttttgtttttcagtgtcaaagcataacagattttctcatgtcaatgttatggccgatttgtttatcactagaataacctttttagtaataacagattttttgttaacagatttgtttttaaaatctttaatttttttattacatgagttttattagctaagcaattttactcaagtaaaatctttccggtttgattatatgttaaaatcggtttgattcaatttaactttaaaaaaaaaatcgataacatcaccacagaaaacagcccaccaaaacctactaatcctcataattcaaaagtgataacatacaatctgccattcttaaacaatctacgacaatattactttaattgataaaaaataaaatgtggaaaatgatttacgaactacaacggattgataagaaatagacttttcggtgttactcgaaaacatgatcttaacttttcggtgtacaagaactggaaaacacgagcgaagggctttttaattttacatactaaagttcttaacttttagtttgcccatttgcttagtacgttcctttacaagctatgacaacattaatttaattgataagaaatagaaatgtggtttccataaccggatttctgagttttgttatttttacatttgtttatttatttttattagtaattctttttttttttaatcaaaatatagttttaatactgactgaggttaaatagtcttttaacttaaaatatgagtcataatagttagtcatcgattattgggagtcacaatagttatttctattaagattagagtcagtctaagcaattttcactaaaaaaaatgagaaatatgttgagtaataatggacttggtcaaaggttctaggcggaaaccaaaccatagttctattcgtgtaatgttagagccttacagttcaatcgttttggaatatctttttgagcgtttgttaatcgagtttaggaatttgactatggtaaatcgtttcagcaatgcacatgactttatctaattcattatatggataaaaaataagtgattatatttgaagagtgggaatgtaaacagatctcaatatatgttcagtaacaaaatgttgcatatttcactatattaattcaagtttgcatgctgcggagggagtatagagtcacatgggtcaattgaccctggttaaatttaaaaaattagctgaagttttatttaatatgttagattgactctaatcaaataagaaaattgacccctataaaacaatttacttgagaagacttctaatagttaagcccaacaactatattgtatttaggtaattgtacttgtatatagaattcacctcaataatattttgttttaaaagtaaatatactataattaagcccattaatatactttaacctattatttaacattttttgtattctaaaaacgttatagtttcttttttcttattttttttctttgtttcaatcttcaatcttgagtttataacttatgcggttttagaaagaatttttttttgaccccgatggatcgatacgctggctccgccacgtgccagacaatccctacttctttagattccaagattacaatattgtaacacccgttaattcacaacagctctcttattgacatttttttcgttaattatttctaaatcacaatttggaattctaacaacaaaaacaaaaaacaattttattggtaactcaacaataaacaaaacaaatttggaatcacgttcggagatcgtgtgtagtcaactcaacaattcacattaaaatattcgaagtcttatttacatgatctgtggttgataatagaagttataatcaagctatataaaagttgtaaactctttttgaatcatctcacacttataaccgatcaaacgaaagtcaacaactaacacaaatttcatatctccaacaaaggctttggggttgaagatgaaaattctgatcgcggtcgtctttggttgcttactaattatactatcattctcaaaatacttcaacgaccaacttcttgatgctacaaccaaaggtaagaaaattatccatatcttgtgttttattgttaacccaatgaatcctcagttcatatcattttcttgttatagatataaaggaatccgaaagaccggtggataaacttataggagggcttttaactgcggattttgatgaaggttcttgcttgagtaggtatcataaatatttcttgtaccgcaagccttctccatacatgccttcggaatatctcgtctctgagcttagaagctatgagatgcttcacaaacgttgcggtccggataccaaggcttacaaagaagcaacagagaagcttagtcgtgatgagtactatgcaagcgaatcaaatggtgaatgcagatacattgtatggctagctagggacgggcttggaaacagattaattactcttgcttccgtgtttctctacgctatcttgactgagagaatcattcttgttgacaaccgcaaggatgttagtgatctcttatgtgagccatttccaggtacttcatggttgcttccgcttgactttccaatgctgaattatacttatgcttatggctacaataaggaataccctcgttgttacggtacaatgttggaaaatcatgccatcaactcgacttcaattccgccacatctatatctccataacatccatgattctagggatagtgataagctgttcttctgccaaaaggatcaaagttttatcgacaaagtcccatggttaattattcaaaccaatgcttactttgttccatctttatggctgaatccaactttccaaaccaaactagttaagctattcccgcagaaagaaaccgtctttcaccatttggctcggtatctttttcaccctacaaatgaagtttgggatatggtcactaagtactacgatgctcacttgtccaatgcagacgagagacttgggattcaaataagggttttcggaaaaccttctggatatttcaaacatgtcatggaccaagtcgtagcatgtacacaaagagagaaactgttgcctgaatttgaagaagaatcaaaagtcaatatatctaaaccaccaaagcttaaagtagttcttgtcgcatctctctatccagagtactctgtcaacttaactaacatgtttttagcgaggccaagttctacaggagagattatcgaagtttatcagccaagtgcagaaagagtgcagcaaacagacaagaaaagtcacgaccaaaaggcgcttgctgagatgtatcttttgagtttaaccgataacattgtcacaagcggatggtctacatttggatatgtttcatacagtcttggaggattaaagccatggttactttatcagccagtaaatttcaccactcctaatccaccgtgtgttcgatccaagtcgatggagccatgttaccatactcctccttcgcatggatgtgaagctgactggggaactaactcggggaagattcttccttttgttaggcattgtgaggatatgatgtatggggggcttaagctatatgatgacttttagttctattttatcacatttgattattgagttcttaaaatcaaaagagaaattctatctctctttacagtttattaatatgttagatttttttaaaacgtttacgaggtttgcatgatttagaataactgttggtgtgtagagaaaggagaccacgtccctaaaggaatgagccgccatcgagaaagggatacacaatcgaacactcaagaaccctagaaaagagcctacaaagaaccttaatcttctttatcttctcttccatcttttcactgattttttggattcgtctaaggtttgggaacgatatcatactgcaccactatggatgcaaattcaccaaggcacacggctacaaaggtgttcacgaagatcttctagaaagaagactgataggccagagtttgagcttgattcttcaggagaatactttgctcctccaggagtcgagattgcttctccaagaggaggaggtgcttctccatgttttccctccaagacacttccaaaaacggtgttacaaacagagatcgcaaaacaaatgaggaatattaaaaaaaaacattgttcaacctagactaaacgtatacaagagattgattcaaacacacattcacacatttataaccaaatattaaaaagaatgatgagaaaatgaatttccacaatgctttggaaaccgatgaatttccaagaatgatgagaaagttaataaccaaatagtgaacccatttctttccttttctagaatcaatctcaaattgatgagattgtcgttcttggctatcatctcttggatgaaactccataatcgtctaatgctcttgatgttgttagttgatatcttctccggcatcaattcgtagattctccatagataaaatacaaagcatactacgagacttagcgaggtccgtttatagagatttacatcaattcttgcaaagatagtattttttctttggtgatgttttgtttgtaccgaagttgtaacaacgaataagtaagggattgtcagggacaacaaagtaatttttattagatgacgaatgaaaacggtaaacaacaggttgatcaaataattacaagtaatttctatcgatcggcaacgtaatatgaatcgaattgagaacaaaacgaaccgagaacaaaaacgaaccgagaacaaaacgaaccgaaagacaaggttttttagtatgaatattgtcctgattctctgggaattaacttgtgtatcactatttcgcaaatagtgctttatttataggacaaattttctgacctaaagattcttctactccttctgtaaattactgttttgcctttgacgtttaatgggctgatttggtgaagacaatgggtccattgaacacttaaatctctcttttgaccaaatgatatagaaaaggtgagcccatgtccaacaggttttgccaaacttgtttatgaaaaaatatcattctatttacataataaatattaaatatattttctataatatagttagtgatgtagaagccaaacttctagtcaactgtagcctgtatccccagtccccacgcaaagtttatgtgtcaaaaatctgtatataagcttttgatttctttgtcatattttaaccacaaatatacagtagaatcgaatccacagagaccatgcagttgagaaaataacttgaaactgttctacaattcaaatcatgggtgtaagattattctactctcgcatcaataaattttatgaataccattttaagattttaaactcacgtttgaatttaggaagcaagccttacacaactaaactactcaatcatgcatcatcaggtaaaatatcacaaattatgtatagaatttcacaatcataaatcaaatgtaaagagtaaaatgcttaaagaaaacttatcaatgtcgagaccaaaatttgtgattgtgaaatcagattaagtaattttaagcaatatgtttatctcttaatttacgtgaaaaagagtagtgacaactatcaccaaaaaaaaaaaaaaaaaaggcaaaaaccttaataatatatatttgtataaatataaaatttaatcaccaaaaagaaagtttgtacaatcaatgcgtcatagagaattgagaataaagaccaatcaaaaactgagaattacatcaaaatgggagagctagtggctgcggacatgaaaccaatatcgaagaccttcatcatagacactcattatagacgaaatttggcataaaaatacccttgagatagaaatctataacgatagcagtcaattcaattgttaaactaaaattaaaataaagtagataccgtttctttcacacattaaattgaatcaataattcataagaaacacaatggggtcaacattttattaacgacgacagacgacaccaagatagagcctaccaactagaagttatgcttttgctattcctaaatgcatgtatgcaagcaaattaagtaccccagtccccacatttaagaaaacgtatataccgtacatattagtttttgaggtttaggacttagtatttactatttagattttaaggcataaaggtctttcaacaaaaaaaaaaaaaaactattaatgaaaaagtgcaaatgttaaagcgcttgacacaaaaaatttgtgtccaacaacatcatatcacttatgtaaacaacatcatatcacttatgtaaacaacatttattaggaattgctcatttcagctataattaatttcggatgataaaaaaaaaaaaaattgcacaagttttagactgttttgttaacaaactatacaagctggagcgatatcactcttcacttacttttactttttttttttttttttgggtcaacagactgctttgttaattttgaaaaaaatctaagctattttcctaattttgttataagactttcaaattccctatatataaaatatttaacttaattatggtgatttttttcttaataaggttgaaatcctacttggagagaaaaatctcttttaagttatatataaacacttcccacgtctaattattcttccatgtccaagacaatggctttttcttgtctcataagaaatgtattttcaattcttcctcttctcgttattctatcaatcacccctgcgtcttcatcattattgtctttgtctccaaatgacaaaattagaaaagatttagtcaaccaactctgctcacaaccgacaatttccaagcagttctgtctcgcttggctaacctctttcccaaacacgttcacccttgacatgcaaggtcttgtcaatatggtctatcaacagacggaacggttgggctataagaacctagagatgattaaaggcttagatagaaccgagaattattcgaagctcaagaagtattataggtcttgcgtgaaagaatatgaattatccaataaggcgatcgaggaagctaaagggtttgcaagctctaaggcgtaccggtcagcttctgaggcggctgctagagcctttgatagtatatctatgtgcgaagcttatcttgaaggaagcaaaaccccgggttatgtcacgacacgcaactggtggtttgaaagaatgtgtgacattgacaaaatattcaccgaccttttgatttctgctaagttttaatttacatgtatgatgtgaaaaaactatgaaatgttatcaactttggtgtaataacttaaaatccaaataaattaatagtcatagttaaattagttagtcttccgacttcaatatgaatggatatgctttcatctctcattacctctggtgaatgcatatctatctaactaaggaagaaaactcaagaaagtagttagaagaataattatataactttctcatcactatttctacgtataggctagttataagcacaaaaacgctactagaaaaatgtatattatgaatctgaacggaacaagataccttcaccggctgtggttttaagagaaccaacgacgcacaaagaaacttcccaattaacttcactcggagtttgcataaattgagagaagatgtgaacctagtaagagagatctggacggcgttgtcaagagataaataagacgccctactagtcgacgatagcgggcaggctgcgaaagaaaggggcacatatccgcatcgagacagtggttagtttcgatgagagaatataccggatgttatccaagtaaatcgggctcagcaataatatcgaagatataatttccgttgggagaggaaaatgccttcaccattgttgtgtacatccatttggtgtacttcccacttcttaactaaccgcaacaattttcgataaacctcgaaccaagtactctgagcgtgctttataacgttcattagtttcactaccatcgccattgtcctttattttaaacacttattggttaccaaaagctttcttcctggtggaaaatcaacaatagtactccatgatatatcatggtttttacgatttttaatcatgatgtaagtattattttagaatctttttagtcttttccatgtctttgtcgatttaggcacgttttggcatactttgaagaaaattggagaatttggagctttatagctgagaaaaacaactcgagacacaaaccacaagtctcccacgttttatcaaggcttgaaggtattcagatttgcctcaatgttgctactatttgcaaaaaaaaaatccgacgtgttttggaacatattaaagatttttaatttggagagagattttgtagaaaactaggaaagaagaatcagaatctactagagaaaatttagaactcttttaccttatctatgtaattcttaactagattttaacccagagtacaacgtaggacaattttgtttttttaagttagtgtatattaaagtttgcaaattttatatatttaaaaatatttatattttatagtttataattgttattaagtaacagtatactacaagtcacggacaattgttgataaactaaggatttaaccctattaaaacgacatgttaataatactagatgagtacccgcactacgtgcgggttttcacttttgatttcgtaaagtattttaatgtaaattcataatttataattaaatgtgttagtgtgtaattaataaattcatatttattttatatagttagaatttttatgattaaatttatctataattcgaaatatcaattttactataatataaatatttatatacctattattcaaatatttcactatcatgaacacatacaaaaacattatatgatatattaatatgtagttatattacttatgtattttgaaacttgtctaacttaattgtaacaaacaattctttattccatatattatttcgtcatctagtacaccaccacatcatgatatgctagtaatttaaatcaatactttaattctattcccttgcatataaccatatagagtctcgtatttctgtgtggatatgtctaatgtctcggatgaccattacgtgaaaaaattgtatatcaatgttatcaagttatcagaccgcacaaaaataaacagaaagaagatcatatgataaatcatattcgcataacgtaataataagaaaatatccaactaaaattactaaattaatatgaggttagatagcaaacatttaaactacaacacatgtaatttttagtcattatggattaataactattgataaaaaaaattaaaaaataagtaaaatagaatgaaagtagaacttgatatattattatgattttttatttattgaatgtttttagaaaatttattttaagagtgagattaatagagaatttaacacaacaaaagacttttgattttttctcaattagttttactaatttttttatttaattaatgtagaatgacacatgtcattttcttgtgtgatgatgtgtcactcatatggagagagttagccaactttcatatatatgattttaaaattttataaatatgatttaaacacgttggccacataacctcgttccaaaatataacctatcccataattttttaacttgtcccatgatttattttctaaaagtagcgattttaaatttttaataattatttattatatacaaaagtttgcaaattataccattctctgaaaaattgtattatatagtttataatttttattaaatagcattataccacggaacgttttttggttttatacaatcttttctaaatcatactgatttgatatatctaatattagtggtgttaaaaaaataataaattaaagatttaatccgtattgaagcagcgaattaatgatattttttttattgatgtaattcaaaactcgtcccgtcaaatccgttccttcaaaaactcatttcttttattaatgttatcttatttatgatatgagtgtgaatcattgtctaaacattttagacgatatgagacgttgaacccacacatttttcgtcaattgggtagtatatgaccgttttaaaaattttgaatcacaatatatgtaatttttttttttaacttaatatattatacaatgatttaaaacagttaaaaaaatcaaacaaagatgataggagattcatagttttaaatcttaaccaaatgttctaaatatatgtattgttaaatatagaaatatcttgtataagagatttaaaacgggtttagaatcgatttttatttgaaccgacccaactaaaatttaatgaaaaaacttactaaatgggcgggtaccaaatagatccaaatgtatttttgctccacccgcacaaattccttgcaaaaatactatatagatgcaatttattcagatcatgatttatgtttcattgattgtgtctaaataatctacttgttaaatttaagggttaaagaataattcttgggtttcacccttagggatgaacctctcttgtccacatggctctgataccatgtcaagaaaactagattggtgtaaaagatgttcttattcaattagatacataggttgtgccttttagtgtaaaaggttttcttattcaaatagatacagaggttgtgtcttttatacaagtgtttcacctaattaaaaagtatataaattatctaactataccaagataattcagtaattgcataagaggtccatatcttcctcaataaaatcacattgtaaaaagtttgtactgcttctttacatatttgagtgaagtttctattaaatttcttttaataatagtttataacactaacatttaaaagatttcagaaatcaagaaactaatatattactagatttttttcttcggtatctatatatacatttttggaggggatttttgaagataatggtgaagatttgagccataattcaacaattaattcaaataggtgggttttacccggtttaactctgttcggatcctggataacacgtttaattctgttctgatcttggataacattaatttttggaaaagttacctaaaaactaataattaaaaacgaaaattaatgatttaattaccaaatttaatataaacaatatctctaaactaaccatatttcttatttaccttaactaatttcctaaaatatttctacctaatttaaacataaatatataattcttctttcaattttatttgatcttatactttatttattttgaatttatataaaatatatatagttaataaaatattatattttttctgaatatgatgtaattcaaaaatttttaaaacggatatttattattcaacctatgaagaaataatatgtgtacaatgtcccacatcgcttagaaaaattggacaatggttcagacccatattataaaaggaccaaaatgattctgattacgaatgagtaggaagcttgatttatcaggcgtccaaaattaaaatagttatccgattttactcggattttttattttaaagaattgaaactttaaaatgtttcaagaaattataaatattataactttatcaaaagttaaatattataattttaaaaactttttattaagtttttaaaatgctttaaatatttataattttaaaacttataaagttttaaaaattataaattgaattttacaagaaatttaaacattataaatatataaaaaatatattaatacgagacaatatattacaggaaaaatcttaaatataacaatcaaaattcaatgatgaattttgggtcgatattgtatttttttaagtttcaaattttataatattgaaatttataagaaaatgacaaaattatgtttaatttcacgagactggattatatggtaggacgggtttgggtggataataattacaattttagaatgtcccatatcgcttaaaaaaattggacaatggtcaagagccatactataaaaaggaccaaaatgatttcgattacgaatgagcatgaaacttgatttatgaggtgtccaaaattaaaatggtttgtttactagggttatttattttaaaaaattgaaactttaaaaagtttaaaaaattataaattaaatattacaagaaatttaaacaatataaaagatattaatacgggacgatatactgcaagagaaatcttagatataacactcaaaattcaatgatgaagtttgggtcaatattaatcttttttgaagtttctaattttataaatatttgaaatttataataaaatgacaaatttgtgtttaatttcacgggacggggttatatggtgtgacgggtttgagtggataataacatgggatagtatgctatggaaaaaaacatataataacaatcataatataattatataatcttaaacactaaacaaaattaacaatattaaaaaaaaacacttaaaactttagtttttttaaaacacattttgattcttttataagaaatttaaacattataaatatttaaactttatactacgggtaaaattttataattgactgattgggttgataagaatttacgatagaactaggagttaaatcctataatgacaatcaaaatataattatacaattaaatactaccacgagtgaaatcctagaattgacgagtttgaatcgatattaatatgggatggtgtactacgggtgatattttagaattgactggtttgggttgataataatttgcgatagaattaggagtgaaatcctagaatgacaattaaaatataattatacaattaaatactaccacgggtgaaatcctagaattgacgggcttgattcgatattaatatgggatggtgtattacgggtgatattttagaattgactggtttgggttgataataatttgcgatagaattaggagtgaaatcctagaatgacaattaaaatataattatacaattaaatactaccacgggtgaaatcctagaattgacgggtttgattcgatattaatatgggatggtgtactacgggtgaaatccgagaaacaacaatcaaaatacaattatacaatattaaacatttaacaaaataaacaaatacaacttaaaactttaaaatttgagttataaaatttcgtctcgcggtgaattatacatttaaatcaaacaatagcataaatttattaaatcatcctaaaaattattcaattattttttatttaataaaaatataggtccgcggtataccgcaggttaatatctagtatatatatagtagaattgaattgaatcaacaaaatacataattaaataactctacaattatagagaaatttgaattcattcaaattaggtcgtttcctaggatgcaatatattcctctccttaaaaaaactgttatatttgtgttttgcgcctctaaacgtccatattatgttgtagatcatcttgacaaatcctaaaaccttataaccctctttcatccttacaatactttattttccatcctaagaactgtcgaatcatcggaggacaatgtcttatcatcccacggtcaattacttgaccgatgttgatgtttgatatttctccgcttcttataactaaaatatgttttcttggatggatttggacctgaggactcagcatgtcaatagcaccaataatcttgtgccatcttatatatattagggctgaaaagtcaccgatttatcgcgccaaaattaatccttaaatggctagaacgaagaacacaaaactatacacatttgtctttgagatattcccttaaactttgcatttctcccaaattacagatttcacttccaaattttcaaatgatcaaatattcccttaaactttaacaaattctaacttttttaaatcgatcggtcttacctaaaatatttattttattttttcataagtttgggtattgcaaatattacactcaatctaactgccacctcatatttattacgaaagcaatttttatttttctagtagaaaagttctttctacattatatagtagaatagaaaatcactcaaattcttcttctttattatcactaaaagaaataaagcattggatggggccgggctcccagagccgtgggatccccaaccccacccccaagatccccaaggggagctaaaaccaccagaattcggacctccagggtttgaaccgccagagtttgaatcaccaggagttgaacctgggcctgaggtagaggtgctagagccatcagatccccatccccagccgttgccgtcactagaactccagctccacgcctctgcaagagaagaggagagacatgcaatggctataacaagtaggaaaaccttcttttgcgaaccagagagagccatcgtttttcttcttcttatgagttttgtttaattatagaacaaagcaatatgtaaatttgctttcttacgagatgagtatttatagaagaaatgggtggctcatagacgtatgtttaacccatttaattaggaaacgaaatttggttgaccaaaggtttcgtttgccattttattctcccctttgtttttttttaatattctaatttaataatgaaaaggtactctttttgtttttggtcactgaaaatttattattttcacttctatataataatctaatcaccaattaataaaactttaataatatactggtcaaagataagtagataactgaggatattttaaggattttataacttattctgttggattctacttaaataggaatatgttatatacaatatttggctaaagacagcatgaaaaacaaatagtaagcaagttttgctggattgtactaatatgaatatgttatatataaagtgtagcaaaacaggctaaagacagcatgaaaaaacaaataattagcaaaaaagaagaagttgttcttgatagggaatttagttttactcattggtcttcattttatttcttctttcgcacttcaactttgtataaaaagtccacactgattcaacgttttctccgagttttttaggattatttttgtttggtggttcttatatattcactatacaaaagtacaaatgacaaacttttatcaagagaattcactatactctttgaaattatgtttgattatctatatagctaaaattcaaatatttttcactatcattaatacgtacaacaacaatataggattataggatatattgatacaatgttatataattatgttacttacatgttggaaccttgtttatcttgattctaaacaaacaatttcatgttccatgtacactactctctcatgatctactacttcatccacacagattttgacaagctaatgattatctaccgaattgatataatttgaataactaacttttttttatcaaacaagttatattgaagatagtgccttaagctccattgaaggaggaagcattacaagataaaagaacaaaattcacaaaggaatctgttaaaacattcgcaataagcgatacatgatgaaagaaaatggaactaaaatgaagcaaagtggaattaatgtccaaaacaagtccatgaacttcatttgcatgacctacggaattgagaagaaaaacgagttattgacaatccgtgacgcatgcgtgccttgatacacccaaactttgattgagaacataatagtcttaaagcatttacctccacaactaaggcagaaaaaacatattgtaaggggatcgttgagcgatccaatcatcttcagtgaattagcttgtcgagatctgcctaaacaacgcttaaaagcttccttacatatcgtccaaggataggtaagcatcgtcacactatgtaattgggcttcttgtcctcttttaacatcaacaatagatgctaagaccagttcctctattgacaatcttctgaaagtgtcttcccaaggcaagcataccagagatggtagaacacactccataaaggaggaatttgatggaagatgatacttcatgaaggaggggactgatggtaacacaaactctccaagaatgtcatttaacaacaccacatgaacaaaaaggttagaatcacttgacaaaagtttgcggaaaagagcctcatattgaggtaaaagaacactgagcctaaccagagtcataacagcctcatactgaggaaataatagcgtaagcctaattcaaatcatcacatcctcaagtgcaaggaactaaagtaaaacagagaattgaagtacgtaagataaaatcaaaagtcttttgttgtgttaaattctccattaatctcactcttaactttttttaaacacttgataaaataaaaaattatattaatgtatgaagcattactttcattctactccactaattttattaaaaacatttatcaattgaatactaatatttcaaggataaaacagccttgtagagagacacaaccttccgatgtagtgttgaaagacatgaatgacgtgaagaaagacacaaatggtcggaacaaacgacatgaaaggtcttgaaccacgaactgcacacagcagaaaaagatcgcatatgagcgataggagtaccacctgagggcacaataaaaaacaaagcaacatttaaatctacaaatctgaaagcttggaccaatttccgaactagatctaggaataacagaataaagggacattgggagaaagattcagaggtgaaagagacgacgagagagtccggtggatcgggagggttaggaggttccagaggagagagcgtcactgaaaggccaaaactgggcacacatcagcgaggccatggaagaaaggaagaggagggagaaaggagaagtttaccaccggtgggcgagaggccaaccgacggcgacgagagagaaactgatggaaaccataattacctagagatagtttagcatatgcaaggatttatacatttgttctagaggcacaaattcaaaaaaatatatatgtataactaactatttgattttcttcaagagttttcatatcaaaagagaaaagatagcaaaaagttgaagagtaatttaagtaacatttttagatctcacttcttgcatttgcatataacgatatattagagatttttgtgtcttaaattccttggtatgtataacgtctcaaagatccattacttaaaaatactcgcatgttattgtcaatgttaccaacttaccaaagaagatcatatgatgtttatagaccataaaatctaataacaagaaaagagtcaattgtaaaattactaaactaagaagaggttaggttgataacagtgaaactgtaaattttcaatcattatcgagtaatgaccattgagaaaaaaaaacttagtaaattaagaaaagtataataaattagtgtttgatatattagcatgactttctacattttaatttttattttaaatataaataattaagagttgtattgatggaggattttattcaagaattttattttaattttcttcacttaatttagttgattttttatttaaataacacatgttattttcttatgtgatgatgtgacgctcatatagacagagttggtcatgtttcatatatataatttcataccatgggttcaacatatatgtgactagttgttagaaattagttgataatatgaatataaatgatgtataaataaacagaaaattgaaatttaaatattttttttcttgcaatctgaattttatttatgaatgtaagtctttacaaaggaggtttttagctacattggctaatttcctgagtctgcttgaaacacactagtcgtatatattgaagaagctaactgatgtgttatgctattacagtgacagtttgtgaatgtaaagataactaataaaaactttgaagcccaaaaatctatatctagaagtaaactagcaatgtcccaacgagtagacatgtcgttgattgtttaatgagaacctcgcaatcgccttcaaattggactctcttatatcctcgtatccaagcttattgcaaagtcactaggagagcctttgtctctacctataaaactgtattgacatgatcataatcaccttaagaacatttacctctctcgtgaaaggactccagatagattaatttggaactatactacttcggggtattatacggttagatcgggatattggcttctttcccatgacccaactgatactcaaatcaaaccggttccaccatacggttcagtggagctgaagaacaagatttggaaaatccctattattccaaaaatcaaatacatgctctggaggactatattaaaaactttacctacttgtgcaagattaaccacaagaagcatgaatattgatgcaaattgtccccgatgcctcaatgaggaggaattaataaaccatgtactattcaaattttcgtatacaactatgatttggagaatttcaaattctccgattatagtaggacaccatttcacggatgatgcagaagaaaatatatcctttctcgttgatactttttcgaacaataatctaatagaccaacagaaactaactcccttgtggctcatctagaagatctgtaaagcaagaaacaattgtgtttaataagttcagagagagtccttcgaaggtggtttcacaaacttaagcaaaagtcaaagagtggattaaaaatgtgacagatacacaggaaatttctgctacaacaagaccatcatcattgataaaacttattgtacaaaacaaattgcttcctatgtcaagagtaattttgatgcatggttccacactaacaatttacctagcgcaaatgagtaagcacaaaaacaccgcgtaagactctaactcaacaaaatatgagttcgccctagttttcttttctctctggcccaaagcccgagagagaccattgaagtgaatcatctctgctatggagttccgccgttacttttcctccgttggtctatctcctccatggaaagtctttctcactcaaagacatcgcctagttgggctgcctccgacgtatctattttccggcgagaatctcttttaacttctctcacttgttgaaaagatcttatgacatgcttgtttaatcacagtctcatgtctctaatgcagccagttgtgccctcggtggtctcccacctgttggaaccaccagatttgtttaagctttcttcgtgtaggattactctggaggctacgccggtcattcaccgagatgggttttttccgttgtctctctttctccagatctcgtggaggcgcttcaccggaaattcctcaactagtgtcttcttcttgggatccgcctttgattcccaaagaattatctcccttcatgggaaatgctacaccgtcgatttttctcttctggctcttcaaaaattcgaacgctttggactcttcaagagtctggtgactccattaacattgggttccctttcggtcactctgtgtgatggacttctcaccactataatctctagattgttagatctggtggttagagatcttgtatcggccgagcatgtctcaccattccaccatcgtgccctaaagtcaaaccaccttctccacctcgtttgagacattcctccgcaaactggaatggttctccgatgatcaacgaccgccctcctctaccctcaaaacgctatagtttctcctagagtttctagtgatggacaaaatttgggcatatttagtagtgggctatgatctggatttgcttctaatgcactttacatatcaaatacccaacccaaaattgtttttgcaagagaacatcttcaaattcctccctctgggagagaccattgttatattatttcgattttttcttaacagagattaatattgtgttgtatctctttccaaaatctagagattgtataccttttgtttttatctttttagaagattctctagaacttgtgggaggatatactcttatgttctcgaatgattacccgatacttttggtgtcagttactgtccattttgtgggtttttggggcaacaattagaaatcgagtattgacatcagcttttagcttttgatgatccggttgttaaaaaccgagacttaacttgataagtttgggccaggatggtatgctcaaaggaggtgtatggtttttgaaaggtgatccctatatgatcatctcatacttgtcggcaacgatgtttggattgcgagagttttctctcgtcgtacttgtgaccacccttttcagagattgggtgtcttggcacttcaggcgcaagtttggaacttcaaaagcatatgaaaccttgtttgtttcgtaaagcgatgtatctcaaggtggctggcttcatggcatcgtgaagcattttgtaataccgagtggctcacctccacgttggaacgcgttattcttaacatctttagatcattttatctcttttttaattgtattttcttattttgttgtttatctatccggatgttgcgtaatgttcaaggtatagcagcatgtgagtacttttatttccatataggtttatcggtttttgtatggttttccttagcggagactcttttatctgtaacttaataaaatggtgttagaaaaaaaaaaaaaaaacatacacatagcgcaagaggatggattattcgggatcatgaaggaacaacaaaagctttgggatcttcatccctagatcatgtgaaaattgaaacatataacactttaatttacttttataatattggaaagaaaacgtgaagatccggaagcaattaccgtaaaatttagaggttaaaaacttcttttctttaaatgaattaagttagagaaaaggcaatttggttaaagaaaatatagtgaaaatttgagagacaagtcagcaaagtacatgtgacaaatggagaatgtttcagttatttgtgaatctattttttatttattatatatagatttcattgttcatataaaagtctgagactcttaaatagttttttcaagatattatatattttaaggtaattatatatagtagttattatttatcagattctaggtatttggcctctaattatgtgtagtagaaagactatataaattaaatttgtaaatatatttaaataatttaaaactttaacttcaagataatatatatagcaagacaaaatgataatatttacataatacaaattatctttttaaaaaaatcctaatataaaaaagtacatatgaaataagatccacatgttttaaatgcatcagacactaagacaagttgtataaataatttttcccacaaaccaaagaagaaccaccaaaatcccaatcacaatcccaattaaacaaacaaaaatgaggaaatccatctcaatagcttttgtcattgcaatcaccattttcatgtcacatcttaatgtttttacagtgtatagtttaacaccgtgtgaagaagcaacaaatcttttaacaccttgtttgaggtacctttgggctccaccagaagctaagccatcaccagaatgttgcagtggcttagataaagtgaataaaggtgttaaaacgtatgatgatcgtcatgatatgtgcatctgtttgtcgagtgaagcagcaatcacttcagccgatcaatacaagtttgataatttacctaaattatgtaatgttgctttattcgcacctgttggtcccaaatttgactgtagcacgtaagttttgttatttgaaactatataaaaaatatttttgcttatactatttggttaatatattaattttatttttcatatttgagaatatttcactcatatttttctcaataatgtttttttgcagcattaaagtttaaggtgaagaaaaaaaaaaggtaaagtgaagaagaagtataaatagtctcaatattgtaaggtttcgtttgtttaattttgattaataaaaacagagaagtttattctcaattaaagactttgagttcttgttgttaagatccattaatactcaaaacaaagaaatccgagcaacgggttttgttatgtgaatcaatagatctcggaaaacacttttcatattatcccatatattatttatacgtaagatccttaaaagattaaattgatatagtacttattaaattaaattctatacctttttgggaaaacattaaattgatatagtacttattaaccagaacttttctattgtagtttgatgaaaacaacctttcagtcaaaaagaattgtactactcatgcaattaaataaaaccagcagatacatttcattacatgctcatggtaattcaaagcaacagaattgttgaattatcgaaaacttgtgaaagttttttttatattttgtaccaacttttaaaaaaaaaaaaaaaaattacgaaatatgtttccatggatattatggaaaaaaaataggaacttcaaatcctttgaggatacaagctttttgtcgatttgagtcggttgaaaaaatttgcgaagatgcggatgaatatggtttacttctccaatgctccatcaaagtaatgaaatagaggagaatattaggagtgtccatgaaagtgacacttaaggttcttggtctaagaagaagatggtgggaggttgtgattaggttatgagcagaacaggtcctaagcgcaagggggtcaaccggtcaagcatgggcttatggtctaatatatgtttatgtatatagaatagtttttgcctcggaggctgctttcacagatccaaagcccggccatcctttggatatcgaacttctgaattc

SEQ ID NO: 231 - DNA, 119753 bp, Arabidopsis thaliana
gaattcatcatcgatggaactttattagctcctgcaaatccaagcgacattaagcaagacacgtggatcaactttaggtacatcaacaatctttctatctctggttctggtacacttgacggccaaggaaaacagtcttggccacacaatgactgccacacaaaccccaattgtcctaaactagctatggtaagatttttcatcgaattttcacttatattattattatttacatttaaagcgtattacaaaatgtttgatatgatacttatacaataataaaaagtgatattcaatcattatttatcatacataacttattaaattatcttgtctttattgttttttatttgagaaagtaacaaatcgtttaataaacttgaaatgttttatagactatgggatttgcattcgtgaacaactcaaatatcaaagacataacatctctcaatagcaaaatgggacatttcaacttcttctccgtccatcactttaacattaccggtgtcactataacagctcccggcgatagtcccaacaccgacggtatcaagatgggttcatgtagtaacattcaaatctctgacacaaacatcggtacaggagacgattgtattgcaattctctctggaaccactaacctcaatatctctaacgtcaattgtggtcctggacatgggattagtgttggaagtttaggaaaaagcaaagatgagaaagacgtgaaggacttaatagtaagagacgtcattttcaacggtacaagcgatggtattcggatcaaaacttgggaatcttcagcttcgaagatcctcgtttcgaacttcgtgtacgagaatattcagatgattgatgttggaaaaccaatcaacattgatcagaagtattgtcctcacccaccttgtgaacatgaaagaaaggttaacctcctatgcgaaaacaagctccattttattttattttattttatcacaaaaacaaaaaaactaaagacaacttgtttttacttttttccagggagagtctcacgttcaaatccaaaacctcaagttaaagaacatatatggaacatcgaagaacaaagtagcagtgaatctgcaatgtagcaaaatctttccatgcaaaaatgtggagctaattgacattaatataaaacagaatggagtcaaagatggttcttccacttcggtgtgcgagaatgttgatggttttgctcgcggtaaaatgtttcctcgaattgtctaaattaattcgacggtccatcaaaacaatgacgatattttgtatatgttatttttatttattaaataattgcttaagtgtatatatggcttatgttttttttttatagccaaaaattccaaaccatatcgtaaatatgtatatatatgctttttgataagtttacatcaatattctacaataaattgcattttctgaatttattagtgtataaacatggattaacaattggatataaagagctaagaaatccaatcccattgttgtatactccgctttgtgtagcattttttggaaaaccgttttttgtgaaaaaaaattatatttatacaaaaaagtagaaataagtataatgcattttttttctttttcttaaatagtctttgtttaaatataatttggcttcatctgttccatataacatgaaccgagttcttgaagtaaaagaactgatttgtgattcttctggtgatcagaacaacaactgaacaaactgtcttattgttttcatggaaaaaaaaatacttaaaaaggcagtgagttcaatgtaatataatgtggtagcacacactaattacccaataagggtaattctaaatattcagttctgatccggatcggatccaatcgggtttgggttggcttgggtaaaaagtttcaggtcctaaaaatatccaaaataaatagaaacaagtatactttatgtagatagtgggtacccaaacaaaaaaaacccattaaaatttgttatttttaataaagttaatcatatttgaatatattttactaaattttgacaaacataacaaataatttttaaatagtttagttgtttgggatatttaggtctaaaattaatttacatatttagatttataattataatcttagataattagattatattaagattaaatataattaatattttggatattaaatttatgtttgggtttttgggtagcctgtttaggtaacgagtaatccttggaccgactcggtatctacggattcactaaaattttatccaatgaggtaattacctaaaaccctaacctgtcctaacccaattttttcggttcgggcatcaggttgggtatcggatccggttgttttgcccaaccctaaatctggttaatgacggggtcaccctctattgaaggcgagatgtgatattggttaagcacccacaatcgctaatgatctttcatgttataatttccttctaaactgtttttagatcttgaacaaatattagttaacaaaataactaaaatagtaaaatttaatatccgttaaaattggaacaaataaaaaatagtgcattagaaaaacaatttggttttatgcaacttaaattaaaacaacaaaaaaacaattaattggtaaatgtgattgtcacattcaccaaattgaagattctgttttaaaggagagaaccaaaaaaataaaccatatacactcaaaaacctaaatatcattcacaagccttaccaaaaaaacaaccctattttagttgttacttagtaacaataatcaagtttctttttaccgttcatagagacaagctaactctatataagcagattaagtatgccaacaattctcattatctctcagaacaagtattgataaacaacaagtttctcgtatttccatatatataccttaaacaaaataataagatggcatgcatttcctttgcgtttaaggctttgtgcttctgtctctttttcattgttgttgcaagtcgctccaccgtcagaccaaaagttttcaacgtccaacgccatggtgctaaaccagacggaaaaactgataacgccaatgtatgtaaacaaatattttcctatttttatttttaccaccaataagttttaagataaaaacatttgaatattattcacacacctataaacatatatgatcaccaatatacaaacacgaaacataaatacaatttttctaatatttgtttatttattttgtttagtaattaaccagtgtcattcttaacgcatatgaaattaggcattcacgagtatatggagccgtgcttgcaaaaggataagtggaagtagtaaaatttatgtaccaaaaggaacattttacctcggtggtgtagagtttgtgggtctatgcaaaaatcctattgaattcatcatcgatggaactttattagctcctgcaaatccaagcgacattaagcaagacacgtggatcaactttaggtacatcaacaatctttctatctctggttctggtacacttgacggccaaggaaaacagtcttggccacacaatgactgccacacaaaccccaattgtcctaaactagctatggtaagatttttcatcgagttttcacttatattattattatttacatttaaagcgtattacaaaatgtttgatatgatacttatacaataataaaaagtgatattcaatcattatttatcatacataacttattaaattatcttgtcttttttttgttttttatttgagaaagtaacaagtcgtttaataaacttgaaatgttttatagactatgggatttgcattcgtgaacaactcaaatatcaaagacataacatctctcaatagcaaaatgggacatttcaacttcttctccgtccatcactttaacattaccggtgtcactataacagctcccggcgatagtcccaacaccgacggtatcaagatgggttcatgtagtaacattcaaatctctgacacaaacatcggtacaggagacgattgtattgcaattctctctggaaccactaacctcaatatctctaacgtcaattgtggtcctggacatgggattagtgttggaagtttaggaaaaaacaaagatgagaaagacgcgaaggacttaatagtaagagacgtcattttcaacggtacaagcgatggtattcggatcaaaacttgggaatcttcagcttcgaagatcctcgtttcgaacttcgtgtacgagaatattcagatgattgatgttggaaaaccaatcaacattgatcagaagtattgtcctcacccaccttgtgaacatgaaagaaaggttaacctcctatgcgaaaacaagctccattttattttattttattttatcacaaaaacaaaaaaactaaagacaacttgtttttacttttttccagggagagtctcacgttcaaatccaaaacctcaagttaaagaacatatatggaacatcgaagaacaaagtagcaatgaatctgcaatgtagcaaaatctttccatgcaaaaatgtggagctaattgacattaatataaaacagaatggagtcaaagatggttcttccacttcggtgtgcgagaatgttgatggttttgctcgcggtaaaatgtttcctcaacattgtctaaattaattcgacggtccatcaaaacaatgacgatattttgtatatgttatttttatttactaaataattgcttaagtgtatatatggcttatgttttttttttatagccaaaaattccaaaccatatcgtaaatatgtatatatatgctttttgataagtttacatcaatattctacaataaattgcattttctgaatttattagtgtataaacatggattaacaattggatataaagagctaagaaatccaatcccattggtgtacactccgctttgtgttgcattttttggaaaaccgttttttgtgaaaaaaaattatatttatacaaaaaagtagaaataagtataatgcattttttttctttttcttaaatagtctttgtttaaatataatttggcttcatctgttccatataacttgaaccgagttcttgaagtaaaagaactgatttgtgattcttctggtgatcagaacaacaactgaacaaactgtcttattgttttcaaagaaaaaaaatatactaaaaaaggcagtgagttcaatgtaatataatgtggtagcacacactaataaccagaaaaaagattcttgaatgtggtagtgatcgttcagagaagagagaaaagtatattagtttttttttacttgtcaccaattcacaatgattaaagctccagactaaccgattctgtgattttatcattcctttattcaatcatgacaatcattagatcattacacatcttatacactttcttatattcatcacattaaaacacctctactggattcaaaggtacttacatcttctttgtagattatggagagaaagacgattgtcctcgtcaatttctctgtatactgtagggataaacatgcaaacataaaaagtcatggctctaccaaaatcgtaagctttagcttattttctttcaaacataaacagttgctaaatcagctaaacttagatgtcacttgcacatgatgtcagtgaaaagatggaggtgaatccatgcatagatgcaccggcttcctctgatacaacgatagctttcaggaattgccatcacatcttcattcttttaatcaatgttctaacactctgctcgagtttctcggcaagccataataaaaatagctgcagtctcagacctctcatctagccatatatatatatatatatatataatttattaattataatactaatgagaccatatatatataaaaaattatgactttattattttgtcaatatttttttttaaaaatgttatagtgggtcgtcccaagtgggcttaagcctaattcatatacaaatccaccgttacaaaatagaacgaaattaggtcaaattttatgatgtactgattcattttttttttttggtcgtttataagtgttcatttttagttataggctccgattggtaaccacttttgaggtaaatgaatgagtaggaaagtcgtgttcctctttgttcttcagtttttttaccaattgcaaggtatttttgttccattttcagatatgtgggtcctacatttttcctcatcattcctaaaaaaaaaatgataaaacaaaattctttcaccccaaaattgtaaaagaaccaagaggaacaaaaaaataaaattcgtttttatttattaaataaatttaaaatagattttatgataatatttatatttctatatataatattttccatatctttagtatatattgatatataaatttttttttatcaagctttcaatttaatgaatgttataaatttattttaaattagtataaataaatgttttaaagtgaaacttattttaaatttgtaatataatttaattttttattataaaataaataaatgttttgaagagaaatttataatataatttattttaaatttatgcagaactttaattttaaatgaaattaataaacaaaattcaaataaatgattttttactaattattatgttaaatactattaattcacctttttgattactattacaataatcattttgttcaattcctatgttactcttggttcctacttattgttattttcctttttttcttattttcttttattctctttcattcatattcctattgttctttttgttatcaccaatcagagccagttcaaattaattttgtcaaaaccttagaattcacaaaaaaaaattaccaatcagagagaaccgttttgatactttgatttatcaaaatagtagtaagtgggattaattactctattttatttattgtagaaatgctaaagacatatctattaagaaagaaaaaaatcaaggcttagtcgtcatcactaaagtaagaagtcaaagtttggttctacgagacacatcacatatatattcgattcccaatttatagccaaccaaagaagactcggtcctaaacgaaccagaataaggcaacacaaaaagtactaaaacatgacgtgagcaaagacgttagattcgcctccattaattcatctgatcttcttccactgtcttcttcaacgtgcacacgtgtctgtgtatatatatcttgaatgtctgaatctggaagaacaattcaagaccgcgtacaaaactaaatccaatccagacaagaaaccgtcgttgttttgtctgatcacataacacatttcagtttatagatctgcagaatttgttttttgtatttttgttctgttttcttttgattttcttcttcatcctgtaaaacctagaattttgtttcttcaaccaaaaatgaacagagaagtctctgagagaattcatattttgttcttccccttcatggctcaaggccacatgattccaattttggacatggccaagcttttctcgaggagaggagccaagtcaacccttctcacaaccccaatcaacgctaagatcttcgagaaacctattgaagcattcaaaaatcaaaaccctgatctcgaaatcggaatcaagatcttcaatttcccttgtgtagagcttggattgcctgaaggatgcgagaacgctgactttatcaactcataccaaaaatctgactcaggtgacttgttcttgaagtttcttttctctaccaagtatatgaaacaacagttggagagtttcattgaaacaaccaaaccaagtgctcttgttgccgatatgttcttcccttgggcgacagaatctgctgagaagctcggtgtaccaagacttgtgttccacggtacatctttcttttctttgtgttgttcgtataacatgaggattcataagccacacaagaaagtcgctacgagttctactccttttgtaatccctggtctcccaggagacatagttattacagaagaccaagccaatgttgccaaagaagaaacgccaatgggaaagtttatgaaagaggttagggaatcagagaccaatagctttggtgtattggttaatagcttctacgagctggaatcagcttatgctgatttttatcgtagttttgtggcgaaaagagcttggcatatcggtccgctttcgctatctaacagagagttaggagagaaagccagaagagggaaaaaggctaacattgatgagcaagaatgcctaaaatggctggactctaagacacctggttcagtagtttacttgtcctttgggagcggaactaatttcaccaacgaccagctgttagagatcgcttttggtcttgaaggttctggacaaagtttcatctgggtggttaggaaaaatgaaaaccaaggtaaattgtttctccccagccattattaaccaacatagtaatgttaatatttgtgtatatattcgtattgccaaatatgctctgataccatggcaagtaatagattggctcatgtattttatttgtgatcatgtagaattttcttaacagttatgacttggtgttggtatggttgggacaggtgacaatgaagagtggttgcctgaagggtttaaagagaggacaacagggaaagggctaataatacctggatgggcgccgcaagtgctgatacttgaccataaagcaattggaggatttgtgactcattgcggatggaactcggctatagagggcattgccgcggggctgcctatggtaacatggccaatgggggcagaacagttctacaatgagaagctattgacaaaagtgttgagaataggagtgaacgttggagctaccgagttggtgaaaaaaggaaagttgattagtagagcacaagtggagaaggcagtaagggaagtgattggtggtgagaaggcagaggaaaggcggctatgggctaagaagctgggcgagatggctaaagccgctgtggaagaaggagggtcctcttataatgatgtgaacaagtttatggaagagctgaatggtagaaagtagaggaagagaatatgtttaatgttctgagatagattattgactttgtgttcctctttggagttgttctttatgtcatcttagcttttgctactgtttagtaagagaaagtccattgtgtgtttctatataataaagaatagacctgaagataggcattttcaagtttctgctttaagataccaaatcttcgttgtgcatactttttacttcttgtgatcttactatgtgatttatatggcatggattatataggtcggattttctttgaattttaagtatataaatttgaagtaacaaagtatgtgtagtaatgatgcgatgaaaaattggtaatgaatctagggcctaaactagtatagtttcaggtttattccaccaaactcttagcgtatgtcacttggatccaccaaacttgatccaagcgttttacaaaattgtataccgagctaaaaataaaacattctttgttgtttccacaaaccttattttctaacatagcctacatgtctttctccttaagcactcattcttttggcctctcgactctttgaaaatctctcacattaagacttaatgttacccaaacctaattaaactactcgagaaccccatgttcgtgtccatgagaattctcactcaagtcttccctttagccacttacaaaactacttgtagaactatggctatgaatgatgacataactcgcacccaaaaccgcatcgtaacagtgttgtaatagtatcaaaatctttacatatacatatatatctatgtatttttgttactatttaaaccgcaccgcacttctcccacaccacaaaacgcagtcactattcggacaatatgttttaaaaacgctattttgccattccccataggctcatggctttaaatgcaaagccttcgaaatttatggctcatagcttgcacaatactcatcgctaagtgagaagtcaaagtttgcttctacgagaaacagaacacatgtgctgactcgattcccggtttgtagccaaccaaagatgacgaaccagaatacggcaacacaaaagtaaaatatgacgtatgcaaacacgtaagtgatcttcgttaattaattttttatctgatcttcctccactgtcttcttttaagtgcacacgtgcgtgtatatatctcgatatggccgaaactggaagaaacaattcagacaaagtcccaagctaagaaaagagactctctttgttttgtctggcagaatattttccattcttgttctgttttcttttcatttttcttcttaatcctaaaaccaaacatgaacagagagcaaattcatattttgttcttccccttcatggctcatggccacatgattccactcttagacatggccaagcttttcgctagaagaggagccaaatcaactctcctcacaaccccaataaatgctaagatcttggagaaacccattgaagcattcaaagttcaaaatcctgatctcgaaatcggaatcaagatcctcaatttcccttgtgtagagcttggattgccagaaggatgcgagaaccgtgacttcattaactcataccaaaaatctgactcatttgacttgttcttgaagtttcttttctctaccaagtatatgaaacagcagttggagagtttcattgaaacaaccaaaccgagtgctcttgtagccgatatgttcttcccttgggcaacagaatccgcggagaagatcggtgttccaagacttgtgttccacggcacatcatcctttgccttgtgttgttcgtataacatgaggattcataagccacacaagaaagtcgcttcgagttctactccatttgtaatccctggtctccctggagacatagttattacagaagaccaagccaatgtcaccaacgaagaaactccattcggaaagttttggaaagaagtcagggaatcagagaccagtagctttggtgttttggtgaatagcttctacgagctggaatcatcttatgctgatttttaccgtagttttgtggcgaaaaaagcgtggcatataggtccactttcactatccaacagagggattgcagagaaagccggaagagggaaaaaggcaaacattgatgagcaagaatgcctcaaatggcttgactctaagacacctggctcagtagtttacttgtcctttggtagcggaaccggcttacccaacgaacagctgttagagattgctttcggccttgaaggctctggacaaaatttcatttgggtggttagcaaaaatgaaaaccaaggtaatttttttcctccttaaccattattaatcaatgtagtctttattagtatatttccaaaaatattaacatttgtgtatacattttcctattgccaaatatgctatgatgccatagcaatgagtagattggtttgtgtactttatatattactttgtagaacttctaacaattatgacttggtgttggtgtagttgggacaggtgaaaatgaagattggttgcctaaagggtttgaagagaggaataaaggaaaagggctgataatacgcggatgggccccgcaagtgctgatacttgaccacaaagcaatcggaggatttgtgacgcattgcggatggaactcgactttggagggcattgccgcagggctgcctatggtgacttggccgatgggggcagaacagttctacaacgagaagttattgacaaaagtgttgagaataggagtgaacgttggagctaccgagttggtgaaaaaaggaaagttgattagtagagcacaagtggagaaggcagtaagggaagtgattggtggtgagaaggcagaggaaaggcggctaagggctaaggagctgggcgagatggctaaagccgctgtggaagaaggagggtcttcttataatgatgtgaacaagtttatggaagagctgaatggtagaaagtagaaagatagagcatgtttaatgttgtgagatggattgttaacttttcttaatctttgatgttcgtggtgtgttcttatataattaataaagatctaataagccaatagtctatactgaaatacatttatttggtatatatatcatctatggcaaatttaagtatatgcgtttaaacagaaattgcatcaagtagaaaggctacctgttactttaacataatcttgtgctaggtagttgtggaattttcaggacaattaaaaggctatgggtttgtgcaatatgaaactgaagaatctgcttggaaagctatgagtaaattgatcggcatgttgttaaatgacaagcaagtgtatgttggacctttcctaagaggcaagaaagggattctattggtagcaaaacaatattcaccaacgtgtatgtgaagaatcttgttgaatcaactactgatgatgatttgaagaacacttttggtgagtttcgtaagataacaagggctttgggtttgttaactttgaaaatgctgatgctgcttctaaggctgtggagtctctcaagggaaacacgtttgatgataagcaatgggttgttgatagagctcagaagaagtctgaaagggaaatggaactaaaggttccgtatgagcagagtttgaaggaaattgctgacaagtttcaaagttataacttgtatgttaagaatttagatgaggagaaactcaaagagctctttacaccttatggcactgttacgtccaaaattcccttctctgctaatctaaattgtactatattctgttggtggcatatataaatcccctttcctaaaacataacaggtgatgcagaattctaatggcataagcaggggctcgggttttgtagctttttcaactcaaaagcagccaaagatgtaagccatttgtaatgttttactgagtttgtacatgattagtagtgataactcttcagcgttactatcagtggaatctgtaaagatgtcatagatgagtggtaaaatgattgaaaacaaatacatctattttttctattcactgtttccaattctgtttgtgtaatagtggataaattatgaaagaatgcccacatatatacccttaactgttgtacattctataatctaatatttagatgataccttttggaactttatatgttcctgtgaactttatagtggtgaaattttcatgtaacaatgggtacctgcaccacaatgtcaacaagctcagttttcccaaatgagatcagttgcaatgccaccatctgttggtcctcgtatgccaatctatccccttggtagtcctggaattagaaaatcaatgttttatggttaactttttttttaattttcttttccgtaggattctttgacatggtttgtgattctcctccacctccaaacttaatacgttttgtttgaaaattgattttatattttcatttttggtttgtttagacgttaaccatgtgttatcagtaagaacatgatcatgtatgctcatctgaaaaatgattttttttgataaatggcccatagagataaaatggctcaaagcggataaatcttaacaatgaaacaagtaagtggcaagaaaatgaaattgtagaaaaattctaagattaagcaagaagagacatgaatctttaaagacgaagaagctaagtctcgaaaaaggtaattgatgaaccactttttcttgcaatgtggaaagcttttgaacaacatttctaaagtcaatggagagtttggatgtcttcttgaaacaagtatcatatcttaataagtctttatgctaagatctctaaggaagagcatgccatatagttttcaaactctttaccaaagcagaatgatcaaatcaaagatgcaatgaaataaaggagccaatacaaggttgttggatatttctctatgcattggtcaagtaaagctaacaaataatggtctatttgattgttacaaataaaaaataaatctaccaaagagaaattattttgtaggcttgttgcatagaaaattggaaatttttttgctagctacacgaaatatcaaaaaatacatggtcacacatgccaactatactattatatcctcagctacacgaaatagatgtattgcatgaccacatgtctaaactatacgacgtcatgtagttaacatcatagacatacaattccggtataccaatggattgactccggtgaaaaccaatgttgactagcaaaaatattaagaaaaaatatttgtttatgtttttaattttaaaacaaaaataatcaaaaaacacattctacattttgcatatacattttaatttattaattcttataatatttagtttttcattttcaaaattaaactaaaagtgtaataattttttttaataaattttaatgagataaaaatttaaattaaaacctcaaaatcttattaggatcatttaagtaaggaaactgcttattcaaattgtcaattaaaaaaaatactaactttttggtttggtttatttatatacaaaaattttgttgttatgtaattttccaacctcaaaaattatgttctacaataaaaatcattagaatcaaacccaatacaataagattttcctgcttttaatttaaatattattatcttaaaaatttatgaattatttttattacacttaaaatttagttttgaaattgaaaaactaactattataagaattaatgcattaagtgtttttgattatacaacaccaaataaaattactttttattttaattttaatattaaaaataaatataatttttttttctattattttggttggtcaattccgatcaacactgatcttcgctagagtaaatttatgagtgtaccgaaattgcatgtctatagtattaactatatgatgtcataattcaaatatctggtcatgaaatatatctacttcgtatagatgaggatacaataatatacttgacatcatcatgtattctctgatacttcgtatagttaataaattcttttctagatattttttttttttcactgaattatattatattgatgattagaaagttgattggaacctttacaaaagaaaaacaacagcttacagaaaggtacacctatatgcaccgatcaccaaaaaattgtgattggaaacagtccaatatcaacaagagaagagtaaggtctaggtagagattctctctctctcaaagagctgagaaagccaacgtggaggaccggaagcgacgtacgactgaaatctgtaccacactttgagctataagagaagctcccctattggaaaccactttttcttccactaccttccactcttcaaccttgtccaaaaaataagttagttctccaacattatatgcaagagagggccacgctttcggcctagtaaaagcagacaacaagtctcctggctcaaaagcgaacaacacccttgaaactctatggctacgcatactatcaatagcccaaaaaatacatcgcaggctggcttcttttttgttagaacacccattaaaagcccttctactatgtaaaatgacagacccatgttcatctctgagaacccaagctccaccacaaacctttttcttcccagaccaggctgaaccaatgttacatttcacccaaccttcaggtggcggttcccagctgtgagtaaaaggtatcactctctgtccctcctcagattcagagacacgaatctgtgattgtgcctgaaaccattctagagtatcttcttgaatcttgacaatggaattcaaaggacagaaagtgatgccatcaaaaaacagcttgtttctgttcttccataatctccaaagcacccaaggccaagacctctttaccaaatctggaaccaaaatcatctttttcagctcaaagaggaactgaatatttgcaaagattgacgcattttgaaatccaaactccggagtaggaacgcctgataaagcccatacttgtcttgccatagaacaagtgaataggacatgatttgtagactctccctcgtcgccgcaaatttggcatcttgggtcaatggacatgcctcttctaatgatttggtccgccacaggcagagctgcacttaaaattctccagagaaacatttttatttttggagaggatttagtggaccaaacctgttccttaaggccgttggttgacggaaggagattagcctgctggattagatcgagcttattggattggaaggctagccaataacccgatttcacagagtactccccagtctttgcgtgaagccaaacccagaaatcatccatgttcaccaccgggtttcttttggttattagctcaacgtcagtcgggtaaaacaattcctccagtaagtccctcttccagcaacgatcttcaaaattaatgaggtcattgacttttaaatccaggttgacagaaaaatgcctctgaaggggaagtcttggtgcaatgtcaaaaatccaagggtccatccaaacatttaaggattttccattgcccacttcttttcttaaccctttagctaataattctctgccaaacaaaatgctgcaacaagcatatgatggccggactcccaaatctgcttctagaaactcttcatcatcaaagtatcgacttttaaagaatcttgcgaagagaaaagaaggatattgaagtattctccagctttgctttgccagcagagcctggttgaagctttctatgtctctaaaaccaaggcctccactctctttggcaagacacaatttctcccagctaacccaatgggtcttcctcttgtgttctaaggcattccaccagaaatctgacattgcacttgtgagattcttgcaggtagtctttgtcagtttaaaacacgacatcgcatagacttgcattgccatagccactgcttttagcaaaatttccttacccccaagtgacagagtcctagcaaaccaacccgacaacctggatttgagtttatctttgatgtagtctaagatctgtattttagagccgctaaaacactcagggagtcccaaataggttcctggcccccttcattagtgatgccaagctcatcttgaatccaacccttacaatctgatcccaccaaagcaccaaaagtaatgctagatttctcgtagtttattctttgacccgtagcatcaccatagactttgaagatgttcttaagaactgagacttcttccttctcagctttacacataaacaagctgtcatcagcaaacaacaaatgatgtatggcaggaccagttggagagaaacgaataccactaaggagaccttaactttctgctctattcataaggtgtgtgagaccctccgagcacagaacaaacagaaagggagatagtgggtctccttgccttagccctctagatggagtgatattcccatatgccttgtcattgattaaaactgagtaagatactgaagaaatcatgaacatgatccactgaacccacctagaatgaaaaccaagagcaacgagcaaggctttaacatagttccactctacccgatcaaatgccttagacatatcagatttaatggcaatgaaatccttagagattgtcttgtgtgttctcagaccatgcaccacctcatgagcaataagtatattatcagatatcagcctttccgccacaaacgctgattgattaggagaaaccaattcagggaggaaaggttgcagcctcctaatcattatcttcgaaatgatcttatacattactgaacataaacttattggtcttaggtcagtcatcttatctggtttcttctttttgggcagcaaacacaaatgagtgaaattccattccctgggaaaggaaccattgagaaagaacttttgaacctcttgagtgacttggagtccaatgattgtccagtacttctgaaagaagaaaccatctgcaacctcttgagtgacttggagtccaatgattgtccagaacttttgaacctcttgagtgacttggagtccaatgattgtccagtaaaaccgtctgcccccggggcacttgagcttcttattgcgaagaccgcatctctaacttcattcttagagacagtggcggtgaggaccctgttcataacctctgttacccttggctgaaaaccggcaaacaagtcagcaaaattacttccctctgaagacttgaagagatccttgaagtaggattcagcaatagccccttttgacacttcatctttgtgcacataactggtcaatgtgttgtttacctctgttgtctttaactgaagcatggaagaaagaagtgtttttatctcccccatgcatccatttggctctactcttctgactccagaaggtttcttcatcttggttagccttgcaaagatcatttttcagagtaaaaaccaccttagacctgggaaaacctgaagattgttccagctctaaagctgctctagcttgagaaatacaagttaaagagttgctgttattctcctgcttccaacgacttagagctgatctgcactttttcaatctttccaaaacctgcatgcccccgaccctttgatttccattccaggcctgctgaattgcctctttaaccaggggttggttgaacaaccttttgtcaaacctgaaattacctttgtactcttccttggtctttgataacctcaccaagactggcctacgatcagagcctctcttatccagaaactcctgattagaaactggaaaatgccgaaaccagtttttgttgccaaagcatctatccaaacggcactgaatccacaagctgtttcttttccctccccacgagaatggattacccttacttggaagctccaacatatcacagcattccaacatgtctttgaaagagataaaagatgagtccccacgccttgggcctcctcttttctccccattgtgaagaataacgttaaaatcccctaacatgcaccaaggttcttttctgttgagtccaatctttgaaatcttttcccaaaccaaatgcttgttactaaaagccggatctccataaacacaggagacaaagaaatcataagagccaaattgtatttgaaaatcaataaggttcttatccgcatatcttacatcgatatttacacccttcttccaaaacagagctaaacccccactgagaccaaccgggttcactgtgtacacacgatcataaccgagccattcttgaagatctactactacattactacaattcttggtttccatcaaaaacaacacctcaggaaaatgagaacgtctcatctccatgagtctaggaatcgtcaattcatgagaccgtcccaagccttgacaattccaactaataagactcattaggcgttggacggtccctcaattgggaccaccattgttgagctgagcttgatgaattttgcagtgctcgtgcccaaatcaactgcttttctcttgtctttggaacttgaagctgaacccttccctatcttctgatcagcaacattgtaatgtggatctctcggttttggtttccttgcatgttttgggggcctgtttctctgctttgcttttttctgaaaagtcccagtagagcctgtctcaaagagaccagggctataaaccgttggactatcagtaaaaggctgagagagagcaaggaaactacctccttcattgagcacaaaaggcttcaccggttccctgagccaacttgtgtttctttcaggctgagagtcttctatcctctcaggagacgagttgaggttgattctgccactttgactcgaagaaccttcttgatcaaagctaaagaccacacctttttcctttgacagatcatggtgaacaattggaagagattccaatcgcagaactgttttttgagtaaaagggtccttttctgcttcactaactgattgaataactctatccactcttacagatcgttcttcagcatttgcgacccgaaggtattgacgcataccttctaacacttccggagcaattctcggccttcccgtgtttggatccactcccacctggctttctttcaacacaccaaataaagggtctgattccttcagaatcggaggagtagtagcttttggaatgataatgcctttccttctggctgtagctaggtcctgtctagcttttactaggatagggcaaacatctttttcgtgcgtaagccgttgacactcataacacctcttctgaatcctctcataatgaaagttaacagtcgctgaccctccatttctgaaattcacaacttttgatctccttaagggtcttgagacatcaaacagcaccttcactctaacgaactcccgaatttgtttcaattctgggttaaagacgacttctttaacttcaccaatgagatcacccagcttagtgatcgccttggccgtgttgtaattgactgggatattccaaatttgaacccacagtagcatgtaacgaagatagtcatccggaggattttcataccacctatctaccacgattgaccaatcattgaaggtatgaactcctttcgctagcacttcctctaaatcatgttcagagtcgaaaatgaactggaatctctcattattgagagctattcctttgacctttccttctttctgccacttccttggcatatttcttaagagattcttcatcggttgacaagccgggttcaggacccttccaatgagactgaatttgtttctctcactagacagatactcaggaagatctggcatttcaaacggttcttccttttcttccaacgacatctccatcaatgccctatccatggcggatgacatcttcaagctaagaggaaaacagacaccgtagaactaagactatcgagctgaactaactccaccaacttcttcagaaaaaacagagatatggaacccagatctgagaaaacgaaagcagtagagcatggctgagaggatatgataatgaacacgaagggttagaatagttaatttcggctgaaaagaaagatggtttccggtcaaaagctttattttaaacctagtgaaagacactaaaagagaaagagggttctaagcccaaaagatagatttctaaaaaataatcacttgttaggattggatacttcgacgtcaactgctaacgacatgatatacagttattgaaaattggtaattatgaagttaaagaagtctaaacatctcaattgaaaaatctcaaattattcttacggtgacagttgtctttagtatgaagttattaccatagctagagcctaaaggacagcaccaagaccaccactaagacaagtgacgtcctgcaaaatctaacacttaaataaaattgtcagagaagattatttagcaccaaacttttattctattaatttccaaaagaaaaaaaaaaagtcatatctttccaaattttcattacataactaacattttgtcacatgaaatctgtacgtctctgaatcttctcttcttctccctcatccattgcttatgtgcttcttcttctgattaccaaattttcattcctcttcttctttctgataaaaaagtttgcattttttttctttgttgtgataatcgaaaaagagactaaaacctaagaatcgtgcagaggagaggataccacaccacacccagaaattgaaactaccaaaaagtttatgaatttgatttcaatttcaactttttatgagacccatttgattctttagggattttgaaggtaccatttgtctcaatcttataaaaaatttcacctttttttttttttttttgttaccactatgtgtctttaatctgtgttcattgttcagatcgttgtgaaatttggttcgtgattcgttgcattgcaatagctagacggatcgggattgacccactttaggtttctcatctcaaagattgcgaaattttctaatttggcatcggattgtttggatttgattgcttatgtaagtaacttgatttggttggtaacttggtattgcaatcagaaaatgtgctattcagtgttcctttgtgattaggtaattaagtatattagaaccgcatggtctttgttctcaatgctagtttagttgttttggtttcatgaagtagaagaagttttgacaatatttactctctgttgtgttaaaaattagcatagctttatgtaacatgtaccttgttttctctgtactttcatcttttgaatggattctatgttaaagaatccattgatgaagtttacaagtggtagtttgttacttgcttatatgttagttattacactagtttgacaaggttttggtacttacttgctcaattgctacactcacactgtgaaattcatgatttatacttatttcagttatgcaagaaacttttgattacataggaatgatgtttttgatatatgatagataatttgacatttattagtgaaagtttctgatcttgcctttttgtggtatcaattggaaacataatgcagaagctatagttggagcatgagtgtagcctgaagctagattgctggctggtatgtggtgatcgtaatggtaaatagggtgcgcttatttcagttttttaattttccctcattcatggatttcttatgcatatttattttcttgtttgtttctgtttgtgtgactctaggtctcctcaaagttcttttaacttttgttctatttactggagagtccttgtgttctagtttaaggtatgaatccaatgcaagggccacgcagtattggtggttcgtctactgaagtgaatcaagtagatggtgaatcgatttattgcacagagacgtctttgaataccatgttgaatccagcagacactggatttccaaacaatagtacaccttcaggacgaccaacttatgcaagttcgagttctcatgctgctcaagatcatacctggtggaggtttggggaatccagctccataccaggtccttctgatcaggtcaattccattggaataaagacaagtcaccagctgcctcaagatggtactcaccactttgttggctatggatctgagggaaggcaaacaggtctgaatggtatgatggtagatggaggggttcatgctggcagtcacatcaggaatgtgccgtctttcttgcgcggttcaagttctaatcctatgccacagcatgtagatatgagtatggacatggacagcgataattgtaatgcacagacttccggggtagttatccgtcataatagctatgggagttcattaggaagctcagttcaggccgctggggagagcagcagtggtcctgcttctccatttggtggttggggttcgtcttgcaaaagaaaggctcttgaaggatcccctagtcattatttttctggtgaaactcctaaccgcattgttcagactgaaaatagtgcttcgcatgcaagtctttctcaatatggtgcttcaagtagcttaagtttggctacaccttcacaaagttctccaaatgttactaatcattttggccggacagaacaaatgtttggatctggtggtggaagagcagttgcagccagtgcttttcattctacaagaaacactgacaccttatctagagctggcagacgattaaatcccaggcagcctcaagagtctgtagcattcagcgtatcacatggtgggacttctgtacgtcccactggttctttgcaacagaacttaccattaaactctccttttgtagatcctccagatgtgagatcatcatcaattactagtggctcaaacactggtgagaatcagacaaatatagtccacctcccagctttgaccaggaatatacaccaatatgcttgggatgcttctttcagttctagagccagtaatccttcgggtattgggatgcctgcagagcgattaggaccacagtgggaaacaccgagaagcaaccaagagcagcccttgtttgcacctgcaactgacatgagacagccggtgcatgatctttggaatttcgcacgtggaagccctggttcatctgtagattctctctttgttcctcgagcagggccgagttcagctattcatacgccacagcctaatcccacatggattcctcctcagaatgccccaccacataatccatcgagaacatcagaactttctccttggtctttatttcctagtattgaatctccatctgctagtcatggtggccctcttccattattacccgcaggcccttctgtttcctcaaatgaggtgacaatgccatctagttctaatagccgaagccatcgctcacggcatagaagatcaggtttgttattggagagacaaaatgaacttctccacttgcgtcacatagggaggagcttagctgctgacggtaatggaaggaatcaaatcatttctgaggtatgagttccataaaatacttgatcttgtatgataatttggtagatgctatatatgaatctttatagtatctttcactatcttttattatccaatggtttgatagaagaatcctaccctcataagcatctcatgttagagtaagtggggttaagagtgtgcatttatgggttgttgtcttggtttgtagtttactttttcgtctttttgttttgaagtttttctatatgagaactagagcagtttgatgcactctgatatgacttccatatgcaaaccatattgatgtcttacgttttgggaatgttcgttttcttaatctagtttttaacctccttagcagctgctacatgtatttagttttgatggacttctataagtgtttgaatagtgagttgcactttttactctatttgttgccagatacgtcaggtgttgcatgccatgagaagaggagaaaatctacgggttgaggtatgattttgaccctagtgattttcgacaatcctacctgttaatatcagttaatggatagaacacattccatttcctggtgaatctgttggcctgatgtgtgatcttccttttttcaatttgaaaaggattacatggtgttcgatccacttatctaccagggtatgactgacatgcatgataggcatcgggaaatgcggcttgatgtggacaacatgtcgtatgaggtatatatccttcttttttttttactgttaatcacaatcttcccgttttctaacaatgtgtgggaatgaatgtaggagctattggcacttggggaacgcataggtgatgtgagcactggcctaagtgaagaggtcattttgaaagcaatgaaacaacacaaacatacatcttcgtctccttcttctgttgagttgcatcagaacatagagccatgctgcatttgtcaggtatttgattaagtatgaactagaagttttttactcgtgtgatacttacctactaattgataagcataacataaagaaaagttggtattgctgagcttgcttccattattgataagcataagataaagccccaacacatgaactgatgtttaaaagctattgctgctgtttttgacaggaagagtatgtagaaggtgataatctaggaaccttgaaatgtggacatgaattccacaaggactgtatcaagcaatgggtcatgatcaagaatctctgccccatttgtaagaccgaagcattaaagacgccgtagtacgtctcatcttcgccgtgccttcgggctccattcatcatcattgcgacaccgaaaagaaaaaaataaaaatagtgatcttaaagttctgttatatccgtatatctcatatgagaattaattgttatgcttaactcaattgtgtcacactgttcaaagaacattatgacaatttcataaaaatttcatggagaagagaataattcccatttttactagaatcatttgtaactgttgatagctgatggtagatggataacaattaaaaggccttataattttgccaaagactattttgttgctgacacaacatttacaatggagccgtatatagtcctaagtgaaatctaatctacgaaatgtataacagaaactgttccttcgatttggtcagaaactgtggaatataaagatgctaaagaaagacaatttgaaacttgatccatagaaacaaaagtacaaaacggtcatggtttggttggctgcttaattatattaaatgggcttatgaaggaagagagggagaggcctttttctaaacggtctcgttttggttgttatgtaatgtcggaagtccgcttcaataaagaaaggaggttgtgtttatttattatgagaatgataaagatgattgtccccaaacctttggggacatccgataaaattgggacgatacagagaagattagcatggcttctgcgcaaggatgacacgtataagtcagagaaatgttataaaaaattttcaattcaaaatttccaaatcgatttttctgagctaatagttttattaaataatataaattttggatcccacagtatgaatctataacagttttgttatatatacattacaaataagatatgtattttaatgatttttcattgctttatttataatgaacacgatttataataaaaagaagaaacaaaaaatactgggtctagagttttcatcgtagcaataagcaaaaatgtagaatttgtgtaaaattagagcccaattcaaccggaactaaaggagatggatagcttaaattagactttttgaatatgagatgagatcatctaacttcaactatttcatatatatatatatatatatgtttgaatgtaaagcacattttgatcctctaaaaaaaaaaccataaattcctgcaattcatttctatcattttggatatgaagaactcttttcgattttcgttcaccgttataactaccttcatcatttgtgtactaggtttgtgtttacattaaaaattcattttaatatattagattagaattttataatatgaaaataaagtatttttcatttttaaaatagaaagtagaaactcatgctatttttaaaaaaatataacagtatctggcgcgatggtgaatggacaatgttcattccctcaaccggtaggaccaaatgggaaatgtgttcccaaagattgcaagtctttgtgtcacaagaagtataaaggaggcagtatatgtactactgggaaaccaaacatttgcatgtgcttggtttgcagacgacgctcaccagaagtataaaggaggcggtaggtgtactacaggaaaataaaacaagtgcatgcagatgctcttaatgaatgtgtataatacaactatataagtttacaatccaaattcaagttcacattatgatttatgcatgcatattattaataattaaattctcataatataatctaatattttctttggtatgttgcgcaatattttgtactagtggatcgttatcaaagtactactctctatgtggattcttttttttttttttttttttcttccgtcgaaacaccatttctattaagtaattggaaagatactcttttttagagagagccaatcaggaaccgacttgcttacatggaaaaaagactattgcgggctcgtgctttttttgaaaggcaatcggcccgcacattgtaaatacgagaaaagaacttaatactaaaagaagggaaaaaacagacaagggaactaaaagtcgccaactcagcaacaaaggtaggccactccgaaggattttcaagaagagagataaaatcagcactgtcagatgcgaaagagcaatccgagacacctaaggagatcatgcattccattgcccacaacaaggaatctacttcagcgtgtagtggtgatagactcttccgtgcactcttaaggcccaaaagtaggacgatgtcttggtctaccaagacccatccatgtccactcaaggtgtcctttagatgccaagatgcgtcaaactggcaaacattccgagtagggggaagattagcagggaccacctgaggaggagggtactccgtagccacctcctttgaatttgcttgtttccaaacatttgcttcttgaattgcaaaatccagaataacttgcggggattcaataacgttttcgaaaataaaccggttacgactcttccaaatataccaaagtatccatggaaagatctccataatatcttctgctatatcaaattcttttcctcgcgagagtaagaaatcaaaattatagaagagagaattccggggaaaaatgtactccgaagacgggataggggacaaggcccagatttgtctcgaaggcggacagagaaaaagaagatggtttatagactcttcctctgcaccacatcgagggcaaactttttcggtaccaatgtgacgggagaaaagtctttggtttgtcgctagacagcccgaaaggcattgccactcgaaatgtttaaatttacgcgtagttttaattttccatacttgtgcctgaagcgccgaaacactaggtccctgaaaagggaggtcacaagtaggacgagagagatctctcgcggcccaataaccggattttacagtataattcccagatttggtaaatgaccagctgaaatcatcacttttgtaagtacgactcggccgaattcctaaaatcaaaggaatatcggaagggtcaaccaactcttgaagtctacctaatttccattgctttgtcacgggatcaattaaatcattaacatagaggtgtgtgtcccttatgttaagaatactttttgcaggccttggtggaaaagaagggatccaagggtcttcccacactcgggttagcattccagatcctattgttctccttagacccgagagaaggagtggtttagcagccataatgcttctccatccaaacgaaggacgattagcctttccaatttgaataggatcactatacctaaagtaccttcccctcaacaccctgcttaggagagaatttggaaatctaattaggcgccaaagttgctttgctagtaacacaagattaaattcctccaacgttctaaacccgagaccaccatcagagaatggtgtacaaagcttgtcccaagctatccaatgaataccattactttcctcccttgtcttccaccagaaattagccacaacactacttagttttgagcggatagctttggggagaaggaaacacgacataacatatgtcggaagagcctgcgccacagacttgataagtatctctttgcctccttttagacaagaatttggacgtccatccatttattcttttttgaagtctatctcttacaaaggaaaaaacttgagtcttcgagccatgaatttgttttgggagtcccaaataagatcccatacccccatccttatgaatcccaagagatactttaatggtatttctgatagagttatccacctcatgaccgaacattaccgaggacttgtcgggattcaactgttgtcctgaagcctccccatataggcggagaatatcaataatctctttaccttgtaaagggtcagctttacagaaaaataggctatcatcagcaaaaagaagatgggatgttgatgggctagctctcgaaatctgaagtccttgaatgcggccatgccattctgcatctttcaactttgctacaagagcttctgtacacaagataaacagaaacggagagatagggtcgccctgacgaatacctctcgatggtttgataaaccctttaggtgatccatttaaaagaattttgtaagataccgaagagatgcagaaaattatccaatctacccatttctgagcgaaacccattttcaacattagagctcgcaagaaagaccattcaactcgatcataagccttgctcatatcagttttaatggccatgtatttcttcttgcaggctggatttgttcgaagggcatgaaaattttcttgagcgataagaatgttatcagtaatcaagcgctccgctacaaaggcagattgcgtctcggatattaattccggaagaagacgttttagacgagaacttagaactttggatataactttgtaactgacattgcaaagactgatagggcgaaattctgccattttcctaggtctttctgtttttgggatcaaacagatattggtctcattcagccgttcatcaaagaaaccggtggaatggaaattttggacaagtttaataagatcaggccccgtaaggtcccaatagtgctgataaaagaaagctgtcatcccatccggccctggagctttatcaggatttagcgaaaaaagagctcgcttgacttcctctggtgagatcacctttgtgagagatttattcatttcttcagtaattagcacggggacttcctggagagcggaatcaaaaacttgtgggtctgacgtggtaaaaagagtctcaaagtaattctctgcaagatgttcaactcccacctcattatccacccaaaggccatcttgatttagcaaacctagaattttattcctagccctcctttgcttgtggacgcatgaaaaaattttgtgttcatgtctccaagttggagccagatctccctactcttaagtttccaaaaaatctcctcgtctctgtacgcttggcagagcttccattttagggcaagaaggtcttcagtagagaaattctcatcttcatacgccaaatcaagttgggaatgtagctcaagaataagcttctccgtatttgttttgttggattttttccagatagatatagtttgtctacaatttttaatcttctgaaaaaacggaacaccctctcctcgagaggggaaagcccatccttcttggacggattccttaaaacctggtttatttatccatcgtttatcaaaaataaaatgtttataagggcgataaggtttgttttgtatggatgcaagtaggggtttatgatctgaacccctatgctgcaggtactccacattcgtgtgggaataaatactatgccattcttcatttcccatagctctatctaaccgacacttaatgaggtcacgtctctttcggcccgccactccacaacttcgttttccgacccaagaaaataaactccctgtagaggggaaatcaatcattccacagttttcaatcatacaacagaaagggaggaaagaggattcagatctcttttttcctcctcttttttcatgattaccgataatctcattaaaatcaccgatcataaaccatggctcagaccgaacaataccaatacgggtcaaacgtttccaaactaattcacggtattgaactaccggatcaccgtaaacaaaagtaataaatacgcggtttccatcaataattgtttcaatatcaatcaaacgatcacatacatagataaacttaaccgggtagtctcgagaataaaaaagagcaagaccaccactgttaccgataggttcaacagtttttaaacaatcaaagcctaatgaaacttgtacattctgaagatacacaagatcattcttagtttccgataaaaaaagaaaacctggagagtacatccgacacatctcttccagtcgacgggatgtagttttcggtcccaccccttgacagttccacgaaataagcctcatgttttgttgtcggaaggtgggatcccttccgaaacaacactcaaaaccggactcttagtcttggaagtagacggcactccatttcttttacccgtcgtggttctcctagaggatctcggcctagatgggccggatttgttggatagccttttctcgggagataaaccctaaatgtgatgaattttttttgaagccaagttcaaacaaaggcccgaatttagttgggcttttctggaatggggcacaactttcttctttgagtccttcctcctagggatagcaatagacggccccacctcctccgattgaagcgagctcacgatcaagctcttcaatttttccggctgaagctcagagatgggtgctacatggctccccggaatcaccaaaccggattgatcctgaagactctcctgaagctcctcactcaacaaatcgtcagcatccacatctaggtcgtcggcaagatggtaagcagcctcgtcttcttcagtccaatccaaatttagagcttccgagagcggattgagagactcattccactcatcctccggagcagcaggagatggaagaacagagagagatggagagacgacagatggacttgcgaaagagaccacctgcgagaatttggctgcaagtattgtatccggaccggactcaagacttctcgcagtagcttcatcttcttctacagtcatatcataccaactctttcgtttttccagttgtggctccagcgacttgcttgttacagagatgggcgtatcaaggttcttcggagccggttcagagggttcaaagttaagagatttcttagccgagctcccaacaacagaggattcacctagcaacggagtaggatgctccacaacctttcctttacctttctctaaagcggaagccttcttagagagatttaaccggaatggtctttccctgacataagtcggggaagaggttatctgtttagcccttgagggagccaagaccgtgtctgaaagcgtcaattgtgaatccgagaggagtggtgatgattgtttgttaggaggtgcagagcttttttccttggagaaagaatcaccaaaacgacgtttccttccgtcatcaacaccggcgtttctagtgacaacaggggaggctgggcgtttgtgggagacagcaccatgaggtcgattcagcttggaagcatgctcagcagggtactgattgagggaagcagggtaaggctgtcggtgggatcgattgcgaccagaccttgaagctaagttgttttcttcccttctgatgactccacgagagtgatatggtcttgaggaaggaggaccattcagcaagggtaagtgatttctctcagatctagaacggttagactctggaaaagattgtagaggaagtcgagcttgagaactatctccatctctaagagagagtcgaaggttacgttgagattcctcagctgagagaacagctttttgttctgcatcgagtaaaggacactgctctagttcgtgacaaatacggcgacaatacgagcaccagcgaaagagcttttcataagaaagtttcactttgacaactgttccagaggggagttgtgcattcttgttgaatcttagaggaacatctgctgtcacagagattagaattcttcctttagagggatcaactctccgaactaaaccaagagagttaccaaaatttcttaacacttcttcatcccaaaactcagcagggatgccttcagttctaacccaaaaagtcatgatgtttgggaaggaggttccaacatggggttcccatctctccaatgcgaaagaccacttgttgaagtgacaaggtctcttgttgagaactttttggaggtcaacttcagattcaaaaaagaattgaaatcgagcatctccgagagaaacgcctcggactcgaccctccacatcccatatgttttccttagggagaaaagagagaagggctttagtactgcgtcctccttggtggaacattctccccacgaggctgagatggagacgagcaaggagcgctgaattatccacttgagggagaatgacaacatcatcttcttcttcaggttcaaaagcaaaaggaggttgttttggaggggactctctgtaccagcttgggcgaattctcttcgacatggtaagcagaggagagatgtgtaataacacacacagacttagctaaaagctagaaacaagcaaaaactctgctattgcaggagaaacttcagaggagatgagagcctttctttgcattcacaaaagctcagcagaagaattcttgagagagagcagatgagaagcaaagtctgtggctaaaagaaacagagaagaaaaccatgaggggagaagagaaaaaggagactccggcaagaaaagagggaaaatttcccaaaatagctaaaaaaattagttcagatctactaattttgaacccatttgcctctttcagttatctcggagactgtgcctgaaagagaaaagagtcaagaaagaaagataacattttggtataatataatccgtctctctatgtggattcaaatattgtatttttgcgtttttcacaataatatgtcatgtggcgaaactgtaattatttagttagcaaatattgtcaaatatttagttagcaaatcatggtttttgttttaaatgacacaaaacagatgcaagtgtccagtatagtagtagtactgaaaagtatctatgcccacattcccacgtaaacttaacaactaacgctagttcaaagagaattttaatcaagctaaaccaaagtattttgtcggctgtgattgagaaaatggagtaaacgagataacacagatgtagttctctaactcttttttttttttttttcgtctgaatgattcatgatattaacaacaacttgttcacaattacaaagaggaaacgaaagcaatcaaactacagaaaatcattacaacaatgtaatggatttatcaatttcaagcaccttctgtagccaaaaggagtagcgtactgctacaaaagactgcgatcggtccgccattgtgacacctttagctaagaggaaaactccttggattgcacaacgatcttcaaacaaggtggaatacagatgccggcgagactttaacccccaaaaactaagccggcgggactctaacccccagaaactaaatcccaacatagggagacaagaaaagacataaaactaaaaagatctaaactttattgaaaggatatgacgcagagaaccaaatttcttactacccgagccaaccgagaacgcaaaacaagcaggaggtcgccgaaggagctgacaaccaacccaaaaaattccgatctactagcctcacttgataattaagagtcttcagaagaaaaaaccttgggataccttggatggcgggacggtagaatctcggcaaaaacatgcagagaccgtcggaatcgccggaccggatgtgtcaaccaatggacgtgaaccggtaaaggacccaaacttaggcggatcttgccctagatccatttgttgaagctgtgtgagaaaacctaaaaattaggtcgcccaaaccgaatcaccacacatcgacaatgagtggcttagagccaacgcggttagggccaaggaggactcaggcaaagaagaaacaagaacctgcaacaaaatttaagtaacaaaaatctagatctaaaaagagaaaaaagcagagaaggaatcaaaatgaaaccaatccacagatctctccacacaaagacatgaaactagataactaaacaaaaactgaaagaaccaaccgacgccgtgaccatggtggcccacacgcgccggtcggagacgaagaacacaagcagcggcgagttgaagagagaagggagaaaaataagagagagaaaaaaaaaaggtagttctctaactcttgagttatataattacattgtttagcacttatttacagttacttaccttaaaaaagttgttattttagaaaaaacgaaaaacgtaattttgatttagtatcttatattaaccttaagaaaaccacgtaaattcaactaaaatccattttcactcataaacggtaaataatatttcagattattgtatataaaacatgaaatatattctaatatgatattatttaatttctatactttaataaaatcaaaaattaaattaaattctatggattttttatttatgcataagtttattcaatttaatacggtgaaatttaaataagttaattactatatgagtttaatatactttgtgactagttagattgaaattactgaattaataactaaaatatgtcaatttgatagaagcaaaactaatacatgattttaaattttaaaataaataaatgtattatgctgatgtggcatatgacactattgctactaatgtgtcggaaagatgaagaaagtctaccaattattttttttacaaattccaagcccctattttatcgaaaaaggtaaattaatcaagtaaagcaaataatgtccgagtaagtagaaggacaactacataagtggaggaggattgtaagatataacaaaattaagatttgaaaccatattgaggacgacgacaaaggcttacctgaaccggatccgaaccaccaaagataccttctactcgtgaatttgactttctttgactccgatgaagatgatctttacagctctcaagatgagaggtgaagtaaacggtttaagggtggtgcagaagcatttgaaggtagagatgaatgtttctcctttggtggtggtgagactgaatgtataaagaaacaacaagacgaaccaaacacaaagacaaggtttgtagaaaactcaatgagtatataacttatattgattcgtgaatttaaaagtacaaagggagtgagctgctattgagctcttacaaacgttctaaacgattgagtaaagaaagaaagaggctcctttgtcctaatgaaagagtagagagcatatacaatgatactggcttattcccaacaagagaacaacacatacagtcaatgactcataaaacgctccgtctgacttatttccaattgctcgaaagtaacagaagtgaaatgcttgcaatgcagaatcatagcttccgcgaaaacattttgtcccaaggaaagagtagagagcatatacattaatactgagagcttcttaggcaaggagcttacattgcttgtccccagtgatagagaacgcttataaacagctcacaaacgcaccgtctgatcttatatgactctgagttaggctcctttaaaccgggctgatgagtttcctccctgtagcaggatcttcatgtatggcaacaacatcccttaacttgtcaaagagctgctccaagtgattcacgcccatatttgtgtaggccaatggccttttgtaccttagcttgtatatcgcttcgaaacaatccatctgtacctgacaacaatagctcaccaaaatgtcttgtagctcgaatttgaactcttctaggttcctctcgctctgaaccgagcctgtgtctgacatttcatcagaggagactcctccattggtagttaccccgttaggctcttttcctttcctctctcttctcagtagaaccacaggggaagaaggagagataatgttcggtttcgagttgcgcaggtaaacaaatctcttgttgcctttaccatcaactacaatcacatcactcatctttttgaacagatccacaagcttggccaccccataatccgatacaaaaagcggtttactgaatttccgttggtattcagaaggaacacgcataagaggaatacatccacctgaaagctctagcagcttcacgagctgccccttcaaaccgtttaaatctcccggcgctacccacatggtggactcaaggtgacctgaaggaggacatgccatagactcgcctgaattagatggccaacacgacattacaccgctactatactcattacgaaactgcgaaaccatcaaggaagaagactctcttggatcactactataacagttacctctatagagaatagtttcatcttcattcaaaccatccatgttactgttatcaccaatattacaccccataagatacggaacaacacgaggtttacatcgcggcacaaagccttcaccgtgaacaatactatgccaatcccaaacaaacttaccagcattagacaaagctgaattcacatacacactagaaggtataacaagaatcacagtatacccacgctgacccaatatatgaagcgcaggcgcgaaatcaacatcacccgatacgagaacgatagtcgcaggcggcttattatcaagcacaaacaagaacatatcaatcaaaatcgctttatccgacgcatctttcctaccatttggtacatcaataagcttcacaccggttctttgacaaccttctcgaacccgacgagggaaaccattgaaatccccgtaagccgagaagttaacaacgggaccggatatcacaggatgtaactgaatagccattcttatgttactagctacatcttcaggacgtacatcgctaggaacgggacaattctccatatcccagagaatggccataggaccatctgtagaagaatgtctttgtgttgcaatcatgtttaaatccgctaggtatttgattcttctttgttcatcggaatcaatagagactaaagttgttgctgctgatggattataataacttgacatagcgttttgtatcatcaaaggttcctggaaacggaaattaaacaaagagattcacatataaacaattagctacagatcagtgaagattatgaaaggaagttcgagaaattgcgatgtaggagaaagtagaatctattgatttcgtcatttcgaaaccaaattttaccagattcaggggagagataaggatctcgtagacgatacgaagacggaatttggaaaattcttcagattagttgttgattcttctcgatcttcttctccgacggattttgggaatttttagggttctacaaaagtttttgcgtttgtccagagaaagcatataaagagagagtcggtggtattaactagtttttattttgccaaaagaatatccaataataaatgttttgatctttttgaaagagaatagttgcatatatgtgaaaaaggataatccgatctgttacgtattgtaatgcttggggcaaatagatttttgcagaaaatgttttttttaaaagaaattcttttgaaaatatcaattttactaaaatctgatgaaaatattgattctaaacacttaaataaataaataaatatatatatatatatatatatatatatttaaatagaaaatattaaacgacatttttttctaaataacttagatatcaaaaaaatattaaacaatttttttattttattttttatgtaaatcgattaaaatatgatacatattctaacagaaaccgaaataaatagtcataaaattttaacgaataataaactctttacctgaattatctaaatctgaataaatccaaaccaaatccaaacaaaaattcgaatatctacgcttagatagcagtatgtttttttggcctggtcaacacattcttattttttaaactgttggttagcgtttatttcatgtataaaatggtcatatgtgaagttgatggttaaaatggatataatttgaaaattggaatattaaatgacatttttcccgtttttgctataatcaaaatgacatcgtattggaaactaatgaagattagttaacggttgttatcaatctgttaacgtcagataacgtcgtgtgaattttaacctggtcaacgattaatttgtgtaaaataattaattaacgatttttacatatattaattgattatatacaaaatttatatattaaatagctatttttttaaaattcatatattaaacgatatttttcccattttatatagtcaaaatagacaaatattgtttactcttgctcgtattttttattttatttttactgaaaaacctttattgaatgtcacacaaaatattataaacataaaccgacgagaatgaataagggacatgagtcggtggaaacgaattccccagaaactaaaccggctggattgagtctcgtggaaacgaaaaccaaactaaatcagtacttctatcaaacttcttcttttcgtctaatgaaatccgaggaccgaaggttcataggtggaattgacaaattcttaaaggcaacaacagtagtaactataaaaacaagttcaaagaaaagaaaatatagaacactaaaatcatcaataagaagaaggaatatttatgtattcacaatacttcctgagctatctttccacaaacccaacagttatattcacagagaataaaagaagaaacaaagacatcaaccatatcgcaatggagcgatgatgataatcttccaacaatatttttaatcaaagtggtagtgagagttctcatcaacgattgttaccttcttcatgagttcaagactctttcaatggcggaaatatagaactctttaggcattgtacccatgattgactctcgtttctccccgttcttgaagagcagaactaccggcacagcctttatctcgtactcttcagccaccggcaagtcattgtctgcattaaggagatagcagtttagttttccagcatagtcccctgctatttcgtctattatcctgtggaccatccgacatggaccgcaccaactcgtgtagaattctactaacaccggggtttcgctttttagaactgagtcttcccatgatcgttgtgtaacttcagctgctgctcatagagaaaatgagacgtgatggaggatttcaaaactcaaatattctaataatcgaaccaacaagacaatctcaaagaactggaagtagtgtcctatgtaactgaaaatgttgaaatacttcaacatgacaacctaagcatctcattttacattatttttggttttgtaataaacaatggaagtagaccaagttgtatcaacaagtcatacaatcagaaggtaacccaaagttacaaattaatttatgaaaagatatgaaagtgggaatcaaaagcatttggaaccacactggctcacatgttaagcttaaagaaattttcacgtttatgctagaaacaagatttggtctcagcttttggcaaagtgagatttgaatctcacattttgacaattatgccaaaatctgactattttacctttaccagcgttacgacatactgttctgtatacggttcagttatgcggttcagttaagtatactgttccggcatacgaatttgtgtccgtacacaaggcagaagaccatgttttaatgtatatatagacactagtagttacaattcatgcctacttataaactatgagttctaaggcactttcgaccaaacctaacatagcttcaaaactagattagcagaaaagcagctaaacctacatatatgatctcgatcataagaaaatgaaaacaggtttttcataaagttaccaaaaaaaactaaagtttaagtttcattcccaaatttgaccacacaagtatttatcattcttaaaccagaactaaagataggcaatcaatgaaagtaaatcagtatatgtacctcgagaatcacgaacgcatagaggagaaagacggaggcgagaggcggaggaagataggagagatcgtctgtcggagaaacggagagagcgaggggagaagctggtgactgggaagagacgcgacggagatgaaatatgtcgagctgtgtgaaatcgagtggggttgaaacatatagaggaggaagaagaagaaatcgccattgaagagtgatttgagaagaagaagacatttctcagatctgagagagatgaaaaacgtaaacggagaaaagtgggtcccactaaccgaacttccacttgtccagatgaattatttatttatttgtttatttattttattttaataataattatagaattcggtcgaaccaatcgagttaatgatagtaaaccatgatccaatttggcttccaatcctgtttctgatatattggttaatggttattcttaatcttacccacataaccatatatattggttaatggttattatatatatatatatatatatggttatgtgggtgagccggacaaaaacaaaaactcactttaaaatttagataattttgaagtttttggtgatttagcattcatattatggttggagctcgagttttgagacgttgtcttgttcccaaaaatgctaaacattaatttacagtcacagttggttattaggatttgaagcatatgaaaatggtaatataaagtatttttattaaagttttttctagtcaatttgttaagttttaatatatttatgttagttcgtgtgtgatatatatagaagaaggtggtgaaattgagaatgattgtaagtaaggatgatcatgatttgtgaagcaagcgtggagaaaaccatttacaacgaagttaaggagggttgggtataagaccactcaagaaaacaaataaggtttgcgagctgaagctaatatctactctttgtttcgacatcattgtagaataagtgtgttcatacctatctaatccaaaaaaagttttctaatccataaaaagtttttttgggctgtgaaagcaactcacctcaagggtcttggatggagaagaaaattctaaagatcagggcactggccaagagttttcatcaggttaaagttaaaagtggttgaggaacatccttttggcatgaaaaatggtcctccgtggggaaattattggacatctttggtgataggggatgtatagaccttaggataccaaaagctgatataatggatgatactcacagagaaagacgtcatcgagtggagaacttaaataaagttgaagctgaaatcaaagaaatgcgattgagatgaaaaacatgggaggaagatgtgaaccattggcgatggaagacaagttttaaaaggaaattctcctcaaatgaaacttggaaacttttgagagcacaacaacctacatgcagctgggctaagggtttgtcgaagctacaccaaaatttgctttgattacatggcgtgcagtgcatgacagattacccacatgtattcgtatgaagatgtggaacacacaagatttgtagtgaatagattctacattcattcaaaaaaaaaaagcatttacaaagtctattattattctttcaatatttggtttttattttacattgttttagccattttcaattaaaaatatgatgtcggatgaatttttactatgttttggattaatttgaaatgctttgcttactcatactattttttaatccttatcaaagaccaccatctataattgaatgatgatgatatattgattgtctgcgtctaagcttagtttaaactttgaagatgaacaagatttcataacaaaataaaagaattgttacgtaaataataataatttaatagaatatgaacctcgaggaccatccacaaaacccgctaaacttggtgctcatgtttggatctagcaatagtgagccacgggagccgactcatggctgtcttaaaaaaaatccatagcaagatattttcctttaattttggtatattcgaatttagacttcttattttggagattaccagttaatgaatgagaaagaaaaatctcattgttttccatagattttatggttcttatggaaaaaataggaagaaaaagtctttaaatgtttacattccgaatctttagatataataaattacgcttaagtgaacaattagtgttgggagaagctctatcaaatctagaagaaacaagaaattagcaaaacagtgagtaagatgttggattgacggctcgtggaaacaatcggattcaaccataagttttagatggtggtgccttcggagagacaaccaaactgtactacttggagcaaaatgtcattggacgagtctctctcttcttcacacggaaatggagactcttttatgggcaatgaaaagtatcatcttaaaaggattgattgtgatcaggcgttcaaaactgatagtaacgagctagtgttgataatgcaggcgtctgatgtttcaagatttctctaatctacttgatgagattggccaacttcgtgattctttctttctttctcgttttataatattgttcgctcttgtagtttttatgcagattgtctagttcgttactctaaattttatactttataaatcttatttgtaaactattttcctccaaaatgggctatcaatcgtagagtgattttctaaattaatatgttcttgacatattagatgatattttaaaattttaatgcagattaattagttctgtattagttttgatgatttatgtgatgtttaatataagaaaatatttttaaaaaataatttaatttacatgcaaaaatatgtaacatcaaatatagaaattggaggagtattaaatacataaattatagtgatatggcatactaaaaaaactatagctttttaatttgttaaaaacttttgtttgtagttaataaatatgttggactgtaacgtaaactgacacgattctaaccttttataccaaacgtgaaacaaagcgaataagttttctttactagtctatgccaccctcacactatttacgtgtattaaaaatattgtagtatgactttttattattattattgtagtatgacttttaaaagcatttttactgtgtttttatattttcaaaatatcctttttactcaaaacatttgtcgatttatttctttgcattttatgatattttttttctttgttttaatttctgcatagtttcgcaattgagttttagaattttcaaagaggtttcagagtttgatcgatttggatatttaactagtatgacatgatcgattacattttaaaaataataatatcagcatatcatcatcaattatatagttgatgatgatatgctattattgttttttattagtgataataactgttgaaaaaaaccactgatcgtcagtcgaattcctgatcataaaagtcatggtccatatcagctatatgagcttacacggcattcctagctcttattataaatctccccacattataatgaaagcaaaaacttaaccaattgcaacatgcaaataaactaacctctatgaacggagttaagtaactattgatcgaggaaaactagcaagtcagagcaataactgttacttaccatttaattttaacttatgaaatgatgggaaacgtatagtaaaataaaataaccaaaacgtaagaagtaaacaaggtgcattttgaaacccaaaatgttaaaatactggcgatttaatctcttaaagcttaaatgattaagtaactacctattgataatactcacaatttaattttatttgaaaatatatatttttaggatttttaaccaacagcataaaggaagaaattcacattcctataatgtgatttttaggctaaaaaggaagatggaattctaatattatctttgtcaatttttcaatcattgatcaacttttgtatagataggaaaacaactatgtgtaatttttttaagctacttagagtttatgtgtttgagtttcttttgggagatgtaagaattttttagatatccgagtttttttttggtacaaggttaacttacaagatttaaagagtacaagatttacgagttgatcgagcgtcttcaatattttgagttgtgaattcaaatttataattcattgtttctgtttcggttaaaaatatggttttaagcacttgatttattatactcccttcgttattttataaatgatgttttaagcttaaatttttgttcttaaatagattattaaatttgattatttatattatgcagattatttttttattggttgattagaaaatagatgatgtttttgtttataaattataaaataataaattcttaatatgtgtgtaatcttctaaaacatcatttataaaagaatggaaggagtataagacttaatttattacgtatcggatcacaacaaacatgcacttgaatcacatccacctaacttccatctaggtgtttgtttttgcaattattcatatagaattgatttggtgatataagtttacgagttattaaaggaaaaaaaacaacaacaaaaaaaaacaaattcccaacattagttatccaagagtattttttttttttttagttatccaagagttaacaataccttctaatactgttctctacaagtctactatacctacgttgcaatgataatttcctgcgtgttttttttttccttttaaacgtcacatgtttaaacaattttcactaacccgttatttacacatgtaagagaaaaaaagatagccaaaaggacttatagtgttatctatttaaaaactaaacttgtggtgtctacctaattaacccatctttgtacgtaccaatatcgctttcttcaattattagtaatatataaatataaatgtttgtagtagctgccggtcattttttctttctctctctcctccctaagcaaaactaaaacaagctatggctggtatgcttcccggagttgagtgtgcaaggaggcggcgcttccacggtggtgctcctccgattgaatcctcgaacacagcttctgtggcggctgcggcgggacacgtctggacacggcgaccatcgttctctctttacactaccaatcatgagagccaccaggcccatgtctccttctcggtaatgaaatgaataaattattatacagaaaagagaacaaaattaatatatagttgtgttttatgttttatgaagttttttttcttaaaataatatttcgtaaaagtatttcggtttgagagtttggaatcttataattttgtaaaattataggagagaagtgttaggaataaatcttatggagaagacaacgatgagaaacttgacggagcagccaaagaggcaaagcagaggcttaacaagcggctgagaatcccaccacgtacaaggttcgatttagtaaaaaacggcgtgtgatagtaaaaccaactcgtaaatttaccttaaaatgcaccgaagaagcttcaagcctttagctttatttgtcatgataatgacgcatgatgatgtattctaattcataacatgtggtatcacatgagcaatactattgtgagattgtcttttgtcggacaattatttcattatctctttagtgttaaccccactttgtgtcttgtgagcgcattttagcaagttctcgctatttattgttaagttgcgtctttttgttttgatagtgcgaaacttcccggaaactactaggcagcttccaagaaagccaaatttttgacattactctcttttgaatttgcattcaatttttaagttcaggcaaaatggtaaagacaaagggaataaattggagcaaggaaagggtaaacctctcggggacttaccgaccgaggtggtcgggttaaagaagagccgaggaaggttgatggaatggttcaagcggcgagttagggaacaacaagattgtgctatatgtctagaccggttcaagaagggtgagaccttggtacacctaccatgtgcccataagtttcactccatatgcttattgccttggctagacaccaatgtttattgcccatattgtagaactgatatttggaattaaatgttatatttttgatgtcatatttcgagatgtttttttatggcttatcttaggttttaggaatttaaacataaaatgactagcgcaatcaataaaattttaactaaatttagcctctttttataattctgaatttcaagctatggttgttttcgatatatttgaccagaattgtcatttcttcattttaaatatatgattacaaattgcagaatatgctagtatttttttttccaccataagtgaattatcttgggttgagcaaatagaaaatgtgtgttagatactttagatgtaggctggatcttgtaccagataacgaaaactggtttgcatggtattgcgacacgtatgtggaataacaaaacctttgtgtgtcggatcattctatcaaaatcaaaaagaagttgaaatatacgatacggtaaaacaaggtgcactagactaaagaactaaattttcgaaaagcagatgagaaatgagcccaataacttcaacaagaggtaacgtcctgccaccaccatctccttagtccaaacgtccacatgtacaacatttatttgcatatgggccaatgttttaaaaatatattaattttgaaaagcctaaagctgaaccgattgtaccgaatccgaaccgaagcaaaaaaaaccaaccgaattaaaaatttgaaaattgaaaataattgaatggatactaaacactataatccgaagagccgaaatcgaatcagtaccgaaccgaaatattttggataaccgaaaatatccgaaatacaattatatattcagaaattattagttatttgtagaccaaataataaaaaatacttgaatatatataaaaaataataaaaatactcagagataactgaatatctaaaaatatctaaaaatactcgtagcaaaataccaaattgatattaaattttaaaatcaaaagaactaaactttaaaaccgaaagtattgaaaccgaatagaatcgaaccgataaccgaagaggtaaccgaatgccaatgactacctaaaggtcttaaaataggcccagtcatctcaaaatcacgagaaagaacaaaatgataacatgtaggaacggtttatgtttcttctttagtatctgcgtaatttataaagtacttcttcttgcgtaagatacaactactaggtaggggggacgaaatatattcgtgatagataaatacatttaataattggatagggagatgatagaatagagttaatcacgatttctccgttagcgatcaaattctattactcgagttcagtttttcacttgtaaattttttttttacatctgagcttggaaaatcttgtttacatggatgaatcaatatagattgaaggttacatgtttaactgtgtgtttgtttttgttggaagaggaatgctaatctcgttgaataaaaagtgaaaattcataaactgaaaacttttcgctaaactcgaagtttggtatgaaactttttgggaatgcactgaagaattttctggatgaaaattagaagaaacagaaccaaaggtgtacagcttgtgttagatatcacataaatcatatctataaccaaacttatagacatgtttagaaataaatcatgttgaggtagatagtacgcacacggcacacttccttaagtgttcatttcaagctagtagataaacgatagggaaccaatgattcaggcatattaattagatgaggtaagtatacagttccaatgcaatattaattttaattaattaatttaacttcattgtgggtggtaacacaataatatgatttaatgaaataagtcatggttacaaaagttgttgctctatatccaccagtgaaccataatagtatattcatggctcttatccaattaaccaaataaaattttctaatcaaacggtttgaggacataaacaagtttaaaacaagagatagtggatgtgttttgtcacagccagatttctatagctttttctaataacagaggacaaacaaatagacgttagacttcccttcatcagatacatggtttcacaatgagatgtgacttgtgagtgttgcatgtgaagattcacaatgaaagtaatatgataaaaattggcaaaataacatggtccatggtttgagggaaacattgttggaatatcaatcatgccagaaattgcccaaaattagaaaataattgtttcatatataaatcatgccagaaattgcccaaaattagaaaataactgtttcatatgtatatcatgccagaaagtgcccaaaattaagcttaaaataattgtttgagagacattacagaaaagagagggtcttgtaaaaacaaaagacaatataatctcacgtagtttggtcgtttgcagagagattaagatccaatatttaaagacaaatcagcacaagcccgacaattacgagtttttggtcgcaatgaccaatttttcctcatttccaacaattagaactctcattaattagtcataacccacttctcaaaagaatagaaatcatattcataacttattttaagatagataatttttttgaaatatgttcttatagatttgttttctggtcaacaaaacattttcttatttattaagaatgcattcatcttttacaatcctaaaaaggtctgaaaaaaaaacttttgtcctaaagttaattataagttataacttaactttaaaagctgttaatttctacaatatccttctatttaaataattgctaacacgtcatcctgttattcaaacaaaatctattgaaatttaatattttccttatatactaacattttagagattttatcccaaaaaaaaacattttggagatagaggttttccattaaaggtaattaaaactggagatagagtttatacagtggaatatgctggccaatataatccttattaatactaaaacaaccccaaaatatggatcaatatatggctttacctcccaaaagagaagtaaaaactaatataaaattttaggagccttctcattccgaaaacattcacttttttctactacattaacacttttgtgtagatattattattcgtgttacatagcagaaatggttcttacacaatcaaaagaaacctagtcactaatgtcgaaccacgcgccacagcctccaagacctctgatgaagcaatactcgtggtcaccggacatgagtcgcgaagaggcttggctgcgtaagaaaaagaaacgcccactggatctccttcctcgcagcaagagtgtcacgaatgatgatatcgaggagcttaaaggctgtttcgagcttggttttgggtttgaaacagaatctcctgatttgaatccaaggctctcccatacaatccccgctcttgatctgtactgcgcggttcatagacaatacagcaaccatttgtctcggacgtcttcattcgcgtcggatcatgaagtcagcaactccaacaacatcacgaccatcgtcgacaaaggtatatgtggcttctagttttggaattagtttattgttttttttgctttgtctgaatgttctccggttttgaggagcaactttaaaaaggtgatgatcggaagacgatgaagcagaagctgaaacaatgggctaaggtggtagggttttcggtgcggcactcttccggaaaacccaaattgatgtcagaagaatgacagttttgtaatataaagttaacaaacactaaaatgtttagtatttgaatgttagtggataagacaccgtcttattaaagtttatgaaaaccaattaaaagaaaatttatcgattcttattttgttaggagtatttgtttttgtagtccattttgttctagtagtatttgaatcactccaacgagagcaggttttgagacataagaccatctctatggtcaatctttggtgggtgtctaaagattttttttataaggcatattaatgttatttatatgaatgtctttagagtgtgcaatagagtctctaagtagacacttaaagccgatgagttttgtttgtttcgagttatttttttatatttttgttgttaaggatttctccttcttgtaatctccaaaccgattgtttagccaagatctccaaaactttactatcagaactttcttatgtaaacattctttcacctaattggaccactaatcaaagagtagatttttaattaatgtatggttggaaaaaaaaagattgggttatgaaagcaacactatggaaagctcggattgaagatgttaagtttgaatgggtgaagacagatttcaacaaaccggtggatcttcttgctaaacaaagaattcatgataatacttcacaagctctacattttcactatgtttcgtcaaattcttaataaaatcagaaattaccaaggaaatcatgaatttcaattctattatacaattaaaaacatgtatacatttaaaaatatattataatatgtttcaatcctactatattatttgggaggtacattttacatgacaatgccattagaaaaatttaatcaaaaataaaatccatttaatcaaaaacaaaatcctttaatgacgtcattaaggttaccaaaattatttaaagaaattagcacacaaaaaagtattcaacgattaaaaaattatcaaatctctgtgttatataagttttgatactatattcgaataaagtgtaatttacctttttaatttatattctttaactaatttaagctacctaatatatttgctaatcttatacctatcaaaaccgactatcatttcttatctttatagcatttttgcaagacttttttggtggatttgggtaaaagtgcattcgggtcatatggtacattcccctattaaataaatatggtgcactcctatgttattagctaaaatgtttagattataattcagagtcatatcataaataaaattaatattaataaaataaatggctttttggcaagacgaatttggagggacgggtttttgaatcaacattaataaaaaagtaaaatatattaatccaccgttttaatacgggttaaatctttaatttattatttttaagaccattaatattaaacatatcaaatcatcctaatttagaaaatgttatataaaacgaaaaatgttatgtggtatgtataatgttactatatataaaattaaactataaaatataaatgtattagagaatgatacaatttgcaaaaaaaaattatataataaataattcttaaatttttaaaattacacttaaaaaaaaatcacgggacgggtaaagaaattacagaacgggttttattttggtattgggttatatggtggatgtatttgaatcattatttataaaattttaaaatattattaatatgttgttttaataagggttaaaacttcagttttttaacaattatctcatggattcgtggtatagcgttatttaataacaattataaacagtaaaatataaatattttataaaaataaaatttacaagttttaatatatattacctttaaaaactaaattgtcccgcggtataccgcggcccgcggattaaaatctagttctattatatatatatatatatacattttaaaacattgtaacaataagtatattatatcagttcttaaaattatttttggacatatacattagttattatttggcgtaaatattagtggtaagaaaataacaacaaaatataagttgtcgctagttcacaaatcacaattattaatgacaattatcggtacactcaatagtcaatacattgcacgttctcatcgctttgttggataagaaaagcgagtgtttgacgctaatcatcggcgaatcataacgatcatctagccgatcgaaaccaaaatgcttccccgataaagagtaattttgtacatttttatttaatttatttatttatttatgttcgattcaattataattaaaacattttttactgacgactcttaacagtactattgtggtgatctaaaaaaaaacaattatgtggtgatattctgtaatacgaattgtgacacaatatgattacttatgaccgataagtgtaaccgataaaatcactaccaagtattatattagaatgtagataatctcctctaaatttatattttttcagtgtcaatagaacttttcataataccactctcatcactttagtatgctaccaaagcttcattgttcttgatgttaaaggtgttcttcgttttccgtataattcttgtttaaaatttaacttggtatgtctttttctttttgaatttaatgttaaattatatttaaaaaaaataccgtttatacattggatgcaaacttttccaaaaccggatcataaaaatgtcctatctatttgatattgccttgaagcaaaccgcatttgagttccttgtgcatacttctcttcacctctcacccttatagtgcttagtcgatttcttatgtttttgtctattagcttgactatcttctccgtccttgagggtttctctccatgtctcctctcatttctttctctccagattgagtgtatcgtgttttgaaaaacatacctaagaacaaatcttgtagtcacgccaagatttttacccgcaagctccttcatgatatcttaataacttagtatgtcttttgtgtactaagtcatttagttcttttctttttaaccataaatacttccaaattcaagtctctcatgatttatttttctcttttattattcttcttagccatattgctgttgtttctctataaaatgaaaagcatatgataaacaaacatatcttatctcaattgtaatgagttttatgattttaacatctaactattttctaatcattcaataatcaaaaacatatgacaagcaaacatatattagtttatttattatgtctatcttatgcatatttgatatctaattacgatattaaaaagaaatgttaaacatattaatacctccatattcgtggttaaatgactttgtactaaattatatggaaaggtgtggtgataaatgagtcttatttggtatatagtcaattcaaaaggcgtttcaataaataccattattagtgtcttatactactgtgtagtccttttcacgtgttttatatagtcttatatatgaagtgtttcttacacactcaaaggcaataagaaaaacctagctactagctataatgtcgaaccaaaacaagccacagccgccaaaacctctgatgaagcaacagtctttgccaccagacataaaccgcgaagaggcttggctgcgaatgaagaaaaagcatccatcggcccgtcttcatcgcagcaagagctgcgtcacaaacgacgatatcgaggagctcagaggctgcttcgacctagggtttgggtttgagccagattctcttgactttaatccaagtctctccaaaacaatcccagctttggatttgtacagcgccattcacagacagtacagcaaccatttgtctcggacatggtcgtctacgtcggaacgtgacgtcaactctagcaccacgactatcgtcaacaaaggtactaatttttttacttttctttgtttgtttgattttactttggttttgacgatgaatttttgaaaagatgatgatggaaagacgatgaaaaagaagctgaaacaatgggctaaggtggtcgcatgttccacgaggcagtcctccggtaaaccaaattgatgaaagtgataatcttctaatttttttctagttatgtccgaagaatggcatttttgtaatataattgttaaaaggctatttcaattaatgtttctgtatttgactgttagtcaagtgaggtttgtgaagtaacctaagtggatatgacaatgtctggtcaaacttaattggaaccgaagaaaccttaattatcgaatgtgatttcttatgatttaatttgtccattttgtttggagtatgacctgcgaatagtctgattttttattttattttctttgttcataatgatttttataaaataatctaaactttttcattatatcatatacatattgttttgtttaacattatgacagggtttataaaattttgtttaaaaatatatgacaagaaattaattcacacatacaatttctagttcacaaatcacaaatataatgaggattaacatacatgattaaaatcatattgtttgataattggtattagtgaaggattaccatatatcgctattatgtcaaataactattattaaaacttgatgatgttatttaaatgatatttcttgtttaaatgtttaatttagtgattaacgagagtacatttttttttattataaattaataatattgggaacatgatatttattaacttatagagatatttgttttaatttttaaacaatgagttaaaaaaatttgatctaaataaacttatatttgaataaataatctaaataaaacattagattaacatatgaaaacaaaattatatttgtgaaataaacagaaggaggcatggggaagcaccatactcagcagtccgactaattgacgggattgacaagcagatcagaaatcggttcgcgacaatacgagtcaccggggaccaatgttaagacaaaagattacaaatatggttcaaatctagaacctatgattagaacttttttcttcatttttaaaacttttcaaacacacgatgcacatgttgtaaaaatattattttctccgaatataatttagttaacattattttcctgaaaaaaaaaaaaccaaaattaagcccaactatacaatcgtaagaccaaacgaccaaatacataactatatcgtctaacaacaagtatataagatttgctatgagcagcttattctattttgcaattggacttctttaaaatgacattcatttcagattgtaaagagttggtattggattggatctaacaaaggagactaattggaccttcacggccttcctaagaagtaagaacggtgatacaaaatttcaccatgcttgaagacatgacaacaaaaagtccaaaagacaagttatccaaatcagaaaaacaaaacccaaaagacatgacaaccctttaattattttaaatcacaaatgtttgtggaataaaatcaatcatatgtaaaatcatacaaaattagctaattactgttttgggtttggatgcacaagtataagattttctattggctgcttactattttgaaactggacttcttcaaattggcattcatttcatattgtaaagagttgttattggatctaacaaaggaaactaatttgaccttcctttgttaatagtaaaaaaaattaattaatctaaacgccaaatagaacacaaaaacaatatataaatacaaaagtaaattagaattaattgttgattctatatagaataagaataaataaatatatatatacataataaaaagtttggaactcttggttctagaaccggccaaatagttggttttcaacattgaccggaaaagaacgaattcataaaattttgggattttaaactctacccaaactaataaaatagcatgtttaccagttcaattagtcggacaaaaaccggtaatgaaacaccaatagagtagggatgtgtcgtgtgtgaaatatttcaggttgtagtttttgttagtttgtcaagttgatttatggatatattaattcacgtggtcaattatttacgtcgaagatgtgatagatatttagtaagccggactataggaacaggagtgtggaagccacacgtggaatagcggtggagaataatttggatggatggcggtttaggccgaaccggggaaggttttgtttcttagacatcgtgagaagtcatacgttatgtccttaagattttaaaagctacaagagccactagctatttttcaattccaatatgataaattaattctttgtaagctaaattttattttaatttctaaataaatgttaaattttggataattaaccctaaagccataaacaattcagaaaaaaataacaaaattataacaagcctattcattgaaattcatatatgtacaaaaaagctataaatgttcatagtataaatgttttatgtactataatatgtatggatatgcaaattcatataaacataaaaaatagcagtgattaatatgagatatttagttcataatttgaatgtttatagtataaattttgttaattttttatataattaaaaatgacaatatatgaattttaataaccaaacataatgttgtcacctcgatgtatactaaattgcaggaagatgatacatataagttgaaaacgattgtgcgaataatctatagaaaagaaatataaattagaaaaaaaaagacaatgctaacgttttggtgtggacaagaaagaagacgttgcgacttgcgatgatgtttgaacctgcaggtagtttgattcatgtctctagaataacgctaaagaacacctatggctctgataacatattattaatatttacatttattttatttaaagtagtccattcataattgcacacgactaaatgctacacaacttgtcttagttgtttaatcaagatatttttaccttatgatattttgtgaaaaatgatacctataaaatccctaatgagcacatcaaccttttttaccttattatattttgtgaaaaatgatatctataaaatccctaatgaccacatcaaccttgaatcttctctaataaaccttttttccaaacacgcactaaaccaaaaattaacatctcaagaggaaaccatttaaaaaaaaaacagagttagattaagatcaacaaatatagttgaaaagaacatatgttaagcaacattaccataaattcataattagtagtgattaaaacttaagaatactaaagtatgaatatgaaaattgttgtatttttttgtagtatgtaatatgcggaaacttggatgttatcctattcattgaaattcatatatgtatgtagttatcattttttaaatatattaaaaaattaaaaagtaataatactataaacattcaaattatgaaataaatatctcatactaatcactgctaattttttttccaatgtttctctttagtatttctctttagtatgggagtgacaaacttaatatgaaatctatctccctacatgcaaaaatcgaatctcttttattattaatgaagtgtatggtcggtgtcaataactaatatgtcatattttttacagactgttcagatatgataaaaatagtttttttccaaccaaatggttggtcttctgagtgtatttgaaaacgacattgaagaattaatatatttttttttaattttagttttttatagtacaaatattaaaacaaacaatcctaccatatcataacatttgtaaataacattttaagttttgttttgagttttaattaattttctatgacaaaaaaatgaagtcaatagactaagtgaatcatatagtataaataaacacaatttaaatagtttcaaataaatttagaaagaataaaacaaatagaaatcagaaggtgtctgtttcctcctcgcaacatacgatcaaagagaaacaacttgaccctttacattgctcaagagctcatctcttccctctacaaaaatggccgcacgtctccaaccttctcccaactccttcttccgccatcatcatgacttctttctctctcactttcacatctcctctcctcccttcctcctccaccaaacccaaaagatccgtccttgtcgccgccgctcagaccacagctccggccgaatccaccgcctctgttgacgcagatcgtctcgagccaagagttgagttgaaagatggtttttttattctcaaggagaagtttcgaaaagggatcaatcctcaggagaaggttaagatcgagagagagcccatgaagttgtttatggagaatggtattgaagagcttgctaagaaatctatggaagagcttgatagtgaaaagtcttctaaagatgatattgatgttagactcaagtggcttggtctctttcaccgtagaaagcatcagtgtatgttcctcctctctatcctcttccattgacttgtgattgaactgtgtaaaggtttcgtctttagtcttatgtgtgcttctttcaatgacttgtgattaaattggtgaccagattgtgtaaaggtttagtctttactctttatctttagtacattttgatttatgagtgcttgttgttgattttgttgttgtagatgggaagtttatgatgaggttgaagttaccaaatggtgtgactacaagtgcacagactcggtatttagcgagtgtgattaggaagtatggtgaagatgggtgtgctgatgtgactactagacagaattggcagatccgtggtgttgtgttgcctgatgtgcctgagatcttgaaaggtcttgcttctgttggtttaacgagtcttcaaagtggtatggataacgtgaggaacccggttgggaatcctatagctgggattgatccggaggagattgttgacacgaggccttacacgaatctcctttcgcagtttatcaccgctaattcacaaggaaaccccgatttcaccaacttgtgagttctctttttagattgatgttgtgtgttggtgagtgaatggttatgctaagatgggtttttgtttgtttgttgtaggccaagaaagtggaatgtgtgtgtggtggggactcatgatctctatgagcatccacatatcaatgatttggcctacatgcctgctaataaagatggacggtttggattcaatttgcttgtgggaggattctttagtcccaaaagatgtgaagaagcgattcctcttgatgcttgggtccctgctgatgacgttcttccactctgcaaagctgttctagaggcttacagagatcttggaactcgaggaaaccgacagaagacaagaatgatgtggcttatcgacgaacttgtaagtacatgcttcttgcaatcttaaattcggtattgaagttcttggttgttgatttgtctgcatgaaatgtatagggtgttgaaggatttagaactgaggtagagaagagaatgccaaatgggaaactcgagagaggatcttcagaggatcttgtgaacaaacagtgggagaggagagactatttcggagtcaaccctcagaaacaagaaggtcttagcttcgtggggcttcacgttccggttggtaggctacaagctgatgacatggatgagcttgctcggttagctgatacctacgggtcaggtgagctaagactcacagtagagcaaaacatcatcatcccaaatgtagaaacctcgaaaaccgaagctttgcttcaagagccgtttctcaagaaccgtttctcccctgaaccatctatcctaatgaaaggcttagttgcttgtaccggtagccagttctgcggacaagcgataatcgagactaagctaagagctttaaaagtgacagaagaagtagagagacttgtatctgtgccaagaccgataaggatgcattggacaggatgtcccaacacttgcggacaagtccaagtagcagatatcggattcatgggatgcttaacacgaggcgaggaaggaaagccagtcgagggtgctgacgtgtacgtcgggggacgaataggaagtgactcgcatatcggagagatctataagaaaggtgttcgtgtcacggagttggttccattggtggctgagattctgatcaaagaatttggtgctgtgcctagagaaagagaagagaatgaagattgattcaaaagctattggattcttaataagtcaagagacctatgaatggttctctctctggtttcagactttgatacttgatacttgtatttgtattgtgcccataattttgggttttgtagctctctcctttgttgtaacctgtaactttgtccttggttgttttgtaatatcttgttttttagtaatagtagtataatctgattttttgtcatatattgtcttgatttctctgtgatatttataagaaataaacatttgtttctttttacctccaatatttttgtttttgatatatcaaaagttaagggaatagattttaattaataaaatatattgataatattcttaaaagattattaataaattaaattgttttttttttaacgtcaatttcattaatttttaagaaagagtacatggtaaataaagcccaacaacacaattataaagtccaactacaaacccaatagaaagattacaacttgagattaaactaggtttagaagggacacgtgtttaattatctgttcttgcgcatgttggatgagaaaagatgccgatatgactcatcaccgccatcttgagttgaaccgtcgatcgaaattacctagtccgtcgttgaaatttgaaccatcataattattaaactctggaacacgcgacatagcaagagggcagatcagttgcaaaacacactctcctgaactgttctacgccggccaccaaagctccactcaacacaattcacgatcttaaagaggcaccttcatcgttaccagattatggtgccaacatgggaatgaaggctttattcttttcttactcagaattgagcaacgaatggtctacaagattctgaattagacactcagcttctaagatttaagatatgcaaaaggtggatcaaaactatacaaattaaaaaaaaaagccataaaggctaacagaagctcgcacttaggcgagaaaacaaaaaccggacaaagccaaagacaaaaaatccgacacaacatcacctggaattaaaagagaagagctttctctttctcaaagattttagtgtgagaagaggttgtctattgtgtaagtgtggttaagtaatggttgttatttaacgacagggtcgtcgaataaacaacgtgttttagggttttagggttagtgttcaatcgatttggggattttgtgaggttgagcaaacgacgtcgtttctctaataaacgatctcatgaacgtctaagtgacatcgtctaatcgttccgtttagtcagttaacgtcgtggctaatttggcttcgtcaacgaaagtttgagaatttattcgaagaacaaattgttgatgatttaaatcaacacatacaaagtttatgctttaaatcacggcaaatggcaaagtcattatttaaatgacatttttcccatttttgtttttagtaaactaattttccagaaaaacactgaatttaatttcggttttgtaaattcaattaatttgcgccaaaaatcggaatgaaccaaactaataacattaaaccgaaatgccgaatcccaatttcaaccgtaaactgtatcatcactcataaaccgaaatgcccaatccaatttaaaccgtaaattatatcatcactcaaaaaccgaactgcccaatgccaacttaaaccgtaaattgtatcagatactcataaaccgtaaattatatatcatcactcataaaccgaaatgccaaatctaatttaaaccgtaaattgtatcagatttcataaaccgaaatgccaaatccaatttaaaccgtaaattgtagtatcagacactcataaaccgcgtaaacctctcttcaattcatctttcctgagccatgagacgtttcacagtcccctgtatcttacgccaccgaatctcaattctttccggcgccggctattctcctgccgccgctcgtctttcctctttagcacaaacatcaactcccgagtcagtattaccgccgataacttctgaaattttgctcgagtcgataagatcttctcagtggcatatcgtcgaacacgttgcagacaaactcacaccttcgcttgtatctacaactctactcagcctcgtcaagactcctaatttagccttcaatttcgtcaaccacatcgacctttatcgcctggactttcaaacacagtgtctagccatcgctgtcatctccaagctctcttctccaaaacccgttactcagttactgaaagaagtcgttacttctcgtaagaactcaataagaaaccttttcgatgaattagtgcttgcccatgatcgattagagacgaaaagcacgattcttttcgatctcttagtcagatgttgttgtcaattgagaatggttgatgaagccatagagtgcttttacttgatgaaggagaaaggtttttatcccaaaactgaaacttgtaatcacattttgactttgttatcaaggttgaatcgtatagagaacgcttgggtcttctatgctgatatgtataggatggagattaaatcgaatgtgtacactttcaatataatgatcaatgtattgtgtaaggaagggaagttgaagaaggctaagggttttttaggtatcatggaggtttttgggattaagccaactatagtgacttacaacactcttgttcaagggttttctttgagaggacgaatcgaaggagctcgtttgattatcagtgaaatgaaatctaaaggctttcaaccagatatgcagacgtataatccgattctgtcttggatgtgtaatgaaggaagagcttctgaggtgttgagggagatgaaggagattgggttggttccggattctgtttcgtacaatattttgatccgtggttgtagtaacaatggggatttggagatggcttttgcttacagggatgagatggtgaaacaaggtatggtgccgacgttttatacttacaacacgttgatacatggtttgtttatggagaataagatagaagctgctgagatattgattagggagattagagagaagggtatagttttggattctgtcacttacaatatactgataaatggttattgccagcatggagatgcaaagaaagcatttgctttgcatgacgaaatgatgaccgatggaattcagcctacgcagtttacttatacgtcgcttatttatgtcctgtgtagaaaaaataaaacgagggaagcggatgagttgtttgagaaagttgtgggaaagggaatgaagcctgatcttgtgatgatgaataccttgatggatggtcactgtgctataggcaacatggaccgtgcattttcgcttcttaaagagatggacatgatgagtatcaatcctgatgatgtgacatacaattgtttgatgcgagggctatgtggagaagggaaatttgaggaagctcgtgagctgatgggagagatgaagagaagaggaatcaaacctgaccacattagttacaacactctaataagtgggtatagtaagaaaggggatacaaagcatgctttcatggttcgtgatgagatgttgagtctcgggtttaatcctactcttctcacttacaatgctctgttaaaaggtttgagtaaaaaccaggagggtgaactagcagaggagctgctaagggaaatgaaaagtgaaggcatcgttcctaatgacagctccttttgctctgtcattgaggcaatgtctaatttggatgcaaaaaaatctgatagttgaaaaattgttggtttcttgaaaagcttctgttatgaatctgttgttaatcatgtcacgagttagtgttatcctttagatcagacttatactttgacttgagctctgtgaattgggaacttacgtcagaatagccaaccgcaatataatgctatgttcaatgaatttaaggatatgaacatgttcttgttacaaggttcttttgataatgacacaaaagttacgagttgagaatgaatgtgcttcttcaatagagcataaacgcataaataagagtgacaattaaaaaacaaaaacgcatagaaaagagcacaaaatgaagttgcccattgctttcagcctttcacttaactccaatgatcgtctatgtccttcttctcgttgcccctcctagtctgattctgaatctggctcatccaccaatgggggatggactgacttgagttgtttaaagtcgtgaacattaagatcctctacgtggtttacaaaggtgcaaactctacaagttttctttaacacttcaccaaaaccttggatttcaacacgttggagagtgttcctttcgggattgaagtagaaaacataaaacggttgcttaggtgtatatttgagcatcgaaaacactatttcacccgaagcagtccctccagcgatggaaacacgacgacggaagaatctatcatcggtccaagtgtaggcatatttcgaccattgctgtttcttaacatcctctagaacccacacacgcaactcattaatgtcatcatcgttaatattatactccacatattcgtcgacatccgaataataaagcttataaatgtcgacatcatcctcccaataaatcacagctaattttcccttatagttgatcaatcgacaaaacctttctacgtcaataaacgtgaatttctcagacctaatatcaaagcaaactatcacataatcagatactatgccatgaccatccttaacacaatccgacgtgctacctaagtaatacaaaactccattgatgcatatcccttcactcttaatatcatgtctatcatatcgtaagggacaatttatctttctccacttcatatgtccagccccaaatgtaagaattttactatgaccaggaccagatggataaaatatggacaatgccttgtattgcttgtcaatcgggtcaaatccgaaaaagctatacgcctttctgtaagtataccgattaggtaagatggcataccgtcctgtagtggggttacatattagaggtgtagcctcgcctcgatcaccatataaatagatcaaccccgaggcgtagccaattgaaaaatattttaggtcataacaatgacagatatatagcttgtctggagagaacttaacatgaaattcagcggctgctacaagagtcgatgaggatttctcatatggattctcaagctgtggcgtcgagaagaacctccacacacagtttttctcttcgttgactttctctgccatggcgaataagaggcgcggcttagtggaggacctggtcaggaacaactccttgaaatatggactaccaaaaattgatccccattgcttcgacacgcaatgaaacctcgcgactgactttgcaggcaatctcgacaaaatctccacggtgagatcattcgttattgtacttggattcatgattgccgatcaaacgaagaaagagagatgtgataacttgtatataaagtaagacctagagaaaccaattaacaaaagacctaaagagtaaagagtaaagaccatatttatatatcgttaacgtccaagtgggccaccagctattggattttcttcagtaatcgctgctttataaggagacgaacaagatgagaatcaatcctgatgatgtgtgacatacaattgcttgatgaagaagattgggttggttcctaccagatttgcttgcatggagaacaatgttatggagtctatgttttgtatattaatatatactttgattcattaattcatctgatatggttatcatgacagctttgaatgaactctgtttctggtgaatactataactcgttttgagacacagatttgcaaaagaaactcgattgttgcgagttataatgcaacttgtgaatctggtttgcttcttagtcattttctcagggaaactataaaacacactacatactaaaattggtccaaagcctcaaacacattgagctagatagaatgatagacccatcagatagacaataagaaaagttcagataccaacttaaacataaacgaaagtgatagattgttgttactcttaactcgattccacacttagaaagcacaaattcaacttagagaactacaatcgaaagagaagatcaaattcaattatcaaagcaataatcaaacagatctgagaatcaaatcgttcgctaagtgttagctcacgatacaatgatcaacaatgatcaacattgtaacatctccagacaaattctctctctctctcaacaatctcagaaaatacataaagaaatgaaatgagctgcaacggctcctttaaagctgagttctctttatttccatcagcgtcttccatatcctttgactccagcttgttgaagaataatcaaatctcgtataagtcaaagtcacattcgtataagttagttattaagttacgagtcgtgtctgttaacacagttgtgtctttatcaagagtcatgtcttttacacaagacaatgtttcatttcatataaatagatcgagtctctgtttcctgtaacacaattgagttttgtaatacaatcaagtcaataagattgattacattcatactctgttttttcgttcttactctgttcttctttcataacaaaacattaacatggtatcagagcttatcgattgagaggacaagagaaaacactaaaaagagagagaggcaacaaaagtgagatcgtatacgtctcagcaaaaagcgagacgatgcaaggctcctcacatcaagtcatccctatattcgatggggagaaatatgacttctggagcattaaaatggcaaccattttcaggaccagaaaactatggtccgtggttgaagaaggcgtaccggtcgaaccggtacaagcggaagaaactcctgaaactgcaagagcaaagacgctcagagaagaagcagtgacaaatgatacaatggctttgcaaatcttgcaaactgccgtaaccgatcaaatcttctcacggattgcagcggcatcatcatcaaaagaagcgtgggatgtgttgaaggacgaataccaaggatctccacaagtccgattggttaaacttcaatcgctgcgtagagagtacgagaacttgaagatgtatgacaatgacaacatcaagacattcaccgataagttaattgttctggaaattcaattgacttatcatggtgaaaagaagacaaacactcaactcatacagaagatactcatctctctcccagccaagttcgacagcattgttagtgttctagagcaaactcgcgacttggatgcactaacaatgtcagaacttcttggtatcttaaaagcacaagaagcgagagtaactgcaagagaagaaagcacaaaagagggagcattctatgttcggtccaaaggaagagaatccggtttcaaacaagacaacaccaacaaccgtgtcaatcaagacaagaaatggtgtggttttcacaagagtagcaaacacacagaagaagagtgtcgagagaaaccgaagaatgacgatcatggcaaaaataagagaagtaacatcaagtgttacaagtgtgggaagatcggccattacgcaaatgagtgtcgctcgaagaacaaagagagagctcatgtaactcttgaagaagaagacgtaaatgaagatcatatgttgtttagtgcaagtgaagaagaatcaacaacgttaagagaagatgtttggttggtagacagtggctgcacaaaccatatgacgaaagaagagagatacttttcaaacatcaacaaaagtatcaaagtcccgattagagtcagaaatggagatatagtcatgacagccggtaaaggagatattaccgtcatgacaaggcatggcaaaagaatcatcaagaatgttttcttagtgcctggtttggagaagaacctattgagcgttcctcaaatcatctcaagcggctattgggtacgttttcaagacaagagatgcatcatccaagatgcaaatggaaaggagatcatgaacattgagatgacggataagagcttcaagatcaagttaagttcagtcgaagaagaagccatgacagccaatgttcaaacagaggaaacatggcacaaaagacttggccatgtaagcaacaagcgcttgcaacaaatgcaagacaaggaattggtaaatgggttaccaagattcaaagtgacgaaggagacatgtaaagcgtgtaatcttgggaagcaatcacgcaagagctttccaaaagaatctcaaacgaagacaagagaaaagcttgagattgtgcatacggatgtgtgcggaccgatgcaacaccaatcgatcgatggaagtcgctactatgtgctgtttttggatgattatactcacatgtgttgggtatacttcctaaaacaaaagtcggagacgttcgcaacgttcaagaaattcaaagcgttggtggagaaacaatcaaactgttccatcaagacgttgagaccgatggaggtggtgagttcacttcacgagaattcaatcagttctgtgaagatgaaggaatcaataggcaagtgactttgccttactcacctcaacaaaatggtgcagcagaacgcaagaatagatcattggtggagatggcaagatcaatgcttgttgaacaagacttacccctcaagttatgggcagaagcggtatatacctcggcgtatttgcaaaatcgcttaccatcaaaagcaatagaagatgatgtgacgcctatggagaagtggtgtggacacaaaccaaacgtgtcacacttgaggatatttggaagcatatgttacgtgcatataccggatcagaaaagaagaaagctagacgctaaagcaaagtgtggtattctcatcggttatagcaatcaaaccaaaggctatagagttttcttactggaagatgagaaggtggaagtatcaagagatgttgttttccaagaagacaagaagtgggattgggataaacaagaagaagttaagaaaacttttgtcatgtccatcaacgacatacaagagtcaagagatcaacaagagacatccagccatgatttgtctcaaatcgatgatcatgctaacaatggagaaggagaaacctcaagtcatgtgttatcccaagtcaatgatcaagaagaacgagaaacttcagaatcaccaaagaaatacaagtccatgaaagagatcttggaaaaggcaccaagaatggagaatgatgaggcggctcaaggcatagaagcttgtcttgttgcaaatgaagaaccacagacttatgatgaagctcgtggtgataaagaatgggaagaagccatgaatgaggagataaaggtgatcgagaaaaacagaacatggaaactagtagacaaaccggagaagaagaatgtgataagcgtgaagtggatctataagatcaagacggatgcaagtggaaatcacgtcaagcacaaggcaagactagttgcgagaggtttttctcaagaatatggaatcgattatcttgagacattcgcccctgtttcaagatatgatacaatacgagctttacttgcgtatgcggctcaaatgaagtggagattgtatcaaatggatgtgaagtcggcgtttctaaacggagagcttgaagaagaagtttatgtcacacaaccacctgggtttgtgatagaaggcaaagaagagaaggtgttaaggctttacaaagccttatatggtcttaagcaagctccacgtgcatggtatgaaagaattgattcttacttcattcaaaatggttttgcaagaagtatgaatgatgcagccttgtacagcaagaagaaaggagaagacgtgttgatcgttagcttgtacgtcgatgatcttatcatcactggaaacaacactcatctcatcaacacattcaagaaaaacatgaaggacgagttcgagatgacagatctcggtttgctaaactacttccttggaatggaagtaaaccaagatgacagtggcatttttctttcacaagaaaaatatgcaaacaaacttattgataagtttgggatgaaagagagcaagagtgtaagcaccccacttacaccacaagggaaaagaaaaggagtagaaggtgacgacaaagaatttgcagatccaacaaagtaccggagaattgtcggaggattgctctatctatgtgcatcaagacctgatgtgatgtacgcaagttcttacctatcaaggtacatgtcatcaccaagcattcaacactatcaagaagccaaacgagtgttgagatacgtcaagggaacgtcaaattttggagtactctttacaagcaaagagacaccaagattagttggctactcggacagcgattggggtggttctctggaagacaagaaaagcaccacaggttatgtctttactcttggtttggctatgttttgttggcagtcttgtaagcagcaaacagtggctcaatcaacggcggaagcagagtacatagcagtgtgtgctgcgacaaaccaagccatatggttgcaaagactttttgaagacttcggcttaaagttcaaagaaggtattcccatcttatgtgacaacaagtcggcaattgcgattggaaggaatcctgtgcaacatagaagaacgaagcacatcgagatcaagtatcatttcgtgagagaagccgagcacaaaggactcattcaacttgagtattgcaaaggagaagatcaactcgcggatgtacttaccaaggcgttaagtgtttcaaggtttgaaggtcttagaaggaagcttggagtgaagccgagatatgattaagggggagtgttgaagaataatcaaatctcgtataagtcaaagtcacattcgtataagttagttattaagttaagagtcgtgtctgttacacagttgtgtctttatcaagagtcatgtcttttacacaagacaatgtttcatttcatataaatagatcgagtctctgtttcctgtaacacaattgagttttgtaatacaatcaagtcaataagattgattacattcatactctgttttttcgttcttactctgttcttctttcataacaaaacattaacacagctgacgtggcattgaccttcttctgtaatacgcctgatgaaccgtatcaatactccctccgttgagacgaagcttgtcctcaagcttgaaattaggaaacaattggacaaactccttggacaacacccacgaaatagcagtctcacgctgatctttccagtgcactaagaactcacgcccacctgtaacttcattggtgtgagaaaagtgtctggattttcatttgtaccaccagtctgagtatactagtggcttctttcatggaaaagaagaaagacgcgtcggaaacaattgagatttggtggcgtaagagacaaggcaaagtagggtttgtttgttgtcagggaagaagacgtcgtatagattcagaacgttaccacggtttactttcaagtttaagtgtaccgacaaatttacttcactgtatactgaaaaggcaaaattaagaatttgaatggtcgtaatggacagaaccaatgacaaaaccacattttatacactagcggatccgagtaattagtattttattttttggattgaaaagattaatctagtgatttattaatttaagcataatcaaggacacttcgattgaagttttccaaaacaacaacaacaaaaggtccataattcacaaacaaacacaatttcaaaaaattgcatacgaaacatagaacaaatataccaactaaaagtctagatatgatgattgttaatggacggtcaaaccttattgatatcaaacgacgtcacattagcattaccttcctcaccattactttgtccaatgattgttccattaggaggtggctcttgacggataccatcgttgactgctctattgttactcccctcgtgatattgtgagtccccattcttaatagtgcttccttcctcttttactcttaactcgcagctcatgaaatcaaaagggtgttgtcttggttcacacatatcgatggttggagtattgatgatgttgtgatgttgtagctgttgagaggctgacccaaccaaaccatggaaagtcatcgctgggaccctaacttgctctatatccaaattagggcatccgttgctactgcttccttcgtatagaatatggtttggtaggttaatctcgattggttggtaggttctctaggtttaggggacgcaaaaagccatttatccaccaagtaatgactttgattcccccttagtgcattaccaatgctaaccctttttgttgcttcataattcttccaggctctctcatcaacctgaccacctcttacaaaaacatcatttgcgatagtcgtgagctcttcgaattgcgcctcaaatggaggcacccgtggatcaccaagaggggaatgttgcacaaactctagctccttcctaagaagtatgatattttcccttgaaaaagatatcaatgcattaatctcactcaagtcaagatcatcaagtcttcgaccacgatgcagttctaccatcaactgatcggtgacatgatccatgtgcttcctttgagtcttcatgaactgctcatgaaccttcttggtcttctcctttaggtacatctcaagactcatctgtttcttcttcttcttgatatccggtaaggcaaagaaaccgtctaggaggtcacgagccttctcaaaagatggccacaccattggctcaacctcatgagggctgaacataatgatacaagccttaacagcacacaatataatatagttagttcttctacctttttcattaaccatacccttattttcttcaatttttttgctcttgacttgttgttctctacccatgcaagtcttagtttgtttatcgccatgctcactctttgatttgatctctcgtttttgagttttagttttttgttggatatctgaataaagattaacgtaagaatttatataaatagagtttaacactggtgccagtcaaaagaaatagataaggtagatgattgattaagatgtaagattaattactatttgtttaatattgttgaaaggttattgtggcgattaagataaaccaaacttttcaatctaaactaagtcaaacatatcaatccaacaattaaaaaatttcctttattgttggttaaaatagttatttttcaaatatcagcaaacatcttatgcgattttgaaccaaaatgaaatatagaaataaaaataaaacatttttctaaaaagagttaatatcattttcttaagaattcgatataaacaaacaaaaaaaagctaccaaactaatatattagatttggtttatatttatattatatttcaaaattaaaccaatagaccaaaatttaaacccaaattaaaccgaaatgttataatctttttgtggtcatcttgttccatggaattgaactctttgcatatcaaaattgaatttacttccaaacataattctatcattagttaatggtaataattatattgaccacattattttcattattgtgcaatatattaattggtattgtttacaaatgttttgggaaaaagtgttgactatacattccaacaaaagtgtcattttaatatttttatattggaaaagttgactcattatatttgtttttttatatatttttcattttatttgttttcttaccaaatgttatattaagattataaatgaatttatgggtttgaatggtaacacattatgaaagtggtatattgtgtacaacttttatatataccaatcatatttttttttatttaaagcgttcttaagagtctgattggtaacacaaaactataaaaaatttagttgttaaatggagctataagcattcttcggaatagtacaaaactataagaagaggtgtaccagaaagctgtacaaaaaaactgagggtaaagcttttagtaaacgctttttataaagcttttgtgattggtaattgtcaaacttgtacaaagtatacagttttgatagtgggttaccattcaaatccgaaaagttttactctcaacttttttgtataactttcttgtacagttctttcctacaattttgcactattccgaaaaaaatgagattaggaatgaaaaaacatatgatgctacttatggtatatttgtggttacaaaaccctagagtttcattaatatcaccagaatagagaatgatcagagacttagaccaatgggctctcaccattttttaacttatattttgataaattgttagatgagagagcttgtgtttcaaaaaaaaaaaaatcatagtccaatggtatagaatctatggtggagttctttggaaagaaacaaaaattgaaaatcttaaatcttaaatcaaaaccaaaattcaacatttacatccaaaagacatcaaacaaggtttcactaagatcaattttctaagcaaactcaattcaagataatcgaatacataaattaaaatcttagtatctattgatctttatgtatacttaatacagaggaagatagagaacaagaactttctgtagatcaatggattacaagaaagacttgttgctatgaactcttggtttcttgcaaagaaagcagaggaagttcgtagactttgataaaaggtaaaacccttattcgttattgatcaaaaactgaatattgcaaacacccaattgaatccttatataagaactgagtacataatgaaataagaagaagaatgtaaaacttcctttttgctcatcaagagagaaaagataaaagaaatcaaaaccaaaaccgactaagaaaacccaataaccccaagattcaaaacatcaacaaaagaagtagaagctcaaagaagaagaggctgaagcctcaatgtgtagttgcatcaattacgggactatcatgttcaacaccaataacacctagattcagttttgatcgtgagacaataagaacaaaaacttaacaacatgttcaacaccaatctatattggataggaagaaccaaaactgatcgttaaagcaggtttgaccaaatagcttttaatacctcttcctttagccttgttatttgatcacgtatgaatcacaaaggagctacttctagttgtttccaaccctaatgatgatggaagtgatcagggtgtcttggagaagaagttaatgtgtaaaacaatttgtgtttaatttattgatgttatgagtttagtttggtttaagtggatatctgaactttgcttcttgtctatcggatgtatctttgtagcgtaataaatgtatatgtatgaatgactttaaaatccaattatcaactcaatggtaatttggattgtcatatcttgaaaactttggtttgaatctttatttctaagaatgtgaatgtaagcaccttagaagctacacgttttcaacaaaagagaataaagtagacagtggtggaggtaatggcgaagccgttgaccggagaaacaatcagagttgttttcgaggaggagagtgagaaacaaggcggcaaagaaagctatatgaggaagaacaaacatcgccgtgtaggcaagtacagcaagtttctgtacacgagcaagagaaagtacagcaagtttcaagacatatcagttattgagcaggttgggaataccgagagacatgccagagtattgaagacacctgggagtgttcagacattatactgttgggatggaatgagagtcaacgttcagctgtatgtagttgaaagcagtaatgtcctctctacaccaattgtagtggtgatgatgtgtattcaagagaacatatagtggaacaagagacatgattcaagaagaatgaaacatattacttttggtgatgcgatgtctcacgtaaagcataaatgggaatataagcaattacaaacagtttcagacttggagttttgttgggacagtgttcgatggaggacgaaatgagcaaacgacaaagaagatgaatgatgctaagtcccaagatttgctactgttacacatataaaagaccatttacaaaggttaaagttgtatctccaggaaggaaaacaagcccaagcacatttgagcatctataagtggagtctttacaacttgttatctgcaaatgttgacaagagagagtcaatttttctgtgtgacattgttggaggaagaagaaactgcagtacagtagcttgaatcaagtgctgttatgaactttactttaccattttataacaaagttccacagtgaggctgagatacattgctgcagcatttttaagttcatgtcaaggatttggtgtcattttaactcgattcttttgctagattgtgtgagttttaattgtgttagtgtgtgttgtgtttgggtaatgaaaaagtctatagctttggaatgtaatgaaaggtcttctaagtttgcattacgttcaaataacaaatgctataagaagaagatgttcttattataggccatgtttgtgtttatcaacacttaaacaccaaatatttgtcttgaatctctgtttttatagtcactcaaatcaaattatgtgtagatcatgaatctcactcaagaaaatctgaaatgtgtcaaatccttaatggggaatcaaaatcatgtttctagaaatcttttctttattaaaactgatggtttatttgtgtgtggtttttttgagttcagttcaaatcaacatctcaagttctgcccattcctgactcacagaacaaagagcaagtttgtgatgtccaaagaaggcaatgcagtcatactgattcgcaaaacggactgccaaaacccgcatctgaattctccatcaagggtggtgagaaagttaacattctctatggggggctctcaccattggagatgcttttatgttctcatctcttttttttttttaacaatttttatgttctcatgtttttttatgggaaatagatatgtttatattcggatgtcttcttgtatgactgatacttatttccctggtagggtgcaaacaatagttgatccaaaccttcaagaagatttctcatgttttgggagtctccaacttcgttatttcgaggtaaaaaagtgcctactgctttattccatgctaaagctcttcattaatataaggtacgtttactagaatattcgagattccaaatcccagctcacttgagcacatgatttgattttgaactccccacagactcggtttcctccttttccttgagccaactttattctcttaacgtaagtataacgcacataattctttgctcattcagattactggataaatgatcccattgtttttatgttcatggtgtgtaacctgacttgtatatagctattgtacattgtgggcctttttagattgattcggcctgttaaaggccctgttgctgtcatcgaacacgttctactcttgtcgtgttcgaacttgtatctttattatttaaggcttcgcttgtgcctcaagaaaagaagaaatcacaaattgaagaaaagtttgagaaagaaattacgttactgtaattgcaaatgaagccacgacgtggattataattgaaaaaggaaaaaaaaaaacaatcttattcactgaggaaatttacaattatgctttagttaaattagcagttttattggtctctccttttacggtttaagtcagaaatttttaggttaagctttagctataaataacagattcttctagttcaataacaattattgttcaagcaaaacttttcattttatcttctgaacacaatttagagttcttagtttcttaccaaaagtcccaacatctttgcttctagctcaggcgttcgtcaatcaaatctataagaaaagttgagaagcaatggatccacttcttgtataagaacttctattccatggagaaattaaccgggctcaaagtatgagctctatctggtatgatgtgatagttcttatggtaaaatataccgttttcaggcttttgatagcaaagtttatttcaataaacttaaagtaacataaacacaagtaggggatgtgatagcaacaaaacaattatggtatcagattcttagtcttgtggtaaccccaaaaatatgaacaagttgggacagtaaaggaatggatctttgcgttgtggatcttgttctttgttaatcttatccgaatcttactcttttgagctgaagcctaagttgccatggaataaagtcacatgtttctttcttcaacgccacgactctcttttttgccaaatgaatcatcttcttgcactatataacttttgggatcaatgggtctcttaaaaacctcctcttaagaaaagattggtgatcgcaaatcagacatgtcaaacgtgagttttcttgagttgcagtacaagctctccaagaacaagatgttgaggaagccttcaaggatgttctctagagatagacaatcctcagggctatcttcacctggaccaggaggcttctctcagccttctgtgaatgagatgagacgtgttttcagcaggtttgatttggataaagacgggaaaatctctcagactgagtacaaggtggtgctgagagcgctaggacaagagcgggcgatcgaggatgtgcctaagatctttaaggctgtggatctggacggtgatgggtttattgatttcagggagtttattgatgcatacaagagaagtggtgggattaggtcttcggatatacgaaattctttctggacttttgatttgaacggcgatgggaagataagcgcagaggaagtgatgtcggttctgtggaagcttggtgagagatgtagcttagaggactgcaacaggatggttagagctgttgatgcagatggtgatggattggttaatatggaagagttcatcaaaatgatgtcttccaacaatgtctaaccatatctctctctgttgatgtaatcaaagttcattattcatacgatctaatttcaaaacattaagtcacgttcttcgagaatgagaccaataatagtagatataaagcaataaacttgataattcctcatgtaaaagggtctagagcagatgaaacttgttacagcgtagcaaatactattccatttcccaactgctagcaaagttctggcgagagcttagagcgcgctatacatgatgcgaaacaaagtcacagaaaacgccgctctaccagtaatccccgcaagaacatttaccgtctttgaagtgatggaaacgtttgttgtctctcacgatcaacaccctaccaatgattttggacatgatcttgataaagttgtgacaatccccacacacacggagattcttgatgattgttagggtcttccttggtggggtgcatatgataccataagcaatcgctaacctctcactgtggtagagtagtgcctgttctttagcctcttgatcgatatcatgaagcacaaaccgtgtgtcaggaacataaaccactcctttctttgcagccatctcctttgcttcatccttgtagaaagtcagatttcgaaactcaaggatcctactcttactagtaaccatatttgtttccttgaatgatttaggtggaggagtaggaattttgttgattacagcctttgaaggatcaacatcaaccatcaattcctccatgtaatcctctaaatcgatatcaccatgtaaccgagcatagttccgcatagcctcccagaaatcagctgtgggttcaaacggaagatcacggatatattgctcagcctcaacaagatgtccacatttcccaagaacacctaaaacacccaaataatgctctgtcttcggactaatcccatgctcgttcttcatcgaatcaaaatgcaaaaacgcttcttctataccaccaacagtagcacaagccaagaagaccgtaaggaaagtctcctcgttcggcttcaacccatgtttcgtcatctcttcgaacaaatgcaacgcatcatctcccattccgttatcactatacgcacacatcatcaaatgccaagaatccatatctttatcaaccatatgatcaaacactctcttagcatcagtaatactactacactctccaaacatactaatcaccatattgttaagttttggatcacctctaaacttagactgaaggaaatgatcatgtaccttcttagaatgctcaagcgacttcaaattcgcacaagactcaaacaacaaaacgaaacattctctatcaggcatagctcctttatcaagcaattcaatagcatctttatatagcctacgctgacataacctcatcacctcttcaacactaggaggaggagctacctcattcatctgattagggctttgattcgagcttcgtggtggttgcggttgttgctgctgctgcggagtgtagtactgactctgattactttgttgaacattctgattctgataattgttaccaggtccaccgtattgaggcctctgaccaccgtactgaggcctgtgaccaccgtgttgaggattgtgaccaccgtattgagacatttgaccaccttgttgaggattttgaccaccgtatggaggcctttgacccccgtgttgaggattttgaccaccgtattgaggtatttgaccaccgtgttgagtagaccattgattagggctttgtggaactcgttgattagtgttggtctgattctgagaatcgaagctttgaggtggatatgggcgttgatgctgagacggtgatccagattgaggattctggtggtaatcgtttgcggcggcggatgtgcttaggtgtttgatcggaattgagtttagggtaccggagaagtggaattgagaggagagtctgggaaatgaagaacgtaactgaaggagagagccgattgtgacgatattctgggttcgtgcgcaacgaatggccattagagaagacattttctctgagagaaatggtgaacgattaaaaccctgataggagaaaccaaaaccctagtgagagtctgtgaaaataagattggggatgagaatattcccaggaaatgaaattatgataagtttcacttttgggcttgttaggcctgttgattaaattatatttgggccgagttgggttaaattaagatattgcaactttaggccttgaatgttttatttttatcaattgtcgtcaagttcttaaatcaatgatctcgccatatcgactcaaaatcacatttgtgtagtttgaataatatttttactttgaagtttgaatataaagatttgaacaaatctataataacataacatattacagtgtgttattaacacattttcgtgtagacaagtaacagatatgtctatctatacagacttatttttgagacttgtacacacaacatttgaagatccctcatgtatgttaggttgtagtaatcgtcactctatatacatcttccgcatcctatacatcctcttcctttctaaacatctctctactacttccccatatggttcacatcacccagtaccttgctcagtttctgcgatttcattcatagtcttgaacggaaaaagcgtttcttaaaaccaagatttgagttcttacgggaggaggacgtggcatatggttgaccgttgagacaacccgcaaatctgatatcccatccttcgatgttctttggaacacatgagtcgaataggaattgcccgagtacgctgtgagcgtttatgctcgttggttggagtgggcggaaggacgatctttctctctgttcttcttgtgaagatgatggatcgctgttgttgctgttgctttgatacggtgctgagctaggtaagaaaaagtggtcacatggcccagtggctactcttcttaggctttggttagagttcacagcaactttctgaaggtcgcatattaactcagagatttcatcatgcgtgtgagctctttctccgagctgccggattttatgtaagtgaactgatatggctttctccagaaagttggagataacagcccggtattgtatagggttatgtgcgtagtgtcctgaagacagagaggagcaaaaaagaccataacctcagattttgtagcattgacaataaaaccaatagctatcttcaggacatagactaaccattatcaaagaatggctaggccataagagaccacgtgatagcatataccgcatatcataaatatttgtcacaaccatagcatgttgactaacctgcatgaggagaatttttccacttgacaaccttaacttctcctcccagttcctgcaattgatgggtaaagcttgaaattacttgtagaggagcaagttcatcattctcggagcacaaaatgagatatggagccccaatttcctggaaaatttatctactgttagctagaaatttgagaatccaaaatcaaagaaggcatagaaactcgttggaaacttacaaccgatgagtagagggcctgccagtactcactacgttgggattcaaatcttgtaagatataaaccatcaagcccggaagaaatccctttagccacccaagatactagtctagaaggaccagacattcgtcgtatggtgggatgtagtgcgaatttcacattcaaatcactcgtaaaatccaacgggccagagtcatagacatgtccagaaagacaggttctaaccaactggctatcatccttcacaaaattagaaaacaatcaatgagtcaaaactaaatcaagagagaaacaacataaaagcagcatttgatgacttcaaataaaactgtataggagacaattctcaccggatgaatttgagcttcacaatcatccatgatcacctgcattgtttaacatacttttagatacccattgaaacagaaacataaaaaacagcacaaaatgaccacaaagtagctggaagttgaatccttttaagcttacctgtagaactttatacatacaagctttaggagcaccagagaaagctagaaagataacaggacatggtctactctttaactcctgaacaataacaacaatagcaacattaagtaacacaccaaaaccaaaaaagagagaatcatttaacataaacatgtaccaatctaaaaaaagaactcatcacattcctgaccataaaaccttacctcaacaagttcagaaagaagatggaatgctaaagaaagagccatttcaggataaaccctgaaaaacatagacaaataatcaaaactacttttagagattctcaaagaatatctaaacggaatcttttagatttctttacaattttgattgataagaattcacaaaaacgacatttacagaaaaaatcacaaggaaccaaaagattttttctgctaaatgctcatttacaaatactaagctacacaaaaccattgatcatcggaaaattctcagaaattagctagttcgccggaaaatatactcagagagatagagagaacaagagaacgaacttacgcggtgagaaaatcagcgcggcaaacaagagaattccaaccaagagaagaataaagatcaacgaaattcataagctggttctcgttaatcgagctccaaacaaagatcacaacaacaccgttagatccaccaccgtcaacaaccgccgcatcttccatctctttatctaacttcttcccccaataaaccctaccaccgccgatcattttctccggcgacgagacgacgattatgattcactcaagttttgattttggttatgaaccactcgacgaaagatgagatctttgggatacgggtccgtggttgttatcatcacccacgtcagatccttgtgtttaattttacctcttggcgtagtttagttatttcggttataatgcgcctttttttttaacgacgttgtttgtttgccacgtcattagtttaccgtgtaagtaatggtcaaatactataaacaagacatgtttgcttcatccacgacttctgtaagaaatgcaaaaggtctcttttttttaatataaagggttcctatcattcctccaaaattggagtatggagattaacaaagtccaatttaacaacgataggttcaagttgatgctcgtttaactcgtaaaatatacgacgcatggcttagatagactctttctatgtcacatctccaactgattacatgttctttcgtgaaaatgtaatttgtcgtggtaggttaaattgtttgactatcatgataaatttaccgcagcaattttttaaatcagtagatttcacccaaagacactgattttcaaacataaaaactggtccggttatatgattctatctacatatatatacttttgatcgaggacaatttttttagatacaacattcattcgtacaaagaggaatgtctaaaattccctaaatatttatagaatattagagtcccagtcaacttaaattttgttaattatatacaattgtaatgacccgttcatatcgtttatacaaattaatcaatttccttctcgcatgatccacacaatttcatttataatggatatgatcctcttactttttttttctgtcaatgatgttcttcaaaaacttcacaatattgtgcaacacatagaagcctcacatttttcaagatgatctaacaaaagcaaacttgttgtttggatttgacataatacaattattgggccttaataggccaacgaaattggcaaggtgaagaagaacaaaagtgtgggcaaaagtctgtgccccatttacgtcacctataaatgcattacaacgtgcgacgtatagtggaggtaggtgaaaaaagaatctaaagagagttatagagaagagagataaaagagcttctaaagcaacctttcttcttcctctttgttgtttttgaatttttgttcttcttgagtgtaaatctgtaaaaaccaaaagacaacatcacaagttagtggtgtgtttgtaatccctttgatatagtgaagcttgggagcaagacatctcccccgagacgtagcggttgaggccgtgaactcggttatcaattttctgtgtctgtttatttctttaccaagcaatctctatcactcttttctccacaagtggtatcagagctccaggcttgtatagggttgttaaggagtttcagctaaggagtttcagatcaggggttacaagaagttttaaaagatgagtagtaacgctcgggttgaggttgacagatttgatggaaccggtgacttctctttgtggaaggtcagaatgttggctcattatggtgttttagggctaaaaggtatcttgaacgatgagcagctgctaagagatccacctgttatagaagaggaagctgcagtagctggaagagactatcacgtcggagattttgagctgccttccaatgttgatcttataaagtttgaaaagtcagagaaggcaaaagatcttatagtactaaacgtgggaaatcaagtactaagaaagatcaaaaactgtgagacagctgcagccatgtggtccacattaaagaggttatacatggagacttctctacctaatcgaatctacttacagcttaagttctatacttataagatgactgattctagaagtatagatgggaatgtggatgatttccttaagctagttactgatctaaacaacataggagtagatgtgacagaggaggttcaagctatactattgttgagttcattatatgaccggtatgatcagctcaaagagacgttaaagtatggcagagacactttgagcttgaatgaagtcattggagctgcaaaatcaaaggaaagagaactcacagaaagtggaaagctctcaaagtgaaggtctgtatgtggaacaagaggcagatcagagaagaggtttgaaaaaggaaaaggcaaaccatggagaggacgttctaagagcaaaggcagatcaaaatcaaggccaaagtacaataaaaacaacaagggttgtttcatctgtggtaaagaaggacattggaagagggagtgtcctgaaaagtcttcacaagccttcaagttcagcaaacattgcaacggagccaaaacagccactagtattaacagctagccctcaagacactaaggaagaatgggttatggattctggatgtagttttcacattacactagacaaggattctctgtttgacctacaagaatttgatggaggcaaagttttgatgggtaatatgactcacagtgaagtgaaagggattggtaagattaagatcttaaatccagatgattatgtggtcatattaacaaatgtgcggtacatacctacaattggagaagagcggctgcaagtatgaaggaaaagactttatagtcactttctacaaagatggacagaaagtcatttctggaaaatatcaagatgggctgtactatctagaaggaaaagtagtaaaaggagaagttgcagtggcaagaccagacattgacatgactagcttatggcattctaggctgggtcatatgagcttgaagaacatgaatgtgctggttgaagaaggttacttgtcaggaaaagaagtagacaagctggaattttgtgagagttgcgtacttggaaaatctcacaaacaaagtttcccaactgctaagcacactactaaaggtatattagattatatacattctgatctctcgggatctccttctactccagaaagtcttggtggttgtaggtactttgtgagcttcattgatgatttctcaaagaaagtatgggtgtattttctgaagaccaaggatgaggcatatcacaagttcagagaatggaaacaagcagttgagaatcaaacgggcaagaagattaagtatttaaggactgataatggtcttgaattctataatacacagtttgacaacttgtgtaaggaagatggaattaaaaggcacagaacgtgcacttatacaccgcagcaaaacggtgtatcggagaggatgaacaagaccattatggatatagttagaagtatgcttgctgagacaggaatgagtcaagagttttgggctgaggctacttctacggcagtctacttaatcaacagaacaccgaactcgtttattggtttcaagctacctgaggaagtgtggacaggtacaaaaccagatttaagtcatctcaggaggtttggatgttcagcctatgtccatgtcactcaagacaagacaagtccaagagcagtcaaaggagttttcatgggatatccttgtggtattaaaggatatagagtctggttaccgaaagaagggaaatgcactacaagtagaaatgtggtgttcaatgaaactgagttgtacaaggacacattaagtagtgcagatgaaaggaaagaggaagctgaaaaagagtacaagaaattgaagaaagctagaaaaagagtgtccttcagccatgatcttctcagaggtccttcaactagctgctgtgatttggatgactcatcttctcaaggtggagaaacctcctcatcttcatcagaaagttcagaaaacttagaggaatcagaaatgaatgaggaagttgttggatctgaaaatgagcagtctctggatgattacttattggcgagggacatgaaacgaagaagtaatatcaggcctccttccagatttgaagacgaagatttcgtagcttatgcattggcaacagcagaagacttggaagaagaagagcctaagtcttatgaagaagcattgaaaagtagtaagagaaagcagtgggaaaatgcaatgaaagaggagatggattctcataaaaagagtcacacttgggatttaattgagaaaccagaaaagcagaagctgattggatgcaagtggatttttaaattaaagccaggcataccaggagttgagaaacagagatacaaggctagacttgttgctaaaggtttctcgcagcaagaaggtattgattataatgaagtgttttctttagtggtgaagcatgtctccatcaggttaatgttgtcacttatggttaacatggattatgagctggagcaaatggacgttaaaacagcttttctgcatggtaatctagaggaaaggatcctaatgagtcagcctgaaggattcatacaagagggaaacgaaaataaagtttgtttgttgaggaaatccctatatggcctaaaacagtctcctagactttggaatcagaggtttgatgcattcatgaaggatcagaagtttgaaagaagctgttatgacccatgtgtctacatgagagacactcaaacagacaaagctatctacttgttgctctatgttgatgatatgttgatagcttcagggaatatggctatcatacaagagcttaaaaacaagctgaattgtgagtttgagatgaaagatttgggaaggcttcaagaattctgggtatggatatcataagagacagagaaaagggagaattaattctgtctcaaggaaactacttggagaaagtgttaaaacgtttggaatgcttgaagcaagaccagtgattacaccaactgctgctcacttcaaattcagaagtttgtcagaagaagaaaagaaaacagaagctgttcacatggaaagaattccatatgcaaatgttgtggggagtttaatgtacgccatggttggttcaaggccagatttagcatttgtagtgggttttatcagcagatttatgtcaagtccaggaagggagcattggtcagcagtaaaatgggtgttaaggtatttaaaaggtgcatacactcaaaacttgatttttaagaaggattctaagttctgcattgaaggattttcagattcagattatgcaacagacttggacaggagaagatcagtgacaggatatgtgtttaaagttggtggaaacacaatttcgtggaagtcaagtttacagtctgttgtggctctttcaaccacagaagcagagtatatggctcttactgaagcagtgaaagaggccatttggttgaaaggtttgtgttcagaattgggttttaaacaagataatgttatggttcattgtgattcgcagagtgctctagccctagcaaagaattcagttcatcacgaaagaaccgagcacatagacactaaattcacacaacagtcaatccgacagatttcttaactaagacggtacctggtcaaaagttccagctttgctacgagcttctcaacatccactgagatggagcagcggctacaagtaactccaacagtctcgcaaaacaggaagaaacaagatgagtcagttttgtgagaaatactcaagtgtcataattgagtaaggcattaaattggagttggtgttacctgttaagtgctggaactgcgtaggagttgcaagttccaggtggagtatctgactacacagtttcagaaagaaattgggttaggaaatctcataatgttgtgagattgaaaaattgctacaagagatggtgattaacggcaggtaattacgtgaaagctgttgttattgtgctgagaggaatatcagtttcaggtggagtcctctaagaagccagctgaaatcgttgggtgtggtgattcaactattaacaaagcagatcgagtcagatcacttggttaaaatttgaatcgcaaaatcagttggtgaggaagagcttacctaaggtcgaaattgattgggtattatctcatcgaagaagttgtggagttcgccagagaagttgtgccaatcacccgaattacattaaaaaaaaaaaaatcaagttttttcagattctctggaaatattaaaggatcctagtctctaagtgtgacaagaaagagattagagagtacctttgatgaacctggagttacaaaggaggctgtggtcagaatctaaaattgattccaatttttatcatcttctcttcatcacgggaaagagaggaagcttggaagagattggtgaagatgagaatgggagattatgaggagatcacagccggagctaatcgctggagaagacggccatgatgtgtcatggaaggaaggtgaagatgagagacaacgagatgtctcagattcgccaaagtttgataccaacgggaacagaggtgtcagccggtgatggagaacgtcgccggtgtaaaacgccggaggtaatggcaatccggtggtgtcgttgttggcttcacgaagggacaaagggaaaaggtggtttcagataacgatttcgtcgaggaagattgtgttttgtcaaaaggtggagaattgttgtttgggtttgacataacacaattattgggccaacaaaattggcaaggtgaggaagaacacaagtgtgggcaaaagtatgtggcccatttacgtcacctataaatgcattacaacgtacgacgtatagtggaggtaggtgagaaaagaatctaaagagagttatagagaagagagataaaagagcttccaaagcaagctttcttcttcctctttgttgtttttgaatctttgtttttcttgagtgcaaatctgtaaaaaccaaaagacaacatcacaagttagtggtgtgtttgtaatccctttgatgtagtgaaacttgggagcaagagatctcccccgagatgtaggggttgaggctgtgaactcggttatcaattttctttgtctgtttatttctttaccaagcaatctctatcacttttttctccacaaaactagataaatttggtgttggcgagttgggttccacatgccaaagatatttgccaagccattatgtgttttcaaacataaatgctgcaatataatttttgaccccaaaaaaaaaattgtttcacaccattcattaattggcttaatccgtagaacatcctaactttactaattggaaaccctaattagaactctcgtaaatttcagacactacatacacacatacatatttccaagactcctcgatatcttggaaatataaataaaatgtcataataaatatatggtgtgaactaactatgaacacttggacattagactcatgagtaaacgactcttcgttttctaatgacgttttggagactgctccaccttccttcacacactatttccaagactcctcaataaatctagtaagtcataataacattgatttcgctttattcctttttctctccatatattaacaatcttccaggttcattaggactagaatagttgtagatgaattaaggtcgtagttgagtataataattggttcatgcacaggagattctacaattgtgaataacttgagagaacatcctccttcttcttactccctcaagatcaacaaactttctcaacttacttttgacaaatatgaatctcatcgtttcttgtccggtggatacaactggtacgtgatctttgttataaacggattacttctttcataaagtgtgttgacctatatttccattaaaaaaaacaggagattggttatatacccaaaaggaaacgaaaaagacaaaggaagtggatttatctctatgtatgtggaatttgacaacacaaaagtctcgtctacatcaccaatggaggtgttcgcatatatcattttcttcgtctacaacaagaaagaaaacaaatactttaccattcaaggttcgtacatacatagcctactctctctatctatatatatatatatacacacatatgcattgattagaaatctttgtataaatatacgtctagatgttgaagtaaagcggttcaatgcattaagaacggtgtggggattatcacaagttctttcacttgagacattcaatgaccttgaaaatggatacacatttgagggagaacaatgtgagtttggtgttgatgtgatggttgcttcacccattaccaagtgggaagtcgtctcttttgatgagaaactcgatattctcaagttctcctggagtgttaaggatttctcggtgcttaaagaggagttctatgtatcagaaagattttcaatgggaggaagattatggtgagtctataaaagtattatatatgtccatttttggtaactgctaaaacgtgcataataacgttttatagggatcttcaaatgtatccaaagggagaccctagaagagataaaaaatggttatccatttttttgcggttatctggtagtgaaaccttaacggtggatgagaagatttacgtgatagcacatctgcgagttcttgacccacgtggatgaaatcacttcactaaaaatgtatgctcttttgttagagcttattcatgagatcaaaaattgtagatgttgttggggttcttgacttatggattttaaagtgtcctgctcactttacagacattactttttcttgcagttggcaactggttcagggaccggaacaaagggtggggttatcttgaattcttgtctttttctaaacttcggaaatcatacttggacctagaagatactttttttcccctaaacttgtaaatatcataaaatatgaagttagggtaatataaagacattaccaaagcaaagcaaccaaggcaaaaataataaaaacaaggttacaatagagctagataagatttgggagaagctaacggatccaaagcaccataagctcccgccaatgcttcttgtgcctcctagaagagatgatgttgcgcagctcacggtcgatctgacgaatgaccacagaacaagagactcgaagagagttgtggaggacattgtttcgctgcctccaaaggctgtacaccacgagattagctaccactttccgaaggagagtaggagctgctgaagaagaaagccttgtccaagagagaagctcctaccatgagcagaacagccgctgacgagggcagagcctgaggaaaaccagcatccaaacctgagaagagaaatcacaaagcagcagaagatggttccttgtctcggtgtcaacagagcaaaggcaacattcagcagagttgataaggccccaagaaagcagcctgtgaagggtagggagacggttaaggttagctatccacatggtaaaagcgtgtttaggaacagcgcctttgaacgtgatagactttgtccaacccttcaaagaactcctacgcctgaaaccctcccaggttgcggcgactgagaagccctgactagcgtctccattcatactccaaaagtaacagtcactgtccagatgaggcagaggagcagggagcgaagagagaagagcgaagatagagtcagctgtgattgaccgtggcagaggatgcctccatcccgaagcgtcaaaagcatctgctacctttgcgtttaaaggaattctcagcggtctcaattcaacattacccaagagcttaatcaaggggcccttataagtccaattatcaaaccagaacgaagcctttaagacatttcccactttagctttgacgaaccgctccgccaggggccttagatttagcaacattttccagctccaagggtcactaatgttagcctccacccgccagaaagaagactccctaagacgatgatggcactaccactgaacccacagagaatctgaacggttaaacaggaaccaaataagccttagaagaagcgctttgttccactcactaaaccgcttaaaacccaaactgccttcactctttgggaggcaggaatgcacccaagagactttagcgcctttacccacatcaatattacccgaccagaggaatttggaacaaagaccttccagctttttaatgcagcccttgggcagaaggaaagtagacatccagaaattgattaagccaaatataatcgaagagataagctgcgcccgacctgcgaaagacaaggacttggagacccaagatcagaatctagaagagagcttctccagcaaaggaccatattcagcaattcgcagcttgcggcacatcaaagggagacctaagtaccggatagggaaggctccttctgggaaaccataggcaacagaggcgctcctctcagttaaatccagacccgcttggaacagctgacttttgtccttattaactctaaggccagatcaatccgcaaagtcatcaagcgtctcgcaaatactgtgcaaagaagagcttcccccatcagaaaagatcatcacatcttccgcaaacatcaaatgggagatagagaggtctcttgtctttgggtggtagtgaatataaccagagtcatagcgagaataaagcagcttggagaacacttccatggctaacacgaagaggtagggagacaagggatcaccttgccttagacctttagtactgttgaaaaaacctcccgagaccccattaatagagattgagaaggaaggcattgagatgcactgataaatccagttgatgaaccgatcagggattgcaagcgccctcaaagctgcaatgacaaactcctatttgacggagtcaaaagcctttctcaaatccaccttgagcattccccaaggtgagatatgcaacctgttataaccatgaaccatctccgtggtaaagagaacattctcagctaaagatcttccaagcaagaaagccgactgagattgaccaatcacttctgaaaataagccctgcaacctgccagtcaaaaacttagatataattttgtacagcgtattaaggtaggagatgggcctaaaatctgatatgaaagaggcgttagaggttttagggattaagacaagggtggtagcattccactgcttaaggagctgcctagagataaagaactcgtgaatggcagcagtaacctccgacccaataacgctccaggaatctctaaaaaattcaaccggatacccgtcaggcccactaaatttgttccgcgggagagatttgaaagctgctttgatctcatcatcactaaacagcctttacatctcagtagactgcgcctgagagcacctataggtaagcagcaggttcatgtcatcttgctccaacgagaagggagtctcaacctcacccaacagcctctcataataggccatacaatgatcaataataccttgttgggagtcaatcaccaccccattgcagtcaacaagggactttatggggttaaaacactttctggaatccgccattctatggaaataggaagtattgctatcaccctcagcaaaccaagaaaccctggatctttgatggaagaaactctcctcagcagaggaaagcaaaagccacttacgctgagcctccagttccaaggctgcattgagatcggaggcattggcaagagtcaggtcttggcgccttaaaaaccactcatgagcctcttttgtacgcagctctataccagaataattgagcctactgaagtctttaataggcttcttgagggctttcagctttttagaaaccctgaacatgtgagacccaaccacgttagttgaataccaattttctataacaacattcaaaaactcctcattattcaacagaaaattatagaacttgaagggacgcttaacactaataccatcagcctccaacacaaccccacaagacacatgatctgagaagtccaaattaccaaagacaccaaagacggaggcgacaccggaagacccatcccgaacaccagaagagacagaggatgcagcacgagcacagactgctgcgaacttagaagagcttgtgaccaccccacgaagaagcttctttttctttttctttggcattagaacagaaatttccgaccaccgacgtgaggccgacgttggggaaaaagaagcgaaacgaagaaaagaaaggtttttaaaagatactttgaatatagagatcgaatttaatgttgtttctgtcaccaaacgctcagcctaaatcgaagctctacctatctttaagatatctattatctaccatgcatcaactactaggactactctttttttgcgttttattaattatctttttacttatttaattttctataatgtaatcttgtttttcttaacctagctagtatattttattttggtgtggtgaacatccaaattaatatataagaatgtttgaaaaaataatatattaatatcaacgctcattgtgttcttataacaaaaaagtaaataaaaaagtagttgctttcgtttattaacattgcttttctatatagagtttatattatgttgcataatatgaaaggtctgttatccaaataattaaaaaagatgcactgctcggagccttctaattaaaatactttatacactagacgtatgctaaaaacaccgtattgtcttttacatagagatcatataacaaaaaaatgtatatataattttttcagtatatatgaatatataattataatgatacaataacaaaaaaagccataaaattgatatgggtcaactttccaattttcagtttgtaaaaatatgattatctaacaattttcagttttttgtttttgtttttttcagttgttttgtaacacctccgaaatccgaactatacaaaactaagagtatgccaattgttcggttgtcgaataacgtttcacaattacgcaacttgagaaaaactaaacgtaggtgaaaaacaagaaagctaactacagtatgtggattcagtcaaaacttaaacccaaaaaaatccgaagaatccaaaaactaaaagagcaaaacataagtcaaacctaaaaaaatggaatgggtcacacgttattaactaatatactacctgatgcttaatgcttctgaaatgaacacataaaaaaaattgaataaaataaataaattagataaataaaaataaaaagatgtcggaatcatcaaaacgtcaccgtttcatagctcaagagctccgtcctcgaactttgcgcttcaattcccaaaaagtttcttaattttttattttttctcctgtgtaagtgcaaacatctaaattcccaagaaccaaaactaaagatccgtaaattcgaagcaacatcaacgttctcgagcctctctaattattgttttatagaccaaaaattcttcgtttttcttttttccaggaatttttaatttgtatgggctgatcagaaaaaagccactttgtgttttcttttttagctggacggtgtctgaatcattcaatgcctttctcttctctacctttctaaatctctctctctctatctctccatcgaagcagccatgggcgacgaacactctctcatcccaaaggtacctttttgatttctgggtctttatcctttttcccttttttacgcttaatctgattagggtttcttgttttcagtaatcaaattgtacaaagccatgatttttaccattttcgttgaacgattctgttaaaaaattgaaactttctgaatctgagttcttgcgtaaattttgaattttggtttctctttcaagctaatttaatgatacacatgttgtttattgcccttgaattaagcttttttgtttctaaaataagcaaaagatactcacttcacaagagaacataaatgtgtgttttttttgttgtgtgttgttgttgcaggatagttttgtcttcaagcttcctaaaaaatcaccacttgtgttgagaacggttgttctcttgtttgtgatggtttgtactgtttatatttgctctatttgtttaaagcaaattggtgttgtccctagtgctggattcttgaatgttgaagtgtttgagagaccttgtcctgagcctaacattcaaccttgggacattccttatgttcactatcctaaacctaagacctatagcaggtaaatgagagttgtttctttgtgtgtcttcaattttggttcttggttcttatgcttatgtgttgtgggttggaatttggtttagggaggaatgttcgtgcaatcccgttaggtattttgctattctctcgatgcagagatctggtagcggttggtttgagactttacttaacaatcatactaacattagctcgaacggggagatcttttcggttaaagataggagggctaatgtgtcgaccatttttgagacgttggacaaagtatataatttagattggttgagtagtgcttctaagaacgagtgtacatctgctgttggtttgaaatggatgcttaatcaggtaaagttctgaatgttatagaaatttgctagtctctttttaccgaatggttactaaatagcttagatgctgaatttatcaatttgtgatatattttcttagagcagatcctatactatgagatgctctctaatgtcgttacttggttagtgtctaggttatctaatataagtatagtactgagctataggttttagatcggtgaatccataatagagatttctgctttaggggagaactgttttgtggttgtaaacgctgataaaatgttttgactggttctggttttgattgatttctgtttgtacttctcgctcttgacacatgtgtttgattctattctgatggttctgatctctgttagatctcctatcttggtttattggtggattcttcatatttcattatcttgtttacgttgtaatgtgattggtttggggatgaaacttatgcagggtctaatgaaaaaccatgaagagatagtagaatacttcaaaacccgaggcgtgtctgctattttcctctttagaagaaacctcttgcgccggatgatttcagttcttgcaaactcttacgatagagatgctaagccattaaacggaactcacaagtcccatgtccattcccctaaagaggtttcccactctctctctgtctctctttctccctttcactcgttgcatgtgtctgcttattggtctctgtaatactaaacaagtgaaacaaatgggtttcaggctgagatattggcgcgctacaaaccattgatcaacacgagtcttttgatacctgatctgaagcaggttcaagagatgacttcaaaagcacttgcttactttaacaccacgcggcatatcttcctctactacgaagatgttgtcaagaaccgcaccgtaagaacactggtttttcacaaggttccattctagcttcattgcacacacttgagccctgtttttttgtttcctctctgcagaaactagacgatgtacaagagtttctgaaggtcccgaaactagatttaaagagtaggcaagtgaagattcatcatggtccgttgtcacaacacgtacaaaattgggaagaggtgcaaaagacactgaaagggaccggtttcgaaaactttctacttgaagattaccgcaggtgaaattaacactaggagagagtgatgtacataaacctctctcgcagaaaggtcagaccaacttgtaggaaagttttggtagtgccacgaacaggttttgcaagtctttttatcttttagttttctctgtttttctttccaagttgttagctcttaattcgattcattctttatcaaggaactaagagttctattgtaatcagaaacacgatccggttcatcctcttatttgcttctaatgattagaacaaagaacaaagatttggtactttgattgataaactatgaaattgattattccattggtttatatgtgatgccatatataggtgttttagtgattttgtatagtcgcttgtaaagatggttactgaacttttcaaactaaaaatggatggagacacaaagggactctttcttttgcgtacaaatatatgagaaaaatctgtaatattcaagaccatttctctttaaacagatactagaattcatatctttttactatgattttaatagtggttgaacatttgaaatgacaaaaacgatttagtggagtcgaactccggtggctatcgatcgggccttctcgatccaaagatgtcgaaaaagaaagaaagataaatcacttttttctcataattataatctcatattgtagtgtagtttataatgtatatttatcaatattcattttgtttttcatttttgttattacattgtagtttttctggaatgaccaaaatataaagtttgctaaaatgtttttaaaagcaaaaaaatatatacaactagatattaacccgcggtataccgcgggcctatatttttattaaataaaaaataattgaatattttttaggatgatttaataaatttatgctattgtttgatttaaatgtataattcaccgcgagacgaaattttataactcaaattttaaagttttaagttgtatttgtttattttgttaaatatttaatattgtataattgtattttgattgttgtttctcggatttcacccgtagtacaccatcccatattaatatcgaatcaaacccgtcaattctaagatttcacccgtagtagtatttaattgtataattatattttaattgtcattctaggatttcactcctaattctatcgcaaattattatcaacccaaaccagtcaattctaaaatatcacccgtaatacaccatcccatattaatatcgaatcaaacccgtcaattctatgatttcacccgtggtagtatttaattgtataattatattttaattgtcattctaaaatttcactcctaattctatcgcaaattattatcaacccaaaccagtcaattctaaaatatcacccgtagtacaccatcccatattaatatcgattcaaactcgtcaattctaggatttcactcgtggtagtatttaattgtataactatattttgattgtcattctaggatttaactcctagttctatcgcaaattcttatcaacccaaacagtcaattctaaaatttcacccgtattataaagtttaaatatttataatgtttaaatttcttataaaataatcaaaatgtgttttaaaaaaattaaagttttaagtgtttttttttaatattgttaattttgtttagtgtttaagattatataattatattatgattgttattatatgtttttttcatagcatactatcccatgttattatccactcaaacccgtcacgccatataaccccgtcccgtgaaattaaacacaaatttgtcattttattataaatatcaaatatttataaaattagaaacttcaaaaaagattaatattgacccaaacttcatcattgaattttgagtgttatatctaagatttctctcgcagtatatcgtcccgtattaatatcttttatattgtttaaatttgttgtaaaatttaatttataattttgtaaagtttataaagtttcaattttttaaaataaataaccctagtaaacaaaccattttaattttgtacacctcataaatcaagtttcatgctcattcgtaatcgaaatcattttggtcctttttatagtatggctcttgaccattgtccaatttttttaagcgatgtgggacattctaaaatcgtaattattatccacccaaacccgtcctaccatataacccagttccgtgaaattaaacataattttgtcattttcttataaatttcaatattataaaatttgaaacttaaaaaaatacaatatcgacccaaaattcatcattgaattttgattgttatatttaagatttttcctgtaatatatcgtctcgtattaatatattttttatatatttataatgtttaaatttcttgtaaaattcaatttacaatttttaaaactttataagttttaaaattataaatatttaaagcattttttaaagataaactttataaaaagtttttaaaattataatatttaacttttgataaagttataatatttataatttcttgaaacattttaaagtttcaattctttaaaataaaaaatccgaataaaatcggataactattttaattttggacgcctgataaatcaagcttcctgctcattcgtaatcagaatcattttggttcttttataatatgggtctgaagcattgtccaatttttctaagcaatgtgagacattgtacacatattatttcttcataggttgaataatatatgtctgttttaaaaaatttgaattacattatattcagaaaaaatataatattttattaactatatatattttatataaattcaaaataaataaagtataatatcaaataaaaatgaaagaagaattatatatttctgtttaaattaggtagaaatattttaggaaattagttaaggtaaataagaaatatggttagtttagagatattgtttatattaaatttggtaattaaatcattaattttcgtttttaattattagttgttaagtaacttttccaaaaattaatgttatccaagatcaaaacagaattaaacatgttatccaggatccgaacatagttaaaccgggtaaaacccacccagttgaattatggctcaaatcttcaacattatcttcaaaaatcccctccaaaaatgtatatatagatacgaacaaaacagtaataagttaagtaaaacataggtagtgtttcactatttctatttttttttcatccaatatcaaaaagtattaatatatattttttagttttattgtttataatttttgatgatcatgctttatactttttgcactgtttgttaaaattaaaagagttaactgagtaattttattttgggttttaactgaatttattttattgatgatgtggacacctttaaataagaaaaaaactcttattatatatgaaaagggcctctgtaatgaaatatggctataaaaaaacgattaaagtaactcgttttatctagcattcttttttatatgaagaaatagaggacgcaaatctcaccaattatacataaaacgaaaactattagacatatacattgttctatgttctatgtattttcctaagaacacattcgtttcacacaatgaatgagatctcaaagattttaccttagtcatgtgcattatatttctaaattttagaaatttattatccaacatttttaacttcttattcttacgtcatcttctatgttaatctcattgcctctcgacatgtactttcttttcaccttctattcattcatatataatatatattggactttgaattgattttcaagacatcataaatattttctccttaattcctatctttcaatactcaattttttggttgaaaagcatttgattcaattgatgaaatatcaaagttgtttttctttttgataatgttataaagttgtagttccacttgaaattaagctacacaaattacatatatatatcacttttttaacggctttcatatcaattttgtatattttgttgtagatctcatgaataatgttatcattgattatttattttttaaagatggatgataatgttttaaaattttcaagatatctttttatatgatttcacaagataaagtgttttcatataatctcacaagataaagtatgactcttacaatatctttgtcttaaattataaatttaaattgaatctaataatttttatttttcattaagtaaaaatttaataataaagaaaaatatgtagtatattgttcttagaaactaatgttttacttttttttttgtttaaaattttacatatagaattacatatatatagttgtattctaccatgcattttaaacttattccattctacaactcatttatgcatttaaaattttgaagtatgatcatttttaaattttttatcagttaaaagttgaattatatttttataatattatttttttattattttaatatctcatttatttacataatttatttttcatttatttaattatttttattaattataagtaatagaaatatgcactaaatgaatgttttaaatttattttaatgtaaaataaatagtgatgtttagatgggtgcttaggtggatgcttatgtggatatattagatggagcaaggactctccttaataataacaacaaaatatatactgttttgtttatattgaaccaaaccaaataaaataaacagtaaacagtatatatatagatttgagaatttgatttggttcaattttggtttaggaataataacaacaaaatataatgaaatactagaattaaaagacaaatattaatttcatataatatattgaaaaatagatattaaggagatacaatcctaaacaagctcttcttttacgaccacaagatgttggaaagttttatcgtcacttttttcactgttgttggccacatcctcttgtttggtcttttgaggctcaccattaatttcacgatttagtttacaaaattttcttttgttctttgcacgaattctctgttctctttcttcgcttgtttcattcttgtagtgagatgacatatgtgcagcaaatttttgagaagtattaaagacgccattgcacttgggacatgtatatggaccatatttttcatatggtagactatgtgtcctaccatcattgtgatcattgttacttttctcgttttcttgagactcaatgtaatcagtagttgcttcaaaaaatatggttggtttcaagattttcttcatagaacgaccatcttggagaacacgttgatcatgattgtgctttgatgacaaggaaaacatgtctaaatgttgaggatatgcagaattttgactcggaaaaatgacattaagaggtttaggattcaaaaattcgcattgtttatcaaaagtatttggaggagaaaatataggattccaaatattggttttgggattcatggcacgtttgacacgttgagcatcatattgtacagcgtcaagtgtattagtaggaacaatggctgtaaatttgtttgtaatggtttgtgtgaaagaaactcgagtaaaatgaggattgtttgtgatagaaaaataattgtcatcagaaattatgtttctcttcatcatatgattttccacatgtgaattttggaatccaaatgaagatgaagaggcatgtgaattatgaaaacaagaaaaagaaggagatgatgaaaacagatcaccatggtttgtgtgatccgaagtaatgaacctcgaatgaaccatttgagaattttgattcatttggatggaggaaaaaccacgattgttatcatcacagtgaggattgaacttatttggcatagaagacattttgaaagatagatagagtatatattttctattgtttgtcttacccttttatatcaaatacaaactacgtaataaatatattaacctcaaaaacggaaattaatctttaaatgcgaaaggaaaaaaatctactttatgttctctattataaaattatattaaatatttataaataaaagaatctttaattattcatttatttccctgcaatcatctttatttatttggtaatatatggatgcaatataaaatttgatttcctgtcatattccttgattcagtaattgaaaatatggacaagatccagatttaatatatatgttaacatatataaggtagtttactttaggaaatatatattcataaagagcatttgttgatgttgtgtcttctatcttaattttgtttggtgatattacttatttggatccctatttagttctataagtttatttactaattattattaaataaatatttatagtttgcattgtgtagatttgcaatcttatcttctaataaaagtttttatcgaaaatcttatcttgtaagttataacttagtaagtaaccatatataataaatgaaaatagttattccgggatcaccttcatcatttaaaagcaaataaaatttaacatttgttcaactactaatgcatataaaagcctatgaaaatatcttaacaaaaaaaactatacaatttgaaggtcaatatgttaaaagtcaataaattagaaacataaaataaataaatattaaacttaattcagaagcaacataaaccatcaacaaatgagtttttagtgcatcctttcattgttttctaggtgatttaatcgccatattcaaactaacgaagataacttaatcttactgcaagtaaagaaaaaaattaacaacaaaaaatagttttagaaagttttaaacaactaaagaagaaaaaccagaactagaaaatcataacacacaaaagaacattcaataataattaaagagataacaaattatcaataatagagagaaacaatgacaaaaacaattagagaacaaattacggaaacaaagaaatatacgaaaatttagagacgtgaaaaagatagatggaactaatgaaagatatataaaaacaaaaactaaaaatggtaaattgaaaatgttaaattttttataaagtccaaataatttggatggaatagatactaggatcataaagaaaaagaagaaaataaaaaagtagagaaaagaaagtgagataaaaaaattatttctttacttacacatgttataggtttttttaacgactgatgacagcatatttattttggcatagtcaatgaatgcttatgtttcaaatatttatcaacgtttaattcatgttttaaataactgcagatgaagttgatgtttaaaatagctaaaatttgaaagttaactaacagagtcgttaaacgggtgataatgtgcattagaggttccgactaataatgacatgtttattttgtcatgatcaacgaatatttatgtctcaaacgttaattaatatttatttcatgttttaaatgaccacatatgaaattactgtataaaatggccacaatttaaaagttgggggagtaaatgaccgcatcctctagtttgatatttttatgatcgccatgaactgcttaaataatttaatatatatatctaggaaatctcaattttctttttgttagcagcactcttggagtgaaatgatatatgtcgaacaaatatttaaaaatgtgaaattcaatatatatatatatatatatatatatatatatatatatataaaagaggtgagttcatacaacttaagcttaaaacattacatgaaagataaggataaaggttcaatgagttttccaagatgcataactttaacaagattgcaaaggctacaagatcttttggaatctatagagattcaaatttaaaggctagctgcaaaaaatatcggatcatcttataaccataataagctcgtgcgattaacgcataagagctttcattgaattgctccatggaagaggctgtgggtggagtctttttcccgatggcggagtaaagtttcggagaaggtatctccttaaaagtgatgcaagactcggaatttacctagggtttacgcttctcggtttctcagccaacggcttgaatgattcgatggaacgatggtagagatggaagatggaggttttgtcgaatgaatccactctcaacacgcatgattgaatccacaatcaaacaacgaacaaattaactcgaatcgagaagataactgttccgcacgtacacaagactttagtgaatccacactaagttcaaatgcataaaactcaaagacaaactttgaaagaaaatacttttctgattaattcttagattatgggtgaatacaaatgaaaacaaggctgagcttatgtaggggctcaagtgcaacgtctatatgctaaaataaagaaagaaatcgcaacaataaatgaaaatatgaccgttggaaattaacaagaggatcggccaaattaagaaagttgtggtgtttcttgaatcttgataacgtaggcaagtaatgatgctgctttgggacgtccatattcatgtaggaatcttgtggatccgcaaaagatgatcagaaaagagacattgtgatttgatctcttttggctccggatgaggaaagtcttggttctgcggatttacataaggtaggatgcaccaaggattaagtgtgaatggttgtgggtggtgtagagaatctccaggtgtccatatatggctttgggacgcgcaaacaagaagaaaattatagctttcctagttggcacaagctggtcttatacataaagtaatttataaagtccttcagaaagtccatcaagcagtcgatcaacaagtgcatcagccagtacgttagctcccattcttatatcaaaaggagtaagtttgatggattcgcattagaagatcacaagtccaaaacacatataatcttccattcaattcaaaacagaaatcatccaatttaaaaaggcttgaaaagagggttgatcgaacatattgaagcggttttatccaaaaggttcgattttcctaccaaaaacgtaaacctataatttttccgccaaaaacataaacctgtgattttcccgtcaaaaacgtaaacccgtaaaaagtggaatccgtaaatatcctaagtttgatgataatgaattaataatgttaattatttattattgttttataataataattaattaaattattaattaaatggattaacccatttaacaactcaatccatcaaattaaatgagttatgggttgactcatttaactctaaactcatttgattatgagttgagttgaattgggttaccaattttgacacccctaagcggatacacctttaacggattaaactactctatttttggagatgataacaaactgttgtacccaacttttatttctacataaaagcagtcggtagttagtctaatggtaaataaaaaagctatctaaactgaaaacgaagttatccgtcttaactgcaacaatcttttggatcctatgtattcgagtatctgaccatcatatttgtcattgttacttttctctattttcaaaattaaaatatgatatattgagatacattgttttcaaaaatttggaaagacagaaagtaggaaaaactgatcctacgaaaatcgtttgacacttaaaactcatattaggattcatagattgttcaaatacttattgatctagatatcttatttttatcttatcttatttttcccgagagtaatagaatattttagttattattattcttttttcctttttattagttatggtttgtataatttacagttatttagtataaaaaattcaactgttatttacttattttaatattttagttttagtgaactctaagtgattgctaaatgcagtgattgatttttgatgaattccggtggcaaaaataaattctgaaaacagtgacaaagaatctcaaattatacaaatttattttagttttctattaattgtagtttgttaaatttaggattattttaaagtattttttgcatcggttatttagtaattttgaatatatgaagtggtattaatagaacatttagggaagcaatatcggaaatctgaagaaatgagaaccgatcgggttttactcaagacaaataaccaaactgcatagcaaaattttggttaggttcagtttggattttcgattccggttattatgcccaggactagtatatgctctcattggaatcaaaaaagtttatagtcatatacgagcttatttatttaagacttaggaataagctctgcattataattcatgtttatagtttctttgtaaacattaatacaattaatgtctatatcttgtggacttaggaataattgccacaaagatatatactttcattatattatacgtttatgtttatagtttttttgtacaaactcttaacaagaaaaaaaacaaatatatttatacacattttcattctttattttttcggacaaagacttgttttcattcatttaaatcaaatcaaatacacattttcattcttttattttttaacaataattttgtattaaaatagtttggtacgttaatatttaaaacataaattacaattaagaatgatcataaaacctgtctaatcaagatagtagtaaacatattaataaatggtcacctacctctctgatcccattttaatattatgccgttcgttcaatccatttttaatttggatcacatttataaaaaaaaactctgaattaactatttacaaatatattatcataccggctctaatcgttgaatccttacgacaatgatataagacttaccgactaactaccaaacacaaaaacgttaccaaaaattttactctcatttctttcgtaccactttttcttaccaatattttatactgttttacctatttccgtattacataccatttcctttagttactaaaaaaaaaacattgctttgtataaccattcaaatagatcttctcttttcaaggctcgggaaactcattggtgatggttccacaactcctgtttggagaacaccgtggctatcgctctcttcccctgtcgctccaatggggccatctaacaaaaattctcatctcctgatggtctctgatctgctcctacctaattctaatgtttggaacttagaactcattagagttatcctgccagaatacgagaaatgcattctcagtcttcacccaagctatctaggtgccatcgatcactgggcttggctccctacaagttctggagactaaacctctaaatctggctactacgaagcccttaaacttgaggaagacttggatccctttggtccccgggttgctcctgatcctttcaactggaaaactcacatttggaacctaaaaacttcgccaaagactaagctcctcttatggaaagcaggtcagtatgcacttccagttggcctcaacctcacccaccgacatatcactgagtcagcaaaatgtcctttttgtgacgatgatgaatctgttcttcatcttctcttcaagtgtcctttttgcccaaaagatatggagtttggcccctttcaagtcccctctgatctgcgcttcaattctttcagtcactgaagggatcgcctcttcgagtaaggctatttgcctccctccatcaggattaggtggtggtcgactctcgccttggcttttttggacaatctggtcttcccgaaaccaactgatcttcaataagaagcaaactctggcggaagatgcttacctccttgcgattactcgagcaaaggaatggcaatcagccaatcagactcaatccttacccgctagaattcctgatccactggtgatacctcgatcccattctatcgatcctgtttgttgtacggatgctgcttggaagaccgaaggttccgcgtgctttggctggatctgcaaagattcacgaaatcaaaccattttctagggatcttccgcatcgttgtcgcctgttgtctctcccttagtagccgaagctctagcaactctcctggcaattggagttgcaattgaatcgggaattaagcggatctcctttgcttcggactcgttaacacttgtcaaagctatcaatcggaagtttctcacaaaagagcttcaccggattctccatgatatccactctctctcaatttcttttgatgcttgtagtttcttctttatttcacgaaagcacaatagcgaagctgatgccttggcaaaagatgccctcctatcctgtattaactcccttatctaagtgaataaatgctaaggtttgtaaaaaaaaaaaaaaaaaaaaaaccattcaaatataccatctcagtaattttctttggcctactttttacatctcaaaagtacaaaccatttagtaaattaatgaagaaaaagttgacaggaaaaatttggagacgccaagctttgcccaaggaatttgtcattgcaactaaagataaataagagtacttcaagttattaactcatattaggttgtaatcggttacttaatcaaatgttaactatataacaactattaatattgtaatatgtggtccattgactttattctgttaagagaatcattaccattattattgcaaaacctcatgattaaggagcattgcatttcttcttttgctattctacctttcggctcggccacattgtttcttaattctccaacactttttaattctcaaaacatttaggagcaatatatcccttattctttttcataaactaaaagtccattttttacaacaattacaattgcgagctagatttataaatgttatgtcacgacagctgtcttttataaatattctcggttattgtattctccttgttcagtgacttgtctgatggctccgcaaattaagtacaaattttgtttctgttttcttttttcttctctcaatagcatggtaatgacatttcaaagctttctcagttagccatttcaaagaatagtccaagtcaaacagatttaatgtgtggttcatttggaatggattttctaaaaactaaatgtatcttgatgatacaaatagtcaactttttttttgggataattgattttccaattaaaaaacaaataacaatacaagttaattgatctaaatttcttatatactccctcttatgaaattaggtgttgttttagaacttaacttttgttttttaaacaattgtgttttacattttttcatatgttttgatgtaaattatagttttatcccactgatctaatgtattgaccaataagaaaatttaaaagtatatcaataaacgataaaaaattatttgttttcttaatatgtaatatgtcaaaaacataaccaatacttatttataaatggaaggagtagtaatcttggctttataatgatcatgatgtgagattttttaaaagtcttttggataatcatatttttgtgggtttattcattttaaactgaattccactttaagacattaaacatggttagagttactgaattctaatactatatgagaattacgactaagaaatcaattagtagttattggatcgactcatatggtattgaatattgatcctttaacactttcgataagaaaattctaacgtcaattgttttaaaatcttttaatgcccacataacatatggagctcgtgaaaagactgagcactctcactactcactagcctagtaatggtggggcaaatttgtttaattgtcaattagtatccgatggacattcttcgtcgaatgaacgcaatagccaaaatacattgtatgtcaaattttacatttgttttttcttgtattcacttgtatcaaacgtcacgaattaaacaattatcatattttcccatcaatttgatggaacctcaacaccacatttaaatccaccaaaaaagtgaataaataatagattaggacaaaaaaaaagtgcgagagggatcaagaggaagcacgtgacaatgacccaactctagcaatttcattgaccgcagggttaaaccctaagcagcctaaccagccttgcttgtacggcaagaatgtcttcctcttcaattcttccgatactgctctgttctcagtgtaatgcatctcgtgagccgaaaccaccgctccgttcctcctccttgacctagacaccgaagattcacaactctctctcgatctgatactcgaatttctcacttcctcggcatctttctttgtaagtatatcgtacctatttaaagactctttggtcggaatcggtcttccatccgatgcactcctgaatagcaacagatctttgagtttccacttcttatatgcacgaccagggaacagaattgctgacaagaaaacagaggatttttgattacttgtgttggaagcaaccatttttgttgattgtacttcttcttcttcatcaaccataatgtctgaaacccttaacggagacatagaacggcttcctttacgatcataacgcgaagaagaagatcctggtgaccggtctcttcctcgatctttctgatcatccgaatcttctatctcaagacccctagatctaggagaagaaacagtaggagtgagaggtgtccttaaaggacgaatctttcctccatcaaagagctcatcagctgcagagaaagaagttttctccaactgaccactgaaattgaactcaaaatcgtcttcgaaaccgatggctgatctcttcttgggagttcttggttggtcatcccaatcaaaaggtatgttagaggaagtggaaggagaagggcttgttggtgcactgaaaaagttgttgccaaatcgagttgggctcgaaggagctgttatgtaaggagacgaagttgtgctgtcaaaattgagttctgctgctgctgcttctgccacttctatctccattaatggtttgttctttggatgctctgttcttcttttgcctttcttggttgttgtaaggtgttcccttttagacgaaaagcttgactttagagaggtacaaggagagagagagatggagaaaatgaatggtgaatgaattaggagatgcctttataagtgttacctacctcatgggtcgtgacttaattattgtgatttttctaactctctattctatatgtttttttggaccaaattggctgtgtttttttttagttttcatagttgtttattttatatatcaagaggatttatacattattggtccttacatctttccagactgaaatttgaatagattacatctgtataaatagaacctgaaactttttttcttgtgaataactcaataaatgtagtctctagctaatttaatatttatcacagtacatttgatgaattaggaagacatactttttcaaaccattatttatcataaccgactcgtttattcatgatttggttttgacaatatgtctaactgtgggtgacaccagaatgaattggttttatttttccactatttttttagtttacttggttttgcttagaagaaattgttttgcggttccgttattcatatggtcaataataatttggttcagttaagcaaaaaaattgttttttttgggcaaaaaaaaaaaaaaattgttattcatatgtatttcctagtattgttagacaaaactttgtttaccaaaatttttcagttatgtatagcaaaatcgcaaataatatttaattactaaatataggattttgtgcaaaaaacctctttacagtcatgtttgcaattttatctttcacgtctaaaaaaaatgcaaaataatcatatgaaatcaaaaataatacgcaatataacccattttcactattgtcaaatttaaaattttgataaataatataatcgaaatcttcgaaatgaggagttcaactatatctttaaatttttcaaaaacaaatgtatgtgatcgtgaaaacgtttacaatatgtaaagttgcaaaaatggattatattgtttattatttttgacttcataaggtaaagttgtaaaaatgagcgatttgagaattcgttgcacaaaactcttgtaataatataagttggttaattaattaatttcttggttataaattttaatatatctatagggattagtttaaataaattatttgtgacataagaaatttataatatatttcataattatttttgagctcacgtatctaaagtttttcaccagaaatgaaaaaaaaagctaaaaacttgtaatttgtcaaactcatgtggggaaaaggttcggttttctcatgcagcaaagagttaattgttgtccttttatttcatgaatattgactattgttgcagtttttttgtactctaatgaaataaaattaatataattgatatcatgttcaatagagatggcttctcgaattcttatttttctacgtgattaacgtaatggttacactaatggcggctatatacctccaaatatccaatttataatctatttttttgcaagatatatataacacactccaaattacattataatagcttaaactctgtgatgtttcttgtgttataatgcgactaattataggtttttattcgtatttgtcaatgtcatcgtctctttttaaaatttaaaattatcaacaggttttgagccggcgaagactagtattactttgatgcatgttactttaagtctcggtttgtggttacttcatacggagaacaatttaattgataactgaaaatgattcaatagctaaaaggttagatcccatatactgtactgagtttagaccctaattagctatatagttctaaacagatgttcaaaatcttttcattacaattttaatcatggttgttgaacagtatgaaaataagaaaaacatgtcatgttgtcatagttattatttatttttttgataaacagtgggagttcaagatattggaacaaaaatttaccgtatttttggttatttttgttttcatagattttggaattgatttggaatctcccaatatcaaaaaacagtccaccgacacatactgcttcttttacacacaaagaaaaaaaaaaaggaaaaaaaacttatattgtttcttctatacttttccctgaaaataagaaaagaaacattttgcatgcaaccaaacgttgttctcgtgtttgctatttgacaaaaaaaaatcaaatcaaattttcagtttaaattattatagttaaaacacaaatgcgtatacataaagtcgtggtcgatggtctatagagtagtactaaacgagttttgcaagttgagtttattatttgagaaactccaaatgtcaatgtcttaacggttgtacaattttgactttggtatacacttcaacatacacatgtaacatgttgattgattacagatttgtgagaacaaacactaaagatgttttaccttcaattaaacatgtcatttggttggaactttcgaaacgatatccagatttttaataaataactactaacacaagtggggaaggtaacaaattgtacttgcataatagtatatgattttgtctaccaaataattgctggggaagtaaattaaaagatgtctatgaaagagaagagaagaacatctttatctccgattcgtttggtttgaaacagttttcaagccaaataaacaaaataaaaccaatgtcaaattccaaggaaacgttggcaacactatgagcaactttggctcttcaaagacttcattgtgcagtccacttcttatacaagcaaccaatcaaaaggagctggatattgcaactcgataacttgttgttgatttccatcttctccgcgataacttgagaaccttctgtgactttgagttgtgtaggatcactctcttccatatagatttttatctctctcaaacatggaaaatattctaagaaatgctttactatgttcatctctttcattgttccttgaagccctttaatctctaatatttttagagggcaagatgtgagtgaccgacctctgtcctatcgagaaacacagtcacaagcatccccgcatttagctgtgacatggtgaaagagaccatggaaacaataatcttccgcgacgaaatcagagtaagataagtaaacaagactaggtgtatcaaatgaaaaactttccaaacaatcggtggattttattgttagtgtcttgaggcttgcacttgatacagacacactcacatcccattctttctagtctatctcatacatgactaattcctcaagcgcaggcaaagcaggaagaagaatctcaaacttattaacagttaaccaaactaagtgtagaacgagaattttaagtattgaaaaaaaaaaaaaaaaaaaaaaaaaagaaaaaagagagttttaaatgtataagttaattccagcttgttctcaaaaacttttggaaacatactatagttttctcctgctgctggatccaaaatgatttatagattaatctccgaaacaccacgcaccatcacattctctatccaacaatccactcgatccgaattcaataccggaatcactgagggagaatttaatgtgagagttaccttgcaatgcaagtactctatcaacaaaatcaacacagagctctttaatatcgtccctttaaattgatatttttgtctgctatatattgtacattgagatgaaactgatacaaaaacgagaagcgcgtggggttaatttaagaagaaatatatatgtgctcaattctttcgttatcattggctttacatcgatttaactaaacactaatttccctcagatccatcaattgtctcccactcaatatgatctaatttatttttattacatgtgatttatcataataacgtctttccaataaatcaagtgggttattggctcccctgtagaatttttgttgtagagattatgttgtagttgtgttggttatagctgtaacttttattgcagtagaattattgctgtaagtttttaactttaaatatttataaaaaatggattagtaaatataatagttgtaataaaagtttttcttttataataaataaaatgccttgtattactaatttaaatatatatattatgatgatataaaaaaaaatcctaagaattcttaataaaataaatctaaattttatctatgattattccataaattcattacaatctaaattttttcttttaagtttgataattatcagtttgtttagaacttatctttgttttttgttatatatttatgttgataattttagttttttgtatttatctaatgaattaaattttctacagctaagaaaatagggttttgagaattc

SEQ ID NO: 232 - DNA, 91106 bp, Arabidopsis thaliana
gaattctgctctggagtctcgggacatgagtgaaaagaaacaatccctttttctgcatagaagcttgtaaattttaactcaggtgcattatcagaacgtacagccttaaccttcactttatattgattctccacttgttgaatgaacgctggaaatactgtaagaacctctgatttagtcttaagcaaatacatccatgttgctcttgaatgatcatcaacaatagtcaagaaatacttatatccttcaactgtttcaactgagaaaggaccccaaacatcaatgtgtagtagatcaaatatctctttacaaactttattcgaagtaggaaaagataactttcgctgttttgccaaatgacatacatgacaaaagtcagaacccttattcttatgcctagtagttcccaatgaatcagaaatagcatcaagtctttgcaaagaagcatgaccaagcctcctatgccacatgctgatgtccacaactgcattcactgagatagactgatctccaacatccaacaagtagaggttcgccactcgtctaccttgaccaagcatccggcccttgataagatcctgaatttcacaagaatttttatcaaatatcacacgggagccaatatcatcagtcaaagaacttatacttataagattcagtcgaaactccgggatgaataacacattcttaagtagaatgtcatcattcagtttcaaagtaccaacaccactgatcttcacagtgggtcctgttggcagattcactgcactcaaaacagaagtatccaagcttgagaataaacttctatcatgagacacatggtgtgtagctccagagtctatcacccatgttgcagaagaaagagtatgacgagctacagtcaaaattccaatgaaactataggtagatggtgaaaaacaaataccaagattatctgactgagaagtgcttgcagttgcataagtactcggaggagtattctgaagctgagaactgaacatagcaatgaattgctgaagctgttccttactcaaatttccaaccatactctccaaactagtattaacttcactagattcagcaacatttgcagccaaaggttttggtttctgaagtttctcaccagccttaccttttggagtgaaaccaggaggaaaaccgtgtttcttgtaacatctctcagcaatgtgaccaactctattgtagaaagaacaaattggcctacctttattaggaccattctgaacatagcaaactgtgggatccatactaggagattgtgttatttcagaaacttggaaagcagcaggtggagcaaccacattggagaaactctgttgactattgtcttgatccagaatgtgatacacctctcccaagctaggtaaagccttcttagctatgatctgcctgcgaacaatagcataagactcattcaaaccagccaaaaacttcactatcttagcttgctccgccttctgttgcagacgcatcgctttaccacaagtacaaggctcatccaaagcctctgtactatccaattgatcccacaatgtcttgagacgagtgtagtactcagacaaagacaaagttccctgacgaaagtcctgaatctcttgagtaagattatacgtgcgtggaagattagtcacattgaatcgactattaagatcacgccatatatcagaagcatcattcatacggagaatgcttcgataaatctgaggagaaacagagttcaatagccaagacttcaccatgctattacatctagaccatagacgaaaattcaaatctgattctaaaggacgagataaagttccatctatgaatccagttttgttcttagcatccaaagaaataagcatagcaacactccagtcaccataattcgtttcatcaaggcgatgagagattatgttcaaacctggatgatctgcactatgcaggaaaaagggagattgagtcggatctccagattccgatgatgttaaggctcgcgaagctccagatctgttaaccggaggagaattcggaggagtagtaacagcaccggtggatcgcgacttccgagtcactgaacttgtaccagctttcgagcgagtcgatttccgagtcacacgagctaccgtcaccattggatcttaaggaaatgcaacgaggaagacgaatcggagctcagaacgaagaaatcaagtcggaaaaaaaaacgatggagatgagagcgttgttggctctgataccatattacgaagaagaagatcagagagagtttgttgaggatattaatctgattttctcattcaatcacataatgtgtaatgtacatgtatttatactatagctatacaattgatttaagttaaccagctaaaccggtatctaatctgataagcaccttcatcagcagtatctagaagagatatttattattaaaataatataaagcagtgaaaaagaggagagagaagtgagaatcgtctctgtgttttttcaggaattgttgattttattttttaattaaaatttaatactttatctgaatttgattaaaataaataaaattttattcatgagaaactctttttgagaatcaacgatgtagatggcctaagtttattaaatatttaccttttactaaaatacgaaggtttaaaaacctataaagaaaaagttaaaatttaaaaaatatttttaagaaaggtgagatttttattttttaaaaaattgaatgtaaaattgtattaaaccaaaaaatgtttttacaatgaatgcatctgtttttgaattatatttttgaaagaatcttgaagtgataaaaaaaacttgatgactgccttacggaatggagctgagggtgagccactccatccgtccgtagtcgtagtttctgtccattgtttcacgtattgagttgagtcgatttctatgttcttgtcgatgagcttgagtagccggttgtgagttgattttatttccccatgtcgccttgcgtttctttccctccaaatgcggtaaatcgtcgattggaagacataccttaggaggaagagtttaatcggaggtaagagttaagttatgtagagaagagagaacctaattctaattggtgtggaagtcaatcccacaaaatttatgcgtaagaaaagccatatttacgatgagtatcaaaaagagaagaagaggtgattttttctctcttcaacattataacaaaaaacattgtctatctattagaaatgtggcctaacttaacccaaaagctagctcaagagttaagaattgtgacatcgtttatataatacttaaaaatcttaatcccaaacaatgtgaaaaattctgatactatccgatcatgtatcaaccatgcaaagaaagagagtactcgggagttgcataagagaaccatatatatgtctttgggccaataaccccacgtatatgtttctttcagttcatagttagctaagtttatgcaggaatcggctgttttgtcagatttttttacccagtttttctccaaaccagagtataaaactgtgagagttcaactcgaaagtaaaagaaacttttaaaatgtcaacttcaatactaagacggatactcgacccgacccggaaacccaaacccgatgcaatcctctcaatctctctcctcactaccgtctcttctccgccgtctccgccatcagatcctctaatttccgacgccgtctcaatcctaacacaccaccgctccaaatcccgttggtccactctccgatcactccagccttcaggcttcacaccttctcaattctccgaaatcactctctgcctccgcaacaatcctcacctctctctccgtttcttcctcttcactcgccgttactctctctgctctcacgacacacactcctgctcaactctcatccacatcctctctcgatctcgtctcaaaagccacgctagtgaaatcatacgtctcgctctccgtctcgccgccaccgacgaagacgaagacagagtcttgaaagtgttccgttcgttgattaagagttataatcgatgtggctctgctccgtttgtattcgatttgttgataaaatcttgtcttgattcgaaagagattgatggagctgtgatggttatgagaaagttaaggtctagaggaatcaatgcacagattagtacttgtaatgctttgatcacagaggtttctaggcgtagaggtgcttctaatggatataagatgtatagagaagtttttggtttagatgatgttagtgttgatgaagctaaaaagatgataggtaagattaagccaaatgcgaccacttttaattcgatgatggtgagtttttatagagaaggtgagactgagatggtggagaggatatggagagaaatggaggaggaagttggatgttctccgaatgtttatagctataatgttttgatggaggcgtattgtgcgcgaggtttgatgagtgaagcggagaaggtatgggaagagatgaaggtgagaggagtggtttatgatattgtggcttataacactatgattggtgggctttgtagtaactttgaagttgtgaaagcgaaggagctttttcgagatatggggttgaaggggattgagtgtacttgtttgacgtatgagcatcttgttaacgggtattgtaaagcgggggatgttgattcgggtttggttgtttatagggagatgaaaaggaaaggttttgaggcagatggtttaacaattgaagcgttagttgaagggctatgtgatgatagggatggacagagagttgttgaagctgcggatatcgtgaaggatgcggtgagagaagcaatgttttatcctagtcggaattgttatgagttgttggtaaagaggttgtgtgaagatgggaagatggatagagcattgaacattcaggctgagatggttgggaaaggatttaagccgagtcaagagacgtatagagcttttatcgacgggtatggaatagtaggtgatgaggaaacatcagcattgttggccatagaaatggctgaatcactcaagctaagagcagaagaagaaagctagaaaagttgagcttcgttggtaagctggtgaagcaaagatgacaaaaccacatagaaaccaattggtgacacaatgtggacaagttttgtggtggtacgagaaagcggtaagaagtggtacacattgtaagatgatacaacgttacccattaaagctataatgatgaaagaggagatttattccacactaacacctcatgatgatatcttattgctgaagcaattcttattcaaatcacattcattgatagagttacgaggagagacagatcgtacaaagcaatcactcttacatgaaaaaaaaaagacaaatggaaaaagaaactgaagagttaacttaaaagataagagcccagacggggaagacgacgagacagatgatcccgacggtgttggagataccattggctttagtaaatgcatttctgaatccacctgaagctctaatgtgttcttgaagcaagtaacatccaatacctaaacatatagctaaaccaatccaactgtctctgaatgtgccagcaatcaaatttggtgccaccacggcgagaagaaccaaagccaccggtaattccaggtattctaataacacaaacaacagagataagccaaatcagaatcaaagtcttgttgcttgtaatggagagtgaatgaaaaaaagtagacaaacctctggcgtgtttaggaaagaagagttgtacaacaacagctacgaaagcaatccatttaccaatttctcctctgtcaaagtttcagacacaagttagggtttaggaacataatgataagtaaagaaaaagtctctggcttttgttgtgttatacctgaaaataccaaagatcaaggaaggaagactgaagaagatgtaaggaatgagaagtgatgtgagcatattcgtcttccaattggttcgatccaacaccaacaagtatctgcatttattacatcaaaacctcatcaagatcaacacaagaaacggatagaggaaagagacatagaaacagagagaatggttacatggcggcgattgaagcaacccattcgaggacagaggtaccaaagcctaaaccagtgagtgtgaaggcgtgtgtagctaggttcttagcagcgatagtgagctcgttgaaatcggatccgatcatggccttaagggttccatggtcattcctcaacgacttcataggcatcttttcttgccggagaagagagaactatgaataattgatgtgagaagagaagagagtaaagagtagatagatggtgatgaatgtgttggaagactttggttataaagatattacaagtgactcgatggatacgtttacgccacgtggcagttatgaaaatagtttaatttggacgaactagatattttatctatattaacaatgatatagtatagtttacttaataagctaatccgatttctgacatagaccttagacacatgtcgacaccaacttctcacacatgaacgttctaataagtttgctttaacaaatgtaattggtggacgtaagaaacaatgggacgagccagctgtccagttgtatttttttttaatgataatatttattacaatgcaaataattagatatgttatggtggaatctcttaacatggatatattaagaatgggaaaaatcaacatctaaatcatagggtatgtcggtatacattaaagtcagagatcgtcaaatccaactaaataataacaatatgcttcaagcagatttattatatttagccaataagttgtatggattcgttgaagttttcattctataattagaccatatggttttacagttttctactgtaaatgaattcacaaaaatctaaattaaaaaaaaatagaaaaatacttaattataaagagatactagttcgataatcatatatgtaactaagtataaataaaaccaaatagaaaatgtgcaagtaaattgttgagctaaaaaatcagatgagatggatcaaaatccaatcagttaatggttacaaaaaaaaaaaaaaacagagtggcagaagttatggtttttaatatgattatgtgatgtcggcagaagatttgtcttgagtaggaccagccaaataaaaataaattttgttttaccatattaaagttgttgttgacggaaagaaaaaaatgtaacatgctccagaatcgtaacaagtaagagagtatcgaactctcattacggtaacgaaatacagattcatccctagcataactacataagcgacataagctatgaatcagagtccaaaataaaattagaatttttcgtttttcagttctgattttttttaaagatttaagcctaaaacctaaaatgtttaataactcatgagagttgaacccaattttttcttttttctttttcgttttgatgattttagtttttaatcagtatttgtgatctttccatattatatttatgtcgtttatgataattaaaaataaaactaaaattttacttggagtaaaaccctcaatattgttggatcggtcctgaatatgacctcactagttgttactcggttaaagagtatcacgttaaataagctgctgagtgctgacactacgctccacaatatccatattaaataatagaaacttagtttaaccagaacgggaaaaatgtcatttaaatcacgacttcgcaatttgtggtgctttaaacataaactttgtactttgtgattaaaatcatcaattacgtgttgacttcagataaaatcactaactttcgttgacagagccaaattagtcacaacatcaactgaataaacagagcaattagaagatgtgatttatccgttaatgagaccgtttaagagcaaaacgacgtcgtttgcaattgaaacaaaaacaggaaaaatgccatataaatcatgacttcgccatttgcagtgctttaaagcatgaactttgtgccttgcaattcactttgatttcaaaatacaggagtgaattcgaagaagaaaagaagaagagatttgaggatctagggtttcttatttctgaattggggatttttgtttcaattgcaaacgacgtcgttttactcttaatcgtacttattaacggataaatcacagcgttaatgaaaatctagaatggcctgtaaaaattctcccatatatctaattttgaaataattttgctggaatagagtttagttgataagatacacttcaagtgttttgtgttgaaggaaagaactatatgatcgtcatgtggatcaaaagcccaaagcccaaagcccaaaccttttgtaaccgttgtttccgtctgggccaaaagccgaaagctcatttggtatcaataaaaaaaaaaaaaaatcgttatctgtattgaatattgatgatatcttccagcaatctcattcatgattggccacttcaaaatctttcaatcaaattttagttttgggttccctcagaattcctacgttattagaaaaattataatcatttcttgttttatttcttactgaatgatgcgaatgttcctaattacagagtgaatagaaagttccatcttcatataaatcccggttaataataattgaacactattgattaaagtaataaaaatatgtttctcaaacacattactttcacaggtttacaaggaaacttaaaaacatggtctgcacaaacaaaatctgatatatagacatactacatgtagtttctagatatatatatacacatcaccaaagaagagatctagaagtagttgggtatggaaagatcaccaaggaacaaaacggtccatgagaagacaaacagtgagctcagacatagttacagcttcatttttctctctaatcttttggttaataagtcctctttcttcttctgatccttgttgttgtttggacacaacagatgttgaattcttcctttgcatcaatggatttctagtgtttatcttctcactcatcttcttcatctctcccacccaaagctccatagcttttgccattctttccttttgttgatcttaatatctcattatgaacgagagagagagagagagagatgcatgtgagctttatgtagacaaagaatagggccttttggtcttttggacttgcaaaaccatgacaagtttgattggtgttttcaaataattgtgttattgacacgaaagtggacaatctgttttacactttggcaccgtccacggtccaactatagaagagttgtctttttggtatatatatatgtacatagtttctaaattctaatggctggaaaaatcatcaaaatccaaaaaatatctctttggccttcttgaattttccatatgcacatacagtttcaaatcattgaaaccaaaaaatatctctttcaccttcttgaattttccacgtgttcaaataaataaaaaattccacgttttcaaatactttatgatatagtataaatatatttagtgttgaatcatatcatcatccgaccttagctcagttggtagagcggaagactgtagttgtttaaaacagataatctttaggtcgctggttcgattccggcaggtcggatcttctttttcctatttttgacgaattcatatctttgtgatatttgtagtgacgtgtcgttaatatctatattgctttattcgttgcatttggatatggtctggcccaagcgaatcctattgtcttatcttattctttttttcccaaccccacttgccaatagttagatgtatcaaattcaaagtccttctcaaataataataactttaaccagcagtttaccgcgggcaatcggtttatttggttcttatactaaatatttgaataaatttaatatcttaaatttataaatataaatttctagtgattagtgaagaatcgtaatatataatttgaatattattgattattgatttcgtgattgaatatagtattttcagggatggaatgtgatcatactttgatttcaaaaacgacatagattccttatttttgttgaacattttagattgaaggaaattaattttattgaacggtttagattgaatcggatcatgtaaagtttaggagattgttaagaccaaattatccttaatgattttaaatagcaaagaacaaaatccaaaattgaaatctaaattaaggccaaattagacaaaatttcaatttgtacttcccttttaataataaagagatagttagatatatatgagttttcaactcttatcatcctttacttgttgaatccatttgtttcctagtttttgttttattgaacagttgttgaatagtattatacttagtcttctcctattaacaattttgttgaaaattgaaaatgtaatatgagtattgaggctgctcatacttattatgaaaacataaaagataaagatgatatttattccctactgttgacagagtctggtggtttaacccttttatccagttaaacccaaattatcaacaaaaatctttgattaatttattaatcaagtgatagatagtttatttataaaccaaactgcagactgaagaaaatgagattggggtttaatgttgcgccactgcatcaaaaagcttaggagaaatggtatagatgattttaactctatccaagactccccgaaaagctatggggtgtttactataggttatacatggcttgggaacgacgatctccgagagtcaggcttgaggtggattctgagattgtggtgggctttttgacgacagggattagcgatgcacatccactgtctttcctagtacggttgtgctatggcttcatttcaaaggactggataatccgagtttcatacgtgtatagggaggctaaccgccttgcggatgggttagcaaactatgcgttctctcttcctttaggttttcattttttttatactaagccagattttgttaattcgattatgctggatgacgctagagggctctcatgcctgcgacttgttagattgtaatttcttttagttttctttaataaaatgggagacatagtctccctcattccaccaaaaaaaaaagactccccaaaaagcttaaaacgcatctcttatcatcatcattagggatgttaaaaaaggtttcccagcccaacccagccctatttatttaaagctcagccctaagtgagccctacccctttttaagccctaaaaaaattaaaacagggttgagcccttttctggccctttgtagcccttaagttttttctttatatttaaagagaaaggtttttcaaacaaaaacaattataagataataacactattgttttgctgaaatataaaacattgtttcttgtcattttgctgaaatataaaacattgttaccgatatttgtccaaaaaaaactgagcaaaaaaaacttctcatcatatgttagaatctccaactcctgaactacttgtcatctttgtagcatcattatcttcttcagcaaaaagttcttcgatgtctcctgcaatttaatgatacaagttaaattaagagaatgattcatataagttagtaacttcaaattacaattttaccttcaagatctgcatatccacgaagccaattgcgggtgcaaattaatgcttgcacatttggggaagaagacgattcctaaaaagatttaacacccatcctccaacgctgaaagcagactctgatgctactgtggtgattgggatactaacaaatcagatgccattgaagctaaatcaccatacctatgttgattctctttccaaaagtttaaaatttccatgtgagagaaagtcttcatctctaattttggttcatcatccaaatagatttccaaagttgacttggtactttttgaagcagatatgagactactttcaagctcaaaaagatcctgtaaatacacaaatacacacaaaattagttaaacaaaaacaagaactagtaaaagatattcaaatatattattatacttacatcattcacatctgcttcaagtggcgattcattgagaagctcgtgtggagtaagtgtggttgaagagttcgaagaacttgcagatttagtttggtattcttcataaagcgaaatcagattattcctcacaatatcaacttttccctcggccgtgacgggatccactttgttataagctgacttaagtatctgcaactttagtcttggatctaaggcagctcccatagctagaataacactatattcattccaatactttgcaaatttcctttgcatcttcttagccatttctcttacatcaacatcatcacaattagcatatttcatcaacaacaactcaattttccacagttcaacgatcccactcttcttctgtaggcaaagaacaataacctctttcatacaaattcaaaatagcaaatgcttttctgaattttaaagctcttgctagcatttcataggttgaattccaacgagtggagacatctagagacaacccagctccactcttgatccctacgcactctaagcaagttgcaaacgaatctttccttgactcacttgcttttacaaactttacactctctctgatattctccaacagaccactcgctaattctaacccggcttgcacaatcagattcaatatatgtgcacaacacctcacattcaaaaaatttcctccacacaatagcccattaccactctgaagtcgatgcttaagaatagtttgcatactagtgttcgcagaagcattatccagcctgatagttaatatctttttctccaaaccccattctttcaagcaatcataaactttcttagctatttcctcaccattgtttggaggcttaagatcacaaaaagctaatatcttattgtttagcctccatgattcatcaatataatgtgaagttacacaaatatatcctgtcactgtacttcgagacgaccataaatctgctgttaaacacacccgaccgttgtgtttagcgaaaacatctatcaacttagctttctctatctcaaatctcttaaacacatcgagtgcagctgtttgtatacatataggttgacaatccgggtttaaaaatttatctctagccctcaccttttcatattcaacatatcgaaaaggcatatcatgatatattattatctcagaagtcatctctcgatcaactttatgatcattcttaggtctagtttcaggctgaggcctttcggggcaaagtgttagatggcggttcattgttgatgttccatatgacttttctactaccaacttaataccacaatggtgacatctagccctttcttttccatcttcctctattcctacggatgtaaattcgtcccaacacaaagctctctgttttttacgtacccgtttagctcgttgacatggttgagtgacactttctgtttggttctgcccttgagtttcaacttcagcattcatctccatcttcgtgcgttcgttttcagcttctagaagagcaattctttccagtgattgctgatccatactacataacaaattttaattacatcaacataaagtcatagctaagtcttaaataaagactttagtaaaatccaactagtatttgactcaaagttctcgcatcatcataggcctgcaagacactaagtaacatggatctccaataaacttgctgcataactaaaccctaaacatagcttaagctatgttcctagatagcagaagagtagatatttagtaaaaaccatcaacgtacaaatatactagttggatatgagtatcatcaaagctaattaagatcaaatacatacatgaatctctaaaattaaaatctgacacgaacccaaacccaacaccaacctaaacccaccaaaatctaacacgaacccaccaaaatccttcaataaaaatgccaacccagatcactattttgctattgtgacgaaaaagagtagaatcaaagaaaaagaagaacaaaaacttcacctttagggattgaaaaattagggttgttgctacttcaccaagcttctgtttctctatatagtcagatcaaatcttcaactcttatggtttcagagaagaaatcaaataagaagagattgaagaagaagagatcgaagaagaagagcgtttgggagaaagagaagaaaaaaaaaaaaacagagaataataaaagagtgtaatagggccaaccctattttagcccataacaatttgagtatagccttatcttagcccaaaatcttttatttaattttattagggttagggcttatatttttttaacggactcgggccgatcctaaattataagcccatattaacatccttaatcatcatgttctgttgatgattgcaacaaaacctctagcgtttggagcgcactaaaagtaatggtaagaagatgaagatgagtcggtaataggaattggatctgtctcttgattttccaaagatcatacctcgataacacaaccacaacgtttaatcttgaacaccttttgtagacatgcatgtttcaaacttttgagcccgcattctaacactaatcaatgactggctgataacaacaacttcatgacataccaaatgtgtttgcaattactagatagggcggcctctctttgaaaagaagacgttaaaggtagaagagaagcggaggcgtcagttggtaaagctgacgagaacaacaaaatcagctgctgctgctaatggtggaagctttgcatcattaagtagattgaagcttcagagacggtggtgcttgtcacggcgacaatgacggtggccggatttgaatcactttttttaattattttttttctcttcagaaactctttgtttgttttcttatatgtagaacaaaagaaagtatatggactaaattgtgaatatgtcaattaatataggctttaacccaaaacagaataggacatttaaaaaacattatgttaaaaaatattttaaacagtatattttccttttatcaagattaatttaagatttttatttttgttttcaaataatttcattaatgggataagaaaaaaaaaactaaatttaaagacaatctccatagagtgtaaatatttcaataaatggtaaaaaaacatattttaaacaaaaaatctcaaaaatggatataaaaatgtttttcgagatcttataaggtttttgaatatgatatttaacatataatattgtgttaatttttgtaaataaaaacaatttatcttataaattattttagtatctcaattcgaagcaaattcgcgtctcttcaagccaacatgtaaaaacttacaattgcatcttactttgacgatatttatatgtttgtttggttttgtgactttgtaattttgacattgtgcaaaatatatacatatatatactggcaattgtaagataatatcacttataaattttttgtcatattaattcgagtagtaaaaaattatctctttagtcatcatagagaactaaatggaatcaatactcaaccatatatataaatttttgtcgaattttctaacattaatttttattttagtctaactagtatttacttcgtaaattagtaaacatttaagaaatataatgtaattatccaaaactatttgttcaattgattcttgtgaaaaacaatgtaaaagtaaaatacttcgaggttgtttactaatatcttacaaacattgaggacttaatcgaaaatattataaaatatataattctcatctttcttaacttcccatatttaagttgcatggaatcggaagcgggaacgcggaagcgaaagctattacgattgagagagatgagagagtttgttagagattgatggagatattttctcattaactctgtaaaatgtatttgtacaagtacatatactatgactatacaacccgttaacataaccgaaatacataatcaactaaaccacataaataaaccaacactttctcatatgccccctgaagatgaggattcaaagatgttgagaatactcatcttgaacttaagatgttcaaattggtgaggggacagaggtttagtcatgatatcagctacttgatcttccgtgcgaacgtgtagcaactttaactcaccatcatctaccttttctcgcacggtgttgcaatcaatttcagtatgctttgttctctcgtggaagacaggattgattgctatatagatcgcggttgtactgtttgaaaacaagataggaactgaagtagcagccgtcaaagaaacgagcaatgtatgtaacgataccagctcacaagtagcaagtgcaagcgctctatattcagcctcagctgatgatcgagaaacaacacgttgcttcttagatctcaatgatatgagtgaatcaccaacaaacatagtgaaaccagtagtagagcgacgactatcagcacaagaaacccaatctgaatctgcaaatcctttcagagtaagatcagatgaagcagaatagaataagccttgaccaacaatgcctttaatatattgaagaactctgtgagcagcttgaagatgagtagtcctaggtgtagaagagaattgacataacatgttcaccgcaaagtgatatccggcctagttatagtcaaatccatcaactttccaacaatacgacgatactgttctctatcctcaagtaactcaccatcagctttcatcagtttcacatttgtaatcattggaactgaaacaggtttgcagttaatcataccaatagatgccaacaactcccaagcattttttctgtgacataatgagatgcctacttcagttctagaaatttccaaacacaaaaaatacttcaaatctccaaggtctcttaacttgaaaagattatgtaaatcctcattagtactagcaatgacaatatcatcaacatacaccaacaccaacacaaccacatactcacctccacaatctatgagaaacagtgtgtgatctccatgtattttgaagaatcccaaactgagtaaagatgcggaaaatttcttaaaccattgtctagaagcctgtttcaaaccataaatggacctttttaaacgacaaactgcatttgatggtaagataataccctttctctcagcagatccttcaggtaacttcatgtatatttcttcctccaactccccattcaagaaagaattagacacatcaagctgtttcagaaaccatttcttagaagcatatatctttaacagcaacttgatcgttgtcatcttagcaactggagaaaatgtattcgtataatcaagaccctccttttgagtataacccttagcaaccagtctagccttatacctctcaagactaccatctgccaaaattttcaaagtaaacacccatttacaacccactgccttcttatcctttggtaatgtagtaatctcccatttattcgtagattccatagcaccaatctcaacatcaacagcttcacaccattctttagtgccttgtgcctcaggaaaattggtggaaataagaatttttgtgatattatcgatataacacatgtgagatggagaaatttgagaataagagatagtagaagatataggatatttttgatcagattgcgtattcttgcaaacataatctgacagatgagtagaaggtttcctaactctctgtgaagaaatttgtggtggtagatcagaaatttgtgatggaagagaagagaaagaagattgttgaatacctgaaggcacatgaactaatgtgcacacaatttcagagaatcttctgacttcttggtaccagccaaaggaaacacctcctcatgaaacaccacatttctggaaataaagatggcattacactccaaatccataaatttataggttttataaccagacgggtatcccaagaagatacaagcttttgatcgaggctgaaacttatgtctttgcttcggtgatgtagaactgtaacataagcaaccaaatgttctgagctgtccatactaaggagtagtaccattgagaatctcataagaagtcttatttgaaagaagctttgaaggtgtcctgttgataaggaaaacagttgttaagacacattcacccaatagagaaagtggtacctgagattgaaacatgagagcctttgccacattaagaatgtgctgatgtttacgttctacaaccgagttctgttatggagtctctggacaagaatgaaaagccataatccctttctgttgatacaaacgtgtaaaacgcagttatggagcattgtcagatcttacaactttcactttaaccttataatgattctccacttgcttaatgaaatcagaaaatattgtaagaacttcagacttagttttgagcaaataaatccatgttgcacgagaatgatcatcaactattatagttgtcaagaaatatttataaccatccactatttcaactgagaaaggccctcaaatatcaatgtgtaacatctcaaaaatctcatttcaaacattattctgagaagggaaagacaactttctctgcttagctagatgacaaacatgacaataatctgatcctttattcttgtgtttagtagttcccaatgattctgaaataacatccagtctttgtagagaagcatgaccgagtctgttatgccacgtactgatatccacaattgcattcactgaaacatttgtatcttcaacatccatgacataaagattagccactctcctaccgtgaccaagcatccggcccttgataagatcctgaatttcacaagcatgttgattaaatatcactcttgaaccaatatcatctgtcaatgaacttatactcatcagattaagacaaaattcaggtatgaataaaacattcttgagaagattatcatcattgagtctcaaagtaccaactccactaatcttcacagtgggaccagctggtaaattcactgagctcaaaacagatgtattcaaagtcaacaacagattcacatgatgtatagctcctgaatctatcacccatgttttagaggaaagagtatgttgagcaacagtcaaaatcccaataaaactataggtggaaggagagaaagaaataccaatgttatcagcttgagatgagctagctactgcagaattactgtgaggttgaggctgaagttgagagctaaacatagcaatgaactgttgaagttgttctttgctcagattgcccaccaaactctttagaccagaatgagtatcattagattctgtcgtagccaaagcaacattagaagcaacaggttttggtttctgtgttttatcaccaaccttacccttaggagtaaaacgtggaggaaatccatgcttcttataacatctctctgcaatgtgaccaaccctattacagaaagaacacatcgatctccccttattaggaccattctgaacatagtagatagtgggatcaatgctattagtaatagtgacttcagacacttggaaagcagctggtcgagcaaccacatttgaaaatccttgttgactattgtcttgatccacaatgtgatacacctctgctaaactcggaagtatcttcttagcaataatctgtctgcgaataatagcataagactcattcaaaccagctaaaaacttcactatcttagctcttttttgccttctgttgcagacgaagagctttaccacacgtacaaggatcatccaactcctctgtactatctaattgatcccacaatgtcttgagacgagtatagtactcggacaaagacaaagtaccttgacgcaaatcctgaatctcttgagtaagattatatgtacgtggaagattagtcatattgaatcgactattgagatcacgccatatatctgaagcatcattcatacgaagaatacttctacagatctgaggagacacataattgagaagccaagattttaccatgctattacatctagaccatagacaaaagttcttatccgtttctaaaggacgaggcagagttccatctataaatccagatttgttcttaacatctaacgaaatgagcattgcaacattccaatctccatagttcgtttcatcaagacgatgagagatgatattcaaacctggatgatcggcactgtgcaagaagaacggtgattgagttggatcacttgatttcggtgaaacgatgactcgcgaagctctagaagtcttggatctagcaacttgaggagaattcagaggagaatcatcaatgccggtggatcgcgactgtttgcgagctgaacttgttcctgacttcgatcgagttgattttcacgtcactcgagctactgtcaccattggatcttgagcttgagcaatggagaagacgatcgtgagcttgaaaatgaagaaatcagatcgagaaacaatggagtttgagcgttgatggctctgataccatattacgattgagagagatgagagagtttgttagagattgatgaaaatattttctcattaactctgtaaaatgtatttgtacaagtatatatactatgactatacaacctgttaacataaccgaaatacataatcaactaaaccacataaataaaccaacactctctgatagaagcggaagcgtttggaagcgtaaaagcgagtttttgaaaaaatttaggaagcgggtacgtgtttgaatcgtaattatatatacatatcaaaaataaaatcataaattagttgaaaactaatttcaaaatctaaacgttagggttatataatgtaattaatcgaaattaatacaaattttatttgttgtgtagtggtactagaggattttaagacttcacaggtggccagttcgaataactccgcacgaattagttttttatttacttaaaacgaataggggtaaatttgtaattttcatcgaggagtcatcttcttcttccccctaaaaaaacctaatcgccgtttcctcctgtttttttttcccgaacatagctaacgctggaaacgcttccaatctatacatacaacgcttctcaatcggaagcgtaagcgatgtcgtacgacgatgttgagatagaggatatggagtggaacgaagagattcaagcgtacacgtatccttgtccttgtggtgatttgttccagattacgaaagaagatctccggctcggcgaagagatcgcgaattgcccaagttgttctctttatatcaccgtcatctacaatatggaagattttcaaaacgatacgaagaagaataacgaacctaaaactcgtcaccctgtggccgttgcctaaggtaacaaatcttccatctgattgaaagttttttttttttttttgggggattttgtagaaactggattgtgtgatatagaattggagcttggttcatgaaaagctatgtcgttggattgttgagaggtagatatgattgttggtgtcagttgttcaagctttaggtagatatgattgtgcatatgtttcatgtttgagctggtactagtacttaagtcattattatgttttgatcttgaagaatacaagaatgtttcaattagctcattgaggaaccatctcttagtagaaacatggatgtcaaaagttatggccgatgatataggagaagaattttgcttcgttttcggaaatatttgttgcacttgtgttggatgttaccgatatcagaacgttcgagaaacggtatgagttgccttggagttaggattcaaaacgatatgagctcttagtgttgttaatggtatgtagagaaggaagtatttgcaatttactgataagaagacaatctgcaatcatgacgaaaacacctctgctgcttttttcggattacttatgtgagtgtatatgttgcttctttgcaggatagtcatggaattgattagaagattgttcaacaaccactgcagaagagatttatctgctgttttggaaagcatatgaaagtgtgttacattaaccacatatagagagagggaaagagagtgttgtgttactgatttattaataccgaattcttgatgttttctagagtaggctctgttttggttttgaaaaggtttctatggctacaatgcttctttgacaagaagactatcagtgaaactaagagacatttcaaaccctttcaccatcattaaagaacgttacaatgatacacatagataacaaggaatcaatattatcagatttaaccaatgtaagcaattgagtcgaaactctctattggtgacagtaaagttaaaccaattactttatttggtttttaagaaatgactaatttgggagacacagatccaattttacagccgtagtaaccgtttggcgcgtctaatctccataatttcatttccttttgtaacatccttaacctagaaagaatttcattcagagattcttataggttcttcgtaagatcggatcactagttctgtattttgaaggtacgtcgtctatcaaagctaattattgtgttaaaaccattataccattggtgataaattatgttcatagggttttcttgggaaagaagaaaacaaagctaagaatgaggaattcaacaaccatcatgatgataatgatgattgtgatgatggtggatgattgggttggagcagcggacaataatccggtgtacagtccatgttcagatacacaaataagcaaaggagatggtttcaccattggtattgccatctctagcaaagaagctttttttcttgaccaagtccagctttctccctgtgatactcgtctcggtttagctgcgaaaatggcgcagcttgcgctttttagacctaaggttgacgagatctctcttctctccatcgacacaagtaagtttaacccggtaagtcttacactatgttataaaatctcattgggacataatcacaaagaataaacaagtaaagcttatgaatgccattttttcattgggatgtgtcttgtgagaagagtgaagcaggtggattcatggtgggattcgcgggctcaaaatatgcagcaagatcatatcctgtgaaggttgcagatggaagcaacacaatcacagctttcacacttgtaatgaaattaaccctaagccccttggtaaacatacaatagagcactgcatcgctgaattggcaactgcattgcaggtactggaatttcagaagggagtgttgcagaatctgttctggaagagcttcggatgcgatttgtgcaaaggaacaggatcttcttcttctgtgtgcctgaatgggacggattgcgcggttccaacttcaaagtgtaaggctaatggaggtcaagctaactgcaacattggaattcaggtcgcgttttcgggaacagacagaaacctcgagtcattgaacacttggtacgaggtaaacaatctgaggcagtactcgcttactgacctctacgcaaacgctgtagactctctgagtggtgggctgctgtaagagagaaaaagtgtaacgcaggtactatgtaatcgaggttcctagataggttttgaacttccatgttttcgcaacgagttacaatgatgaagcaaataaatggaacctccaagtaatttttttccaagtttacaaacaaaaactacatttgaatgactattttccacacacaagaggttttatatacagaacccttttgtcatcattgttgtattcaaaaccctcaatattgatactagcacttgtttttatacacatgaagaatattaagaaggaccccaaaaaatccccaagaaacgaaagatcaaaaattaacatagagaaagataaaaactggttcaatccaatcataggctacctcctccatataaacatgtgttattactctgaccgaccttgcggattctcccttatgtctcttagaagatcttgcagctcggggaataccgatcggagtagcagctccagtattgcaaatgtgagttgctttatgcatatgtttgactgcgatagatgatttatgtgtcaactattagtcaggctaacgatggatgatgatgcaacaacttagtgatacctttaacaccaaaagaaaaaaagaaaaaaaaaaaagcttataagaatgtgtgacacagaggaatcctaacctgagtgaaatagaaaatgtctcttgcacatctcctgtactgattgtgccctaccaaactcactaaggctgttggggcgccatctgatcaaacaccaaaatgttacttccactgagactaaactaactcaatacgtcaactggaggagcctaagatactcaccgaaaaggaatttttttatttcactagctctacgaaaagcctcgagttgctgctcaaaggaactgggtttagtcaccttcatgccaccaagttggcctgccatttggtaagttttttcactagggtcggtctcatctgatgcctcttgactatcattcaatctggtaaagaatacaccatttggccatagaatctggagaaaaaatgcaaataagattgtaagcaaaaaaaaagagcgatcactttactagtactattatttgctctgccttcctgcaacaatcaaagtaaactagaaatatctggcataatgctttccctgaatgatcaccgcttttctacttgagttatataataggtttgagcgaatgatcaaaacatgatagcaggatctctaagagtacagtagattcagttaactactgaacgaaatcagagaaaccccagttcttacatcttgagcccaacgaattccttgagcaattgtgtcttcattccgcagccaacatatctccctcatgagcaagtcatccacagcatcttccataactaattgtaatatttgctttgatatccagaaaacttgcctcctataatgacaccattaagattattcaaaaacagaaccaagtcaaatagaatagatagcatgatcgaagacaaatataatcagaaagaataactactttgtctcaccttaaccaacctcttctatttaactgaaacactttatcaactaagttcaaaattggcacactgacattgggtggcatccactgtgatgaaaagcagaggataagaatgacgttaatcaaaattagacgatcccaaaaaagtaggctaataacttaaaatctctttggagatatgcatcattaaggatacttcaatttcaggtgcgtgaaaggcagtgcatgtagtcatgaaatattttagccagggcacatatataagcctagtgacaaagtctaatcaacgtacataagactttaggggtatatggtgtacctcgggtatgccatggggattttggactaaagctgtcaatggatcagcatgctgaaaatcggtggaccccctaacttgagattttgccttaaaatcattttccttctctgagggcgaactctcaggctctccaagacgtctaaccactctcggtggaacatacttagagtccaattcattatctgagtgccacccattggcttctgaatcaaatctaccttccccttgagtgttctctccaagtttgtcgatgtcttcagtatcagaaatgctgctgtgcatagattcagttgcgctttccctagagagctgagtgcttatttcatttacactccaggagaggtggcgggtaggagcatgatcatgttcatcaagtggagatcctacaaccttgcgcataaggccatctgagacacctttgaactgacgtacaatatcgtccatggcatcatcaacattgactgctcaattccaagaattttttttagtaaaatggaaaagtaaagcaaccacataacacaatatacacttctcacttcattctgatcgttttcccagaattcatttttttagcataacatgacggattaaaaaaaatgtattaatggaatagaaagcgagggctgaattttgtatacagctacatgttactaaaacagcagtaaacaatacctgcaagagttttcatcactgatgaagactttccaaaagaataattctacagtatgaaaaacgacaatcattagaaaatccacctaatgaaaatagaaagtaatgaaatttggggacggaagttaatcagatccacaccttagaggctgcgcttagaaaatcccaaacttcatgctgttcagcaacattagctatacacaagagatcctgcagacaaggaaaaaatgttccttataagagaatgttgatggtaactatgttttaaaattgctatggggataaataatacttgtagatacttgtccagctgaatacagcgacgatgaacaaaagcatcttcggtgcttgatgagaaaatacgcttgggaggcaactgtaaattgtagttcgggatttctttgagttgacgatgtaatcgctcaaaattactgtatctgaagggaagcaaataaatattttacgatcaagttgcagctatcttgtgccttttacgacgaaaatatatatcaaaagctagtggcatgaataaagaatttcaatgatgtactgatacgattttcccgttatcagaaatgataagaaaataaccttctcttaacaaaccaagttttgttttccacatctgtcaccgcaatagaatatactgcaaatgattttgatccttgcttctcaaaataagctccaagaacctgcagccacacacagacataagatataataatcttaagctcatagcataattatttgcaaaacacacacaaactcatacacaggcaaatgtacaggtcaagtggatgtgtcacagaaaccaaaaaaataaagaaacagtaaatattaagacaggagcttacgcgacatttgagcttcaggcagtgctgaccctctttgtgaagaacaatgctttgggatttattatcacttatgtagttatcattgtgcttgataaaatctgtggtgtaaaattctgtgattagcggcccctcactgactcctaagagtgctagactcgtttcaggacgtagattaagatctgatgtactattggatcttttaagcctatttttatttccatctgaacgagattcctttctaacatcagcctcataaatctggtgccctccatcatgtaaagatgatttactaaattcctcagccatctgtgcttgtgactgcttatcagtgctcactttagggggtaactgcgccactgcgttttcttttgctccagtagaagaaccctttttcagagattttttgtactccttcttttgatagttccttcctttcgtccacatgttttcaaggttttcaggtctaagaacctctgttctcctttgcgtcgcaacctctagcgaccgagcccaatcagcagagtgctgttgaacgtgtagatctgggtgtctgtcatttatgtttggtgatttctgctcaatagcttttgtcaaattcatattttttgcttgactatcgaaggctgacaatggggcagaatttacattctgctcttccgccgtaaactgctcaaagtttccttctttaataagattgataatgatctcaaacacttcattgatacgcctggtgcagacaagaaaaaaaaaaagaacttactatagtttagattttatcaacagaaattctaaaatcaaaagttgttcctagctagtttgcattatacacattggtcaaggaattttgatagcaaaaataactttctggaagacagtggcaggtagagaacttactcggggcatgctaaattcaaaagaggttgaattaccaagcaagtaacaatctctctagctattgttcgaacaagagggcactgagcttctcgtggtctgagaaccacagataatatgccagcaactattttctgaagaacctgttaaaaaaaaaaccaaagagcatttatatatagagtaaccaaattaagagggaaactaacacggccgcgtaaatttcatcaggactatcgctaataccttgtattcactctcaggtgacacgagtgcaggatagagttccccagaagccataagatggtatttcaatctttcatctctctcctcagatgacaaagttttcatcacatcagtacctatagcagcttggtttcttctaaaactttccaaatgatcacctatcagatcaactatatccctacacaataaagcattgatttcattatccataagtaatgatccaatccaaactcgagactttttctggtgaaaacttaactgaagagaaataaagaacagtacctggttaacaagtcaacaatattgatctctttcaccctaactgaaatctcaccaagagcatccatgatcactgcacgtataagttcaggcgcttctttatcaggagtaatcaaagagtaccacaaattcaccacgaaatcattaaggatcttgtcaataaaatcattaatcgcagcttccacaacaggagaatctattttcttcttccaccttggaggaggtgggataccagaaagacgtggatcattcacagacaactgcttcttctcaagataagacaactgactctgcctaggagtcgccggaactttccatctgaactcaaaatggttaaaaaaaaaccgcgcaccgccacaaatgaggattgcaattggcaaattcagccaccaatagatacttgtatctgcatgaagaacaaaaaacattatcttacaaaatcaacagtccaacaccatagagaaactcgactccaaacaaagaaactaagaacagagtaaccaaaaacttagactaatagttttagtgaaattgcaaagttaaagtcatcctaaacacggcagcttcacgagaagcattatagaggttcttatctaaacttaggaagttagaaataacagagagaagcatgaaacagcgaaatcgaagagaatatggttcagaatttgacatacgggtcaagaaataggtgacggagaagatgcacaagcaccaccatacggctcgtactttagcttcttcgatcagatcctgtatagtctccatggccttcatcttcgtcttcaattcttcttagaacgttctaaaacgccgaaattggagactaatcaaacgaaattaccagtcaggaaatttgatccaaatttagctttctcaatctcagaaggtcgacgtcttgaaaaccctagctactggggatgaaattgaaatgctagaattgggagatttgaagtgaagctgggcaaaagatcgtagagatttgaatcaagagtaatgatgatgatcaaacatggaggattcttcttcaacctatctggctttttttttgggctggaatcttttttttctttttcttattagactgcggagacaattgtcctggacatagcacggacaccaaaacgatgtcgttttgtctcggattcgattacatgttctctagttgcaccttcgacaaaaaaacaatttttttgacaaacttatcctctggtagaaagaagtttaacctgacaggatacattatgcctacgaagagtcaaataaatcaaaacatcgattaacatagaggttaagaataagcataagcacaagctaacataaataataacactcaaattgagatttcggaataggggtgaacttacaagttctaccaaaacatcatctaaccaagaacattcaataaagcatacactttttagtttggaagtctttgtcaaaaccataaggaggaggaagcaaatcaacatcatatggccaataaatgttggacaagaacagtcttgaacaacaatgcccgcttctaattcaagtagaatagtcttgcacacaatgctccttataacattatcactaaacacaaataaagtatttagaaggataacaagatctataaagcagaaatggctattgaaagcctcaataaactaggataagtggttggttgtctaaactcaaaaaacttttctaaactgcaacgagacaatttttaacataagcaaataaatacataatccgaatattgctataaatgatcgcatcaaaacgataaaagcaaaggaacacaaatgtagaaacacaagtatccaagcccatcgaaaccgaatgagctacatcaaaatcctcaaaaccagagccataaactctaccaacttcccatctcataagaattagagggtgaagagcaagagcatacatgggaaaacttttgaggaggtaaagtgatagcgtcggcaaaacagtaacatcactaaaagaagcagtagttgaagagatcggacagagacgatcatcatgctctccaaattattagaataaaaaatatataagtaattttcagttgaaaaacaaaatctggttttgacttaatagtggtatcacacaagtgattataagaaaaaaatgtaaactttaattcaatcaagggagaaaaaaaattaatttgctaaaatcaaaatacaatttcgagtccacgatttcttagctaaatatgtacaaggaaagtatatggtaaattggtaatgtttacataaaaacaaaatgtagaaggtaatattaaatgttctgacctttttagctgcatgttttaagattaaataaaaccattttatattctggttctaaatatctatctattgttaattaatgagtttaatataatttcatgctgtaactacatatatatatatatatatatatatatatattattttttttgctcaatcttttaatcctttataagacacttgaattgtttgctatttaacttacttttagaaatctaataagtgaacactatgagtcaaacttataacttgataacttaaatatttagctaaaaaagattatgattgatttgtacttggatattaaaaagaagaatacaatttattttttgatgatgataatatttttattaatttctttaagaaaagaaaaaaattgtcaaaaaactatatattagtttcgattccgattaattactactaagaaaataatgctccaaatagaaatgtgtcgctcaactttggataaagtgcagtgcagtttaaatacttttaatatatatcctactatattatttgggaagtacattttaaatataaccttaatttttataagtaattacataggtatgccattagaaataaaattttaaagagtaaattaatttatctctttaagaattaaaaagtcaaatactaatttaattaattaaatttaatttaaaaacgaaatatattattaattttcaaaaataataaacaatcaaaatcaacatataagatttgatatctaatttttaattaatttgatataattagaaaaatgaaatacattattaatttcaaaaaaagtaaccaattaaaatcaacaaattagatttgatatctaaattatcatattaattttttattaattattataattcacttctcatctttatatgattctatttttgcgaaaaaataatatcatcattataaaaaaataattagagttttttcgcatattccataattagaatttttttaaacgaatatacactattcaatacatgaaaaaaatattataacgggtgaaaaatagatttaagaaaactttctactgagtaacgggtcataatttgaaatatttatattaaatttcatacatattatattgaaaatttataatcttatatactataataattaataacatattagatttttttatgtgtatgatgtaattcaatttttaatacaagctggaaaatcctagaattgacgggtttagatcgatattaatacaagatggtatactacaggtgaaactcttaaattaacaatcaaactacaagtgtataatcttaaacactaaacaatatagataatatcaacaaaacatatacaactcacagtttactatacatttaaaatcaaataaaataatatcatatatttttaaatcatctttacaataaaagtttttagtttaactaaaatataagcttacatgcggtatactacaggttaatatctagattatagggcttattggatctaaagacgggtcatcaaagatttcctaaactgaagcaaaatatactgaatactcaaatatctatctgttaccaaattataaacaaataagttcgtaaaacaatttaatattttatatacaaaatcaattaaatcttaatcacataaaaattagcacaaaaaaaagtattcaacaattaaaattttatcaaatctctgtgttatataagttttgatactatattcgaataaagtgtaatattccttttcgatttgtattttttaactaacttaagctaactaatatatttactaatcttatacctatcaaaaccgactatcgtttcttatctctatagtatttttgcaagacttttttggtggatttgggtaaaagtgcattcacattcccctattaaataaatatggtgtactcctatgttattagctaaaatatttaaattataattcagagtcatatcattagtaaaattaatattaataaaataaatggctttttgcaagacagatttggagtgacgggtttttgaatcaacattaataaaaaagtaaaatataattaatccatcgtttcaatacgggttaaatctttaatttattattttttaagaccactaatattaaacatatcaaatcatcctaatttagaaaagattatataaaaccaaaaatgttatgtggtatgtataatgttactatatataaaattaaattataaaatataaatgtattagagaatgatataatttgtaaaacttttatatataaaaaataattcttaaattttaaaaattactactttaaaaaaaattcacaggacgggtaaataaattatagaacaggttttattttggaattgggttatatggtggatgtatttgtatcaatatttataaaattgtaaaatattattaatatgttgttttaatagggattacaacttcagttttttaacaattgtctcatggattcgtggtatagcgttacttaataacaattataaactgtaaaatataaatattttataaaaataaaatttgcaaattttaatatatattacttttaaaaaaagaaatcgtcccacggtataccgcgggttaaaatctagtatatatatatacatacatatacatatttagatatttttgttattattgaaattacactgcaccgtacatttctacgcgaaacatgagtaaaaatgtcatgtttttcttcgttctctaattcttttgtcatttataaaaaattttagactgataaatcttatatttttgagtatttataataaatgactatagatttgaaaagaatgtacaaactaaccttgagtcacagtatcttgtcggaaacatgttggaaaatacgtgtaattacgtaaatgtcctttgtaacatgttatttttccgaaatacatgcgataacataatatcctctttttatcttgttattttctcttattacatagtatttataaaaagcacatggtattttttagaaaaaacattctattcagtttaatatctctttttatcatgatattgtagtaatacacgttttttattaagatcacacgtgatttctttaaaaatatattcttatttttttagtaatacatggtttttattaaaatcacatatatatatttttcttaagattctgttcatgtaaaagaatttcataataactttttttcttaaaaattcataacgttttttgaaatagcatgtttttaaactaaatataacatgtgaaattttaatgttacatgctattttgaaaaattatacggatgtatttcgtttactgttcatcttacaacaaatgaaagatacctttgttatttcctttcttccgacaacgtggtccatagttattttgtaacaaaaaactttctctctactagtttcttaatttatatgttttatttggttatttactaatattaccctatatttttcttcttcatccctaaaaaaatgttcaattttgggattgttttttcttctttcgccttaagtcaacgaaactaaaacttaatttcaatcttggtgtgtttgatttttatctgtttgatcttatcactttcaaaagagaaaacaaaagtttaagaaaatgaaaaacagtagtgggagctatcttcattcttctggcccaaagtgtaccaatctaagatattttacaatcttatctaaactatacacaaattatttaaatcaacggcgctcatactatgtgccatcattgatatcatcactcgaataattcactttataactatctccgtcactatcaaaaagtgttcaaaattaaaaaagaatatctcaatccttatccacttcatcattcctagcttccaagttattattatataactcaatttttctggcttaagagttttgaaaaatatcttcactagagatgataaaatcagtgactcttcgttcgtttcatctcccaattgagtttaacgacaccaaattcgtctcacggccttgtttcctggcgagatccttcccggtggttcgttgttcaagcaccagagacgtacctaagcttgaactcttcagccgcggaaaattcgaccggattcttcaagatccgccacttattgaaaaagccgaatccgaactctcaggtacaacaatttcattcacttcctatacatagacgaacactgattcagataagagtatcaacgaatcatgtttgattttgatttcagattactgttcgacgcttgaaggtgatgactcttacagttgctggagagcttactttgaactcaaagatctcgaagtaagtaattctatagttttttttttcaatttgagaatccaaagaatttagtgatagtgactagatttggttatgtgattgcagagagagaagccaaaggttgaagttgagaatttgattttgcaaacaggtggtttgaaatcgttaatcgggtgtttacatggagttgcttcaatggagaaagataacaaaaccaagaatggtttacatgtaggagaagaatcagatagagagaaaggaatgaatttgcacattcatattcctgatggtttaccaaaatctgaacaagagttggaggaagaagagaaatcgaaaatgccggattcagctttcactagattgcttagaagtaaaggaactatccctgcttggttctctcacgctcctgaccacgaaaccgactgaaagcggattacggattacggtacctttagaaagttgttatcttatcacagttatatgtaaatatagttcttggttttgctttagttcatgtagtctatcttttgttaagatgtgatcatattgccatagaaatgtggttgttattacttgatgttcgccaatgttgaatttgtttaatgctgtgtgcctattatagtactacgcggttttggtttacgaagagatttctattcttgataactgaagtggattactacggtacgacctatagaaagttgttttcttatcacatttatatgtaattatagttcttggttttgctttagattatataatgtctctttgttaagatgtgatcatattgccagagaaatgtggttttattgcttgatgttcgccaatgttgagtttgtttttaatgtcgtgtgcctattatagtactacgcggttttggtttacgaagagatttctgttcttgataacggaagtggattactacggtactacctttagaaagttgtttcttatcacatttatatgtaattatagttcttggttgtgctttagatcatatattgtctctttgctaatatgtgatacatattgccatagaaatgtggttgttattgcttgatgttcgcgaatgttgagtttgtttttattgtcgtgtgcctattatagtactacgtggttatttggtttacgaagagatttctattcttgatgatgtttgttctccggatgtgaagctaaatctttgaaaggaaaacaagagttttctaaatatagggaaaagatttgtttggtgatgcaaagatgaaaattgtttgacattattaataataaccctttggtgttttcatcgaaaccttttctatgccccatatctataagcagcccttgggtattttccaaggttttgttccaagtcatgactaaacctccattttctttctcgccctttggctgcttcctcttcttattcttttctttcttcttcttcttcttctcttctgttgttttagcactcaccgatgcagaagtttcatttattgcacagcgacagctcttgacgttacctgaaaatggtgaacttcctgatgatattgagtatgaggttgatcttaaggtgacatttgcaaaccataggcttaagagagcgtatattgctctccaagcctggaaaaaggcggtgtattcagacccgtttaacaccacaggaaactggcatggccctcatgtgtgtggctatacgggtgtgttctgtgccccggctcttgatgatcctgacgtcgcggttgtggcgggggttgatttgaatggtgcggatatcgcagggcatttaccggctgaacttggtttgatgacagatgttgcgatgtttcatttgaattcaaaccggttctgtggtatcatacctaagagtttcgagaagttgagcctaatgcacgagtttgatgtcagcaacaaccggtttgtcggacctttcccttctgttgtcctctcgtggccggctgttaagttcattgacgtcagatacaatgatttcgaaggtcaagtccctcctgagcttttcaaaaaggatctcgacgccattttcctgaacaacaacagattcacgtctaccattcctgattccctcggagaatcatcagcctccgttgtgacctttgctcacaacaaatttagcggttgtatccctagaagtattggaaacatgaagaatctcaacgagattatctttaaggacaacagtcttggcggttgtttcccgtcagagattgggaagctagccaatgtgaacgtgtttgacgctagcatgaactccttcactggtgttctacctccaagctttgtcgggcttaccagtatggaagagtttgatatctctgggaataaactcaccgggttcataccagagaatatatgcaagttgcctaaattggttaacttgacgtacgcctacaattacttcaacggacaaggtgattcatgtgttccaggtagtcagaagcagattgcattggatgatacacgcaactgcttgccagatcggcctaagcaacgatcggccaaggaatgtgctgtggtgattagccgtccagttgattgtagtaaggacaagtgtgctggtggttctagccaagctacaccgtcgaagtctccatcacctgtgccaactaggccagttcataaaccacaaccaccaaaagaatcaccacaaccaaatgacccatataatcagtctccagtgaagtttcggcgtagcccgcctccaccacaacaaccacatcaccatgtggttcactctccaccgccagcttcgtctcctcctacctcaccaccagtccattcaactccatcaccggttcacaaaccacaaccaccgaaagagtcaccgcaaccaaatgatccatatgatcagtcacctgtgaagttccggcgtagtccacctccacctcctgttcactctcccccacctccgtcacctattcactcaccaccaccaccaccagtatattctccaccgcccccaccaccagtatattctccaccgcccccaccaccggtttattctccaccaccaccacctccggtgcattcacctccaccgccagtacactctcctccaccgccagtgcattctccaccaccgccagtccattcaccgcccccaccggtacattctccaccgccaccagtccattcacctccaccaccagtttattctccaccgccaccgcccgtacattctcctccaccgccagtccattcaccaccgcctccagtccactctcctccaccaccagtctattctccaccgccaccaccgccggtccattcaccacctccaccagtgttctctccaccaccacctgtccactcccctccaccgccagtatattccccaccaccaccagtatattctccacctccgccgccagtaaagtcaccaccaccaccaccagtctactctcctccacttttaccaccaaagatgagttcaccaccaacacaaacaccggtcaactctcctccaccacgaacaccctcacagacagtagaagcaccaccgccaagtgaggaattcatcattccaccattcatcggccaccaatatgcttcaccaccacctccaatgttccaaggctactaattttagagagagtgaagtctttaaatgaatcacgtcatgaggaaaactgaagataacaaaatttgaggaagacagaagaagaagaaaaagaaagggagggcaacgtatcgtagtggcattaactcctcaaattaagaagaatcgtacaaagtttgtgtagtaacagtttataacatctttttggtccataaaagattttaaaacttcaaaaacagagttgttgttatgcttcttctcttgtgcattaaggccgtttatgatggtatcctagaatctacatatttgccatatcttattcgttaataaagatattttcttaggtgaacaaagttaacgatcaaactagctaaatatatggcctctaagaagtcttaacgggccaaaccaggcaggtcgagtccattttggtgagaatggacttaagattttagatccatttaaaagcgagtggcaaatctgatagattgcaggtttgatgaatttttcatttttgcatgcgggttggtgggttagctcgctagctactactatcacgtacactaatattgaaaaggatttaaagaatttttcttcgaattgtctacttttgtaaatgctggttaatcccgtaaaataaaaaacttactcaatataaccttcggttgtatcggttaacgtggcatcatatattcatatgaaactgaagaaaattcagattgacttatgaactaatttcttgtaatttgtttctgttcaacttttgttttgtgcacttgtttaataagataaatccgaaaagaaaaaaaaaaatcttcattttgatttgtgtattttcagtctccatttaacttgagaatgactagtagagaaggaagaagtggaggaaaatgaactgattttgtgtgttgtttatctgcattttatttggaattagaaactagtttaatcacatataagaggatttgctctgaattatattattagttttttgtgttaaaggagaaaatcaaagacttacaagttgaaagaaatgtgacaactagcattttgaatctagatatattccaaagagagatgacaaaatcacaagaaagagagaatacaagaagaataaaaagagcttcttataataataataaaaattgttagtttttaatgaaaaacaattaaaatttccaatggataggttttaagacatgaaatttcattacttaaaaggatgccctttacatgtagaatgtaaggtgagactgaaattagttggattggtattatgaccaaatcgtactcaccaattatgctgagaagttaaaacataatatgtttgcaacaatttgttcaataaatgttaaattaactcatacctaaccaacaatatcttagtctaacagccacactaatttataacactacattgtttatatcagtgagaaaagtgtttaaaaatcttaatttagaaaataaacaaaactttgtaatttaaaaacagagtacgtcatacctttttgcaatggggaattaaggtcaatagaaacctagtgttccctagaaaataaataagaagctatatttgaacataagagtaatcaggagaaagaccaagaaagtctcatacgacaacctttttatttacaactaaagataagaatttggcaaagatgcactaaaggaaatcctctaaatggttgatgcagtttactgaaacttgttatgtcatttgatgcattcccaatcacatctatcattccgcatattcagttactcgtttagcggactaacccttagtccctcacctttactgatatcttctctttatatattttctcctgagtataatcatacattgatgttatataaacaatgaactcaaaatatgtggtcaagagtttactagaattagtcaacgaacgcctgagattataatgcgaattatcggatcagactaccggtttaaaacaacccgcatgtttatctgtatatgtaagagttaaaatttaaaatatcctctctaatacattcaactgatcttaagatcaatggcatacccatgtaactttttccatttataataaatatctcgaataatagacgaatttagcaaaagtgcaaaagagtatattcgacaagacacacaaaaagttatctagtagtattttgatatcatcaaaatcactggatttcaaacttcaaattcttgtttagcattatgattgctaggttgttgaggatatcaagtaaaaaaaataaaaaataattaactatcaaaaatcagtttacatcatctatataatatataaaccctcaaagcctttcaacacaacttttgatcaaaaggatgagttcatcacgttccgataagagtaaccaacccatcaatttttttaaatattctctaaagtctttaaaccaaaaacaataacaaatgtttataaagatgaaactaaacataatgaaccatatattctaggtgtaggaaagatctacttacctttgattcaaaatgccaaatctctaatgatgtggggtgggggtacatttactcaaatcatggcaatgcctaatttgtgagatcatttttcaggtctatgagtttgtttttgtagcgtctacagtccttgatcttttttactttgtctcaaggaccaagatcgagaataaagaaaatgatgaggtgattgagtcagacctccacagaatcaccaagtatgaggaaaaaacattggaggctcaaactgaaagctaacatcgagaagggcattgcttttgctgcaaaggactaacaaccatgccaaatgattcgacctccacataatctcttttgactcaaaatcttttaacacttgatattaaaggatattatttggacatatctcttcaggtttagaaaaactgagtcgtagccttccaaataaacctcagtgcaagtgttttttttttttggcagttttggaatttcattgtagcatcttcaacctgcaaaataaaacaataacactttataaatcaaatttctgataatttgggttgttaccaatttttagtgagcaaaagaagtatattttttttttttccctaatgtaacacatgagaaatatctttagtgattgtgattaaaatatatatatgtttgaaagaaaaaaaaacacttaaaagtgtagtagctcgagaaatttctctatttttaatctaattaaataatgagtgaatcttgtgagtgtacaaataatatacttctaagtgtggttcacgttatgtacaaagaaaatttatgatatgtataaagaaaaactgtttacaaaaaatcgtgtcatgtataagatttgtttttttaaaaagtgaatttttttagagcctagaatcttagaaccattgcaaattagcaatgttccattattttaaggatctttagaaccattgcattattccattattttaagggaatatatatgtcaagaggatttattaaactcaaatattagagagtgttggtttatttatgtggtttagttcattatgtatttcggttatgttaaccggttgtataatcatagtatatatacttgtacatatacattttacagagttaatgagaaaatatcttcttctatgtctaacaaattttctcttctctctcaatcgtaatatggtatcagagccatccaagctcaaatttcattggttactcgatctgatttctccgttttcaagctcagaatcgtcttctccattgctcaagctcaagatccaatggtgacagtagctcgagtgacgcggaaatcaactcgatcgaagtcaggaacaagttcagctcgcaaacagtcgcgatccaccggcattgatgattctcctccgaattctcctccagttgctcgatctaagactactggagcttcgcgagtcatcgtttcaccggaatcaacggatccgactcaatcaccgttcttcttgcacagcgccgatcatccatgtttgaatatcatctctcatcgtcttgatgaaacgaactatggagattggaatgttgcaatgctcatttcgttagatgctaagaacaaatctggattcatagattgaactctgcctcgtcctttagaaacggataagaactttcgtctatggtctagatgcaataccatggtgaaatcttggcttctcaattctatgtctcctcagatttacaggagtattcttcgtatgaatgatgtttcggatatatggcgtgatctcaatagtcgattcaatatgactaatcttccacgtacatataatcttactcaagagattcaggatttgcgtcaaagtactttgtctttgtccgagtactatactcgtctcaagacattgtgggatcaattgaatagtacagaggagttggatgatccttgtacatgtggtaaagctcttcgtctgcaacagaaggcagaaagagctaagatagtgaagtttttagctggtttgaatgaatcttatgctattattcgcagacaggttattgctaagaagatacttccgagtttagcagaggtgtatcacattgtggatcaagacaatagtcaacaaggattttcaaatgtggttgctccaccagttgctttccaagtgtctgaagtcactgttgctaatatcattgatcctactatctgctatgttcagaattgtcctaataaggggagaccgatgtgttctttctataatagggttggtcacattgcagagagatgctataagaagcatggttttcctccaggctttactcctaaggataaggttggtgataaaacacaaaaaccaaagtctgttgttgctaatgttgctttggctactacaaaatctgatgatactcattctggtctggagagtttggtgggcaatctgagcaaagaacaacttcactagttcattgctatgtttagctctcaacttcagcctcaacctcacagtaattctgcagtagctagctcatctcaagctgataacattggtatttctttctctccttccacctatagttttattgggattttgactgttgctcaacatactctttcctctaaaacatgggtgatagattcaggagctacacatcatgtttcacatgatagagatctgtttttgactttgaatacatctgttttgagctcagtgaattaactagctggtcccactatgaagattagtggagttggtactttgagactcaatgatgatattcttctcaagaatgttttgttcatacctgaatttcgtcttaatctgattagtataagttcattgacagatgatattggttcaagagtgatatttgatcaacatgcttttgaaattcaggatcttatcaaaggccggatgcttggtcacggtaggagagtggctaatctttatgtcatggatgttgaagatacaaatgtttcagtgaatgcagttgtggatatcagtacgtggcataacagactcagacatgcttctctacaaagactggatgttatttcagaatcattgggaactactaaacacaagaataaaggatccgattattgtcatgtttgtcatctagctaagcacagaaagttgtctttcccttctcagaataatgtttgtaatgagatttttgagatgttacacattgatatttgggggcctttctcagttgaaacagtggatggttatcaatatttcttgacaatcgttgatgatcattctcgtgcaacatggatttatttgctcaaaactaagtctgaagttcttacaatatttcatgatttcattcagcaagtggagaatcagtataaggttaaagtgaaagctgtaagatctgacaatgctccagaactgcgttttacaagtttgtatcaacggaaagggattatggcttttcattcttgtccagagactccagaacagaactcggttgtagaacgtaaacatcagcacattcttaatgtggcaagggctctcatgtttcaatctcaggtaccactttttctatggggtgaatgtgtcttaacagctgttttccttatcaacaggacaccttcacagcttctttcaaataagactccttatgagattctcagtggtactgctccccaatatggacagctcagaacatttggttgcttatgttacagttctacatcaccgaagcaaagacataagtttcagcctcgatcaaaagcttgtatcttcttgggatactcgtctggttataaaggttataaacttatggatttggagagtaatgccatttttatttctaggaatgtggtgtttcttgaggaggtgtttcctttggctggtactaagaagtcagcagattctctgaagttgtgtacaccattagttcttgtgccttcaggtattcaacaacaatcttctttttcttctctttcatcacaaatttctgatctaccaccacaaatttcttcacagagagataggaaacctcctactcatctgtcagattatgtttgcaacaatatgcaatctgatcaaaaatatcctatatcttctactatctcttactctcaaatttctccatctcacatgtgttatatcaataatatcacaaaaattcctattcccacgaattttgctgaggcacagggcactaaagaatggtgtgaagctgttgatgttgagattggtgctatggaatctacgaatacatgggagattacaacattaccaaagggtaagaaggcagtgggttgtaaatgagtgtttactttgaaatttttggcggatggtagtcttgagaggtataaggctagactggttgctaagggttatactcagaaggagggtctagattatacggatactttttctccagttgctaagatgacaacgatcaagttgctgttaaagatctctgcttctaagaaatggtttatgaaacagcttgatgtgtctaatgctttcttgaatggggagttggaggaagaaatatacatgaagttacctgaaggatatgctgagagaaagggtattatcttaccatcaaatgttgtttgtcgtttaaaaagatccatttatggtttgaaacaggcttctcgacaatggtttaagaaattttccgcatctttactcagtttgagattcttcaaaacacatggagatcacacattgtttctcaaagattgtggaggtgagtatgtggttgtgttagtgtatgttgatgatattgtcattgctagtactaatgaggcagcagcagtacagttgagtcaggatttacagaatcttttcaagttaagagatcttggagatttgaagtattttttgggattggaaattactagaactgaagcaggaatctcattgtgtcagcgaaaatatgctttggagttgttggcatctactggtatgataaattgcaaacttgtttcagttccaatggttccaaatttgaaactgatgaaagttgatggtgagttacttgaggatagagaacagtatcgtcgaattgttggcacgttgatgtatttgactataactaggccagatatcacgtttgcggtgaacaagttatgtcaattctcttatgcacctacgactgcacatcttcaggctgctcacagagttcttcaatacattaaaggcactgttggtcaaggcttattctattctgcttcttctgatcttactttgaaaggatttgcagactcggattgggcgtcttgtcctgatagtcgtcattccactactggtttcactatgttcgtcggtgattcccttatatcattgagatccaagaaacaacatgtggtttctcggtcatcagctgaggctgaatatagagctctcgctcttgctacttgcgagttagtatggttacatactttgcttgcgtctttgactgctgctactacaattcctatattattttcagacagtacagcagcgatttacatagcaatcaatccggtcttccatgagcggaccaagcacatcgagattgattgccacaccgtgcgagaaaagatagatgatggtgagttgaagttgttacacgttcgcacggaagatcaagtagcagatatcatgactaaacctctgttcccaaaccaattcgaacatcttaagtcgaagatgagtattctcaacatttttgaatcctcatcttaagggggcatattagagagtgttggtttatttatgtgatttagttcattatgtatttcgattatattaaccggttgtatagtcatagtatatatacttgtacaaatacattttacaaagttaatgaaaaaatatcttcatctatgtctaacaaactttctcatctctctcaatcgtaatatcaaacatgtctctattactaactatctatttgcagttaccccaaatcataccatacttaagctgctagcacgattacattatatacacataaacgtctaaaatgtttaatgttttaaaactgtggaattttgttaaaatatttatcctagctctgtttttgggtgacgtagtttagcaaagatactggcccattgggtcttggttcattgggccaacgaaaaaggatttaaataagttaggctgtcatcaaaacgacaccgtatggttgaggacgcttttgctgcacgacgaagcataagcatgattttccggtcaagtcttttgagtatcagctaactgatttacagttttcgattcgaaaatcttaatctccatttcattccttcgacatcttcacacaaaccctaatctcatttctggtaaatccgattttgggaaactctaatttgatctcgagatcgctaacaacgatggaagaagacaagcaaatgcacgaggagaaatcatctctggttaaagaagaaccggttcgtggagaagagcccgagattgagaaattgacagtggcagatgtggacgcgccaccgaagagtaccggtggttggggttggggtttctctggcttctctgtgctttccgatctccaaaaagctgcggaagatatttctcgtaatgtatgtactcactccaattttgacctaattttatcaattagtgttttctgataatgctttagatatcggatccaaagcttatggtagagctttgtatggtatgttgaaggaacttctttgatctagactctttgattttgccgactactgtaggctgcagcggtggcagagaaagcagcgaaaagcattgcagagatgggagaagtggatgaagactctgaatcttctgctaaggaagaagagaaaactgaagaagctgatacagagcaggatagtgatgatgagaatgcgaagttaaagaagtcagctcttgagagattggagggtgcaagtgaagagtcacttcttagccaggcaagtttttttttttttgcttcttatgtacaagtcattgttcatgctcatggtgataatgttggaaatgcgttaatgcctttgcctacatagacctttgttcctccatatgttattttctgttggtttgttgttggcttaagtcaagtcattatttttcgtttgcttagacgttagaatttacaaggtatctcgatctttcatcttccagggtttgaaggttttcgatgattcagttgagagtttcacttctggagcttggcaagcatttggaaatgcgttaaaagggggcacaagtttggtgcaaaagtatgtttcttttaatttgtctctgttttactgaaagctttaatcttaactgtgttcaaagtacaaactttgtgaacgaattggttgaagccgctgagtttataccctgacaagaaggaaagtaatcctttagtttgagggttgtagtttaaaggatttatcaaagctccatgatctttcttaagggaagtctgcaccgaaattaattacgtcaattgtttagcattccgtttctgagtctctgagcatttaatactttgttgacacaccacagaatgagcatactcagttcatttactttaatagattcttcttttggtaaattagctcatttttgtttcattagtaccaataaaatgttggggaagctatatgtgtgatttccttagtataagaatctacaatggttgccgggcttaatgaacctagaggtcgtctgtttcatgtgtacagacccgttaccctaggaagaagatcaagttattgatgctccactatttctcttgtaggcttgaaaacagtgtccagcaaggttcttcgcctagggaagctggatctggtgcaccgtctctactagaggtttgtgctgtttgtgttgtcttctgtctttcatagcttaacatttcatttatcccatacttctgatcttcagacaggaaaagcattaactgcgaaaggaatgcaagtacttgaatttgtgggcaaggaaactatggatttactgattacagagactggtattggagctgagaaggatagggtagactttaaggatcaagtacttgaggaggttacatttgatcgatgcttttacatttatggtggtcctgagcagcttgaggtgacctacttatctctgaaaaccacctgtctattcattcttggataatcgattttgtcttccctcaatttttcaatgcatggtactttcaggaattggaagcattggctagccactatactctgttgttcaacaggagaaaggggaaattgtcaccagatcaaaaatcgctgtatgacgggaagctcaaacaaatccagcaacttttcagctttgctgatgaaatgagtggaagtaaagcagagtctgacaaagggaagaaaatagatatcaaaactgaaggcaatgatgatgacatgaagaatctgcataactcaagtgtcagcaaagctgctgatatggctactgggtaattatgactgtttccctttccctctctaattctacattttcgtttttccatcagtctcatttgtctgtattttctcataaacatcaccactatacgtcccttcattgcgtagcactgttataggaatctcttgttgtccctccatatcattaaccatatgcaatcctctatatgataagagagaaggtgaaattagaaacgtggaatctttgtaaaagtattttttttgtaaattccttgcatcaggaaatcttttatgtaaagataaaaaagattaatgtgtatggaatatatttctttgacttgttttttaatttgctcgtcacttatgtttatcaggttcacaaatgctttagcgggactacacgtaaatgatatgatccagcgaaccggtggcaggcttgaatctcttcactcagaaggagttcatgtatgaagtttgatcccttcttatttcttttaaatattgaagagttttaattctaccaccactactatgtttccttttattggctgaaaaacgacctattaactagaaaaatgaaatctcgttctgcagagactttcagagatgtgctgttttgcagtcacacatctgcttatcctcggtaagtccatgatatctcatgccaacaaagttcaggatgaagacactgaggcattgaaaatcgagtgggcagaggatcctacagagaaagctaagctgattagaggcaaggcagaaacaatggctggatatgttgaagcagtttccaatagctttataacaggttggtccaattcaacttacttcaacttataactgctctatcgcatttcttcctgaatattatgggttgctagaatcatctaattgtgtagtaagtcattcatttgtaagagtaggagatagaagcaacatttcttctactaaaaccaaactaaaaaaaaaacttttgtttcacaatgaagactaaaactatgaagaagggaagttctgggaaactactggttctccagtcagaaaacaacggaatttagaacagctggagtggtaaagggtacttagcgtataagtacttcggtaatgaacactccacgtaaaagctggcttaatcccatttcaatacctttacaaagctcaccttaaccacttcactttagtttggggtttgtccttgccttctttttagtttagtacatagttatcatctgggattaagacagaagaagatagatatgtttgtgatttgtgaaactctataacactagaagaaaagtgacagtttccaaatacccttttccccattgcaggaatatcagatgtatctgaaacatactcagctgcgattaaaggagttgcagctgctgattccaaagatgatcttctgaaaacatcgaccatgcaggaaaaagcaagcaccttcaacgatagtcttcgctctgaccaaaccacagctatcacaaagatccaggaagggcttcagtacctgtcctatgtcgtgatttctacctcgatgccctctgcctaatataataagagtcagattggtcttatttgtggtttacatgacttggatttgatttagttttctttctagttgtagatatatctctttcgctagctgctcttatggtaagtctttcccacttgtgctctacttctttgttgtctggatcttgaaagttttattaaatctaggaaccaaagattgaaagcagggaagcgattagtactttatcgaacttttgttagaaatatattgttgcttccagagtttttacttggaagttgattgtgttatatgtgaacgtagctttcaatatttgaattcatattgaaaagtggtttatttagactttcactggaaaaaatttacttatgtagagactggtaacaaaacaaaatatagagtagaaagtggaattactgccgaagcaaattatgaactaactccgaagtgtatgtcatgcatgctatagtggcaatctctccggcaacacgttttaaagaacccggcaagacaatgaactggagacagtctgattctgcgattcaacaattggtttaagatatcacattaatcaccaatataatttagtttactatctccaatgatcaatatgtcacaagagtcgaatgcaataagaaatcagaagcaaattgaagaaagaagaagacacattcttagaccattcaacaaatccccaaagctactctttaactgtgtcgctcaaaacgaaatctctctatgagattggatgaaatagatagaggccaaaggagaagtaacagaacggcttttgttgttgtaatttaagtgttgcatcaactcttttttacatatgggtgtttcttgtgtatatccatactgctgaattattttagaggatgtgaaatcacctgaactattgcacccaacgattcagacagctacttgaagtagccagattcaaattactagaaagatcagaaattccattttctagaaagaatcgatccttatctcggagggtcaactgtccaaacatttagcacctgtcataccttcaatcttatctttggtgacctccacaaagtgacaaattacttcgtgaaactgcttaagacctgataatggtagaataatgaaggacatgtcataacctcccacctatattttcatgtattgggaaaaatgttttgtgcctacgaccacaacaaaatcaagctctcaaacgttaaacaacaaagattttacgtcagatatccttaggaagtggcccaggttattgttcctaatatcaaagatagcttgattcatcacaaaatatatatatacagaggagtctttaacctaagagaatatcctaagcttgctacacaagatacgatcttaagagataactattatatatttactgatttacataatactcctcaataacctcaaaaagatgccaaacttttgatatacataaactgttttgaaatgggatttgatcgacttttactctattttgcttgaaaactcataattgttccttgaaacatacgaaattggaaatagctttgaagtattcaataacttttgatttctcaatggaaaacctaataaaaacatagtaaaattgagctaaaatacgatgttatctaagtggatgattggttggggtgtaactctagattttttgctgtggagattttgttgtagctgtgttggctgtagctgtaacttttcttgctgtaaaattattgctgtaaaattattgctgtaagttttttactttaaatatttataaaaaatagattaataaatataataattataataaaagactttttatagtaaataaaatgcattatattactaatttgaataaatatattatgatgatagaaaaaaaaatcctatgaattcttgataaaaacaattgtttttttttcttttaggtttgataattatcagtttttttagaacttattgtttttggttttatatttatgttggtaatttcaatttcttgtattatataatgaattaaaatttctacagctaagaagatagggctctgaaaatttactctactacagtcttaacaaaaataaaattgggctgtaagtttaaaaataaaacttgggaattatctgaaataccaatggtatcagaaaactttcctctaagttcagaactttcaaatctagattatctttgttggaggttaccactccctccaggtgggggagagaaaacatattgttacgcttggattttgtggttcatatggaaagataggaataaaaaagttttcaaaggaatacaatctgaacccgcaaatatattaaatcacgctatgagtgaaaaattaatgtgggaagaagctcagttggaaccgatcgactctaccactatttcgagttctttggactacccaactcaatctataagatgtcagtttgatggttcatggaaatcttcagatcgaaatatgggtttaggttggtggtgttttcaaggagatgatcaaacgatattgcttggtgctaaaagtcttaggaggggcacctccccacttcattaggagttagaagctttaatttgggctatgaaaagtatcctttcaagaaggatcatttgtcaggcgttcgaaaccgattgttcagagctagctttcatggtacagtcacctgaagaatggcccgctttctccaatctgctagacgatcttcgagtgcttcgcgtctctttcccctttttctctgtttcccctttttctctctttcccttatccctcattcttgtaatgtaagagcggactgcttagcccgctcttctagaattttaatttctgaaattacttttgtaaacactattcctcctaattgggtaaccaatcatggagatattattttttaattaatgtgtagttgacaaaaaaaaaaaaaaaaaaaaactacaacactattggtaagtaatctaggctttaagaaaaattaatgctttaagtgagacttacaacccaaccaatcatgcactaagtatcatattttttttgaagtagttagcaataattagttaaatttattaagagtttgacatgattattgatggtatccattttttaatgcaaaggttcaatagagtggcttactggcttatatcccgtgagaaaaataaaactgcaaatctattaataaggagaaaacaacaactgtaaaaaaagcttacaaccggttgcgaattaagcaccaaatgattcaaaatattttagatattataaacataagataatgagacatataattttttagacttttgttctaggatataaaatttagttttggtctgataaagttcatccggatttgggttcattattctacaaaccacaggaataaaaaatgatcatgtatatttagcgccaaataatcaagtattacaaagattagttcctatgtacctcgggttccactctttttggtacgaaaaattattatatatatcagaatatttttaagttgacttcgggtaccagaggaaatatagtaaaagaggatgagagaatgagaaaatgagtatttatattatgaaaagtgacatgagtttaattataagaaaagatcattatcatcataaaaacaaataaaaaattggttggaatatttgatttgaaaacaattcattcgatgtaacaagcaactttgcaagctgatagagcaagacaaatatgttttcttacattaataaaactagataggtaagcatttttacatttttatattccatttttatcttagacatttaattatacgtaatttttgttctttattttaagttattactagattttaacccgcggtacaccgcggagacaattcattttttaaaattaatatatataaaaatttgtaaattattttatagtttaccattgttactaagtaacgtcctgccaaacccgtccacaaaaaaactatttattttattaatattgatcttatttataataagtttatgaatcattgtcaaaatatattagtcgttgcgggacgttgaacccacacatttttcgccaattggttaatatatgttcattcttaaaatttcgaatcacaaaatatgacaaaaaaatttttgagatttttttaaattctatatattatatgatgatgttaattatttttgatagattaaacttcttataaattcaaatattaataatgttttatgaagtttaaatatacaaataataatatttaaaaaattaatattttttgccttttaggtaatgatataataactctaaaagcaaaaatttagaagatttaaatctttaaataaatattttcatgtctaaataattaatgtgaagtttatgctaattttaagggattgatgtgaagtttgtttggattaaatttgattgataatgtgattgacaatttaaattaaaaatttaatgtaaaattaattattttagaaaaattttttaatgctaatggcagttggttgtaaataagtccaactctaagatttatttgctaaaatggctgcaaaaatgtatatatagattttgtaatatatagttaaacaacaaagataattcaatatgaaacttttgtaaatattgaagataatttattttctaattataatattgacaatttaaaatattttcttatagaagattgtactccatctaaacttgtaaatgatatatatatatttttttaatatgttgaagtttaagtctgaaggccctaaacgtgcgccgaacccagcacctccacctaagagatttattattgggccaacaccacgttggttctctctttctttatttttttaactaccctatcacattttcaacattgctacattgacagacaaacatttattaaactataggcttccaactcaaaaccaattgacaataagtggaaaaactcatattttatatatatatatatatatatatatatatatatatatattacttaacatcttacttaacttccaatgtatgatcatatcccgaatacgccccacgagataatggtcttttaaacattgatttgatatgttcggacatagatcggtggaccaactattggattggaccgatgtggattgtgttgagtgtgttcgaatcggactcggataccatatagagattgatgagagttagagattggaagaatatgttattgctctcataagaatacatcttaactaaaagaatatgttattgctctcataagaacacaaaaataaaagaatgataacttcttgtcttagattcaggaacgaagccgatcgttagatcattgtatccctaataccatatagagattgatgagagttagaaattggaagaatatcataagaatacatcttagggttaagtacataaaagaatacatcttagggttaagtacatatttatagtggtagactggtagtgtttcctaatctagatgaacacaactctctatgatagaaataacatatattttcgatatcttctagatccttctataaagttatcactacgaaacctagaattatcaaagatcgtattcattatataccatgagaaactatattcaacaagtcgtactgtactcacctcacaattaaagcattgtcaaatttagaattaacgttctagcaattgtaaaagacacatgaaaaaccccacgccattcacgggactctccctaatttattacaaaataaagaacaagaagatacatgaatattacaaagcattaaaacaaaagattacaaacttaggaaagacggttagacggatgataacttatcattgataagggaaggcggagtaagagtagaggccatggcggaggagagccggaggaggtggagaagattgccttaagaagattgtgattgcgttagccagaaccacaaagaactcctttgctttcatcataatttctatgcatagctttattctctttatcaacatctttttctttctctttcgctatttttttttctttctctaccttcaaattcttactccatcatcttcttttgtatttatatgaagtcaaacatgcatgccatgtgaattataaaatatgtataacttaaacaaaaaaaactactgtataacgtgttttgactttttctataaaaaaaggttgaaaaccaaaataaaattgtcgaatatttctgcggttttacaggttttaattcttggcaattataaaatcctattatatttcataagtgttcaggataagtattagagtttaacgatgccgaagcgtttaaaccgatcaaagaggtaccttccgacttggacgtgatctggaattggatgaagtcagggaagatatcacaagcgaatatcaaccacttatcaccgatcaagtgtctctccaaatctgagaaaaaaggaaaatcgaagattcaagtccgaaaaataaagaaagaagacatataccgactacccccttatataaatagggaggacttgattcgagaagatgattcgcaatttcatacagaaagccatagttttctttttgttcttgtataaaccctaacttgttcttgaagcaattttaaaccactttgtaatcgagagctttgatcgagaattcaaaaaagagatcttgttatttttcttacttcataaaaaaaaactttggagaatctagtttctacattaatcctaacacaaataaaagccatttgtttttttttttaaaaagcaacttatatttctcactttaactcaaacttgcaccgtcctaaatagggcaagacccatgcttctcgtgaattttagtcatgttcagagcatagtctaagtaaggtctatgtttttcattctttagacttttgggttatacactaatggtttattatcttaggtttgtttattatttgttgtttttaatgatgtcttacttgccaaagaagcatgacgtctacataaattcacaaactctttattcgcaagcctcatgaaatcaagaagtcaacaatagtatggttggtcatccattttgaaaggcatcgcggtcttacagaagggtacacgcttcattgttgttgatggatcctccattcatattggtaaagacaacttcgtcgattcccatccggcccgtcccatcaaagaaataatttcctcctctactttgactcttaataatcttaatacattaaactccaagtaatggttgttaatggttcaattgagttaaaaatgagagtggaaatcatcaacaattccaaaagtcaaacactttgtatggtgtgttttctccggaggtttgagtatgtgttcacgacttaaccaagaggaatgaatattgatccgacatgacaaaaatgtgggatctctaaggaaactatcaattaaccatgttctcttcactttcccatgtcattttgacgctggtttagacccgactactgatcaggtaacgagcggttggatcattctagatcaacgggaacccctattagttggggagtagcctaattacaattggcctcatcacttttggaagcggaagctaaagctattttggcttcaatacaacaagtttggttaaaaagttgattatcaagtacttactaaaatcatgaatggtgatttcaaagacatatccatcgataatctgcatcaaaacatcatcggttagactcagaaattgtaagaagtatgtttagttcatatatacaattaagaaggcgatgtaatgaagctgcacataatggatgtataattattaattcagatttttattcggattcatgtaatatgccggaatggctggaacatcacatgtacttaattaagggcttgtttggttctccctttgccatccgcaaacgcagcgtttgcggatggtggcggttgttagcgattgacaccaatcataaaaaccgctaaataccgttttgaaccattcgaaatagccagatttcaaaagctccttcccgcaagcgtttgcggttgcgggcggtagcggttaggttaaaaaaaaaaattcttaattaattaaaataattctggcttccacccaaaccctaatcactataattaaaataatctaaccatttatatatcttattcttattagaaaaccctaatcaatatattataaccctattcttttaattatagcatccacacaaactgatgaaaatcaaaatcaagaatcaaaagtaagaatcatctatcattttatccattcattagctagtgtaattctttgagtatttcatggcatcattgtttttttattttgtattcttttgagttttttgattgaatacatgtttcgatttgttttctcgatttaaaaatcatttggttaaacgagataatatattgtatttttatttcttttatcaatttttgagatgatatattatatttttatttggtcagaaaaatcaaattttctaatattatcaatttatcataataatatattgtatttttatttattttaatagtaatatattatatttattttggttattttttatttagttactatcgcacccgctggtttaccagtcataaaactcccgcaaacgcatccattatcaaacgttcaaccagtcgttcaaaacgcttgatacacttgaaaccgcaaccgctcgtttctgtaaactcccgcaatcgtaactgcacccgctatatttaaaccagtcaaatcctgagttaaataaagttctaattgcagaaaaaaactattaaataaaaaattacatataacaaaaaatttaattttgtaaatttatattaagaaaaaccttagaagttaacagaaaaaaagatgaagaaaattttaaattaaatttgaaaagaggtacaaaatactcatggagaaggataaaaaaaaacacactattattaagtctaatattaacgtgtaaacttacattttttacgatttttatttttattataaatgtcctcgaataccttattttgtaattcttaaagaaaaaaatataaaatgataattaaagtatattaaaaaaaaaattgacatccaacaatcctttaaaaaaactagtacgatagaaacattaagtaaaattgtttctttttaattagaaaacaaaatagagaattaatttgatagaaactttatatgtgtatatccatatcctatgaatttcttgtaagtttttttttttatttttctattagatttgccattttgaccacacaaaaaaaaaggttctttttgagttgcccttgacaagaaaaaaaagaagaaggtttttggtattcctactttttggttttggtttttgagttgcccttacatcaaggtaatgagaatgtttttggtattctatatacatatgcaaattaagatatatatatatatatataatttatattaaataaaagaaagtattttgttttatacacatgttaagtagtatgtatacgtaaatgttttgttctatttttccattgtgatttcgaaaacttaagttaaaagtctctgtggatatactactagtaaattagttgatgtaaatgtatatttttctttgatttttttgttaatattgaatcgaaatgattgactgacatgtatataaaacattttaaataattgatacttaatcgaattttcgtgaaatggttcaagaattatataataagatagattgtttgtcacgtgttataatagagtccgttctaacaattttgtttttgtttttactactatcttttaccacttctaacccatctttatctaaccgggtttttgtaagtggtcttaaaactttgattaaacaaatctgcttattttaagagttacaatcggattctagaaaaacaaaataaatgaaaatggagatggatgcataatgttcttttagatgggaaagtgattgcaactagctagtactccaacaagaataagaaatagattataaagctattattgtacactattggatttcgaacatttctgaaccatttttacattaactttagagattggcttcaccgtccgtctctgccggcagctcgccgtaccattccaccattattgttttctaatcattacactccagtcaccaaaataacttatccaaaattttttaaaaaataacgaacactctataataaacaattaaaaaaccaatcatggcttcacaagtggtcctcagattgatgactgaaaatacaaataaatagcattaaagtatttatataaacaataaaaagtagctcaaggccgtcgaaaaaataaaaaatagctcaagactttacgacataaataatacgcctataattaaacaaatgtttgtatctgatcggtagcatctgaatttaacataaaatgctcaaactatcttagcttagcagcaacacatacacaaatactcgtagctacgcattacaaaatctgagtatgtttctctttgttaaaattttccatagttccaacatacatgtattggtaaccaaacaaatgcgaaattgaggattaaccgtcgagtctaatctgcattttgttaatttgttacactttttagtcgataaatatgttacatttctttagagtaaaattcaaaactaagcattttatagagcttttcatattgtgataaatgatatataaaatgcatataactacacaaactaatagtaatcgggtcggacacgacattgaataaatttttgcgttttcctttaactacacgtctacactaattaaactttaaagcctaaaacaatacaacttgaaaaagaaactattaaggttataaatgacgtgctagagttttttttctttctttttgaatgaataatgatttagctaaagaataaaaaatataaatttttgtgtggcttctgataacttgtaaacacttatcgcgtaataaacaaacatttgacatgttatgcgtcaattagttgagaaatcagttgaacctggacatgtcttgttgtccgaaaccgggaccattgttttttttacgcacgtcttattcgtcaacctcttttccattttttatccccacttttgttttatttagatatgttctaatttgaaaatatcttggaacaatatgttaatatgataatcatgggtttcatttttcttttccacatcgaattctaacaatctaagagcgaaacaaacagttaaaaactctagtgtgataacgtatgagaatggctaaaaactagttcttgtttataaaaataaacatacatatagagaaagtaaggtgagaggtgatttattcgaaaattaagaaattaatatacaaggacattcattataaaaaaaaaggcaagaatatacatatgtatagtatgtacaaagcattaaaacgaaacgattacaaacttagggaagaaagccgatgatgtaatgggaagaaggaggattaggggaggcagagtatgagtagagaccatggcggagtagagccggaggaggtggagaagattgccttaagaagattgtgacggcgtcagccaccaccaccaagaactccattgttatcttcgtaatctctatgcatagctcgattttctttatcaccatcctctctttctttctctttctctattttgttttgcttctttttttttctttcgtctctaccgtcaaattcttactccatcttcttcggtatttatataaagtcaaacatgcatgccatgtgaatattctatctataacttgaaagaaaaactattgtataacgtgttttgacttttttttgaataaagtattctaaattaaaaagttgaaaatttaaaataattggctgactgtttctgtgggtttacaggttttaattattcgcaactataagaaaatcttattatatttcatgagttttcggaattacaaaaaatatattcattcttccaattgcattccttaattatttttccactttttgtggttcatgaatcctgacaacaagaaaatactatttgatttgctttttttgccttaaagcaacgtccctctctctctttatctaaatcttgcaccgtcctaaataggggaagacccatgcctctcgtgaattttagtcttgttcggtgcatagtttacgcgactaaatgtgacagaggaaaaacaaaataattaacactgttgcgtcttatcttttgactcttggttactttagtttaactgcaacgtaagactttctagttctattttagaagaagaggttatatttgtccccggccgaaattccaatggtatcacggcttgcagcgtttcactaccgtgatatttgttttccagaccgtagtcccggcgactatgcattaaacatggccttcatcaaccaaaacaattgctagatgtgacttgtgagaaagctaaaataaacatatataggtttttagaaaaaaaaaaaaaaaaaaaaaatacaaaggctccaaaaggagggtaaaaataattcattaaagaaattttttttaacaattataagtgacaaataacatttgtattgctaactttatccatatttgtattattttaaacagtaaatatcaaatatatatttaaaaatggaaaaattacatcgtatgccatatttttcaaaatccttatgcaatttgccatatttttctgggccttacaattcatgccacatttggatgggaaatgtcaattttgtcctcaccatttcttctctattttatctctctttcctcgaaatccgtgcactttgaccatacaccattattttcccgaagactaaacgaaatgcatttgtctctctacatataactttcaattaaatttgtctcccaattttattcatcataaattctttgttgtatctagatcttgtccccgatttcattatctttcaaaattatcatataagatggcgaaaatagatggcaaaaaatagatggtttcagcatctatgtgaagacaataacgctcaactaatctgtggaccaaaatagatggcgaaaatctaaataaaattcaaaattcttaaatgagaacaattgcatataagatgtatgattcataataatagagcaagataatgaaatcgaggacaaaacgtagatgcaacagagaatttctattcggggacaagatctggagactaaaacaaaagtcttactccaattgttttctgctaacaggtaatcatgttccctaatgcattatatattacgttgtcccccggtatcaggtaatcatgtctcctaatgtattatatattacgttgtcccccgcagaattttaaatacccaataacaacagtagaaaccagctgttcttcactattctgtcccctaatcctttatgcttccacaatgatttttcgtcctgtatcatcacatcaggcaaaagctgttatgtcaccatcttcgtcagagcgctgacccaccttaagggtaatttcgtccactgaattccacgtagaccaaaatgtggcaaattttgaaaggaatttcagaatatagcagaaattgaaagaaatagagtgaaatatggcagattttgcaagattccctttaaaaattggtttgaatgataaaatattgagaacaattttagctaacaaaatgaaattaagctgtcatgatgtgatatacaatatttgggtccacgaaaaaaaacatccaaaggagtagcttccggcattggcattaatgtatagtctcgaccagtccattagaagagtgagtgtcggcccaaactttttagcaagtaaaaaaaaaaaaaaaattagctagcccatcaattcttttaaattatcaacagtcgccgaagtaatatgtcacctgacaaaaaaaatatatatgtcatccgttaatactataaaaagttttcatattttttatttttgataaaaagttttcatatattcgatgttttttaaatcaagaaaaatatgattaaaatcctccacatatttaaaaagttgatttaaatctttaactttcgacaaaacaaaataaatatcaactttttattgagttttcaaataaatatctaacatttattatttaaataattataaatcttagttacatttatattttaagccatattccaaattataactagaaatgggtgagtaaaaaaaatcataccgctctacaagtaaattatttaattagaagttaatatttaataaatttaaattgtagttttaattggtaattaaaatttaaattagagttataacacacaaaaaaactaacgaaaaattaattttgtacaacatgtcaacaagaaataaactttcaattttagtttcgaacatgaactatacaaaaattgaaacaaccttaaaaataaattttaaaatatgaagaataaaaagtaagtcaaataaaaaccaaaataaaagtagattaggcaatgacaaaatccaacggccacaatgcaacaatgattgttaccggagcttgcgacttctcttcatcattctccctcgcctcttcctcctcctccaccgtctccgtcacaaccttcaacatttcctctctttcctctaaccccaacatcatcaattccagctcaactctcttccgttccctttccttctcccttatccgccaccgcagcagctactcacgtcgctctctccgccgtctctctatccacacagttcatggaaacaaaacccaattcttctctcactcgtctacacgaactccaccacttttcacggctaattccacagcccaacgaagcgggactttcgtcgaacaccttacaggcattacagaatcggaagaaggaatcagcgaagccaacggtttcggtgatgtagagtctgctaggaacgacataagaaacgtcgcgactcgtagaatagagacggagtttgaagttagagaattggaagagttgcctgaggaatggcgacgctcgaagctagcttggctgtgtaaagaggttccaacgcataaggccgtgacgcttgtgagactcttgaatgctcagaagaaatgggttcgtcaagaggacgctacttacatctctgttcattgtatgcgaattcgtgagaacgaaactggattcagggtaaaaccttcatcaatctttagaagctttatcaatggatttgtgttgaatttgtattgaaagttttgatcttttaggtgtatagatggatgacacaacagaattggtaccggtttgatttcgggttaacgacgaagctagctgaatacttggggaaagaacggaaatttacgaaatgtcgagaggtatttgatgatgttttgaatcaaggacgtgtaccaagtgaatctacatttcatattcttgtagttgcgtatctaagtagcttatcagtagaaggttgtctcgaggaagcgtgtagtgtttacaatagaatgattcaacttggaggttacaaaccgcgtcttagtctgcataactctttgtttagagctttggttagtaaacaaggagggattctgaatgatcagcttaagcaagcagagtttatctttcacaatgttgtgacaaccgggcttgaggttcagaaggatatttatagtggattgatctggctgcatagttgtcaagatgaagttgatataggtaggataaactctctaagagaagagatgaagaaggccggttttcaggagagtaaagaagttgtggtatcgttacttagagcttatgcaaaggagggaggtgtggaagaagttgagaggacgtggcttgaattgcttgatttagattgtggtataccttctcaggcgtttgtgtacaaaatagaagcttattcgaaagtcggcgattttgcgaaagctatggagatatttagggagatggagaagcatataggtggtgcaactatgtctggataccataaaatcattgaggttctatgtaaagtccaacaagtggaacttgtggaaactctcatgaaggagtttgaagaaagcgggaagaagccgcttctaccatcattcatcgaaatagccaaaatgtacttcgatttgggtttacatgagaaattggagatggcttttgttcagtgcttggagaaatgccaacctagccagcctatatataacatatatttggattcattgactaaaataggcaaccttgagaaagcaggggatgtcttcaatgaaatgaaaaacaacgggacaatcaatgtgagtgctagatcctgcaacagccttttaaagggatacctagattgtggaaaacaagtgcaggcagagagaatatatgatctgatgagaatgaagaaatacgaaatcgaaccaccgcttatggaaaagcttgattacatcctgagcttgaagaaaaaagaggtgaagaagagaccgtttagcatgaagctaagcaaagaccagcgtgaggtattggtaggtttgttgttaggtggcttgcaaatcgaatcagacaaagagaagaagagccacatgatcaaatttgaatttagagaaaattctcaagctcatctggttcttaaacaaaacatacatgaccagttccgtgagtggttgcatcctttgagcaattttcaggaggatattataccgttcgaattctactccgttccccattcatacttcgggttttacgctgaacattactggccaaagggtcagccagagattccaaaactgattcatcggtggctatcgccacactcactcgcgtattggtacatgtacagcggcgttaaaacatcatcaggagacattatcttgagattgaagggaagtctcgaaggtgttgagaaagtagtaaaggctcttcaagccaaatctatggaatgtcgagttaagaagaaaggaaaagtcttctggattggacttcagggaacaaactcagctttgttctggaaactaatagagcctcatgtgttagagaacttgaaagagcatttgaaacctgcttctgaatcactggacaatgttaaggaagcagaagaacaaagcatcaacttcaaatcaaactctgatcacagtgacgattgtgtcaattcagaagcacatttttactgaaaaggcaaccaagtttattttttttaacttgttggggtttgatatataataaaacgtcgttaaattagtaactaaattcaacctgaccacttgaagaaattcattatctggttggatatttttcattgcaattgattagctaaaaaaaacatgaaatatttaatttgtaagttggaaccactttccaaattttataaaaactaatccctcaaaaatatgtagttagtttaggggaaaatgatcatttcatttctcaactatttgcaattaacacaattattcttcaactatcgtgtgtacaaatttaatcctcaacttgtcgttaatttaacaaatttggtccaatagagaaacattaaattactcgattaaaacctaataaactcagaaaatcctaaaatttctccaaaattgaaagctgatatccatagttcttagttattctttcgaattagaagcttcttcttcatctattcatcatactctcgtcaaaatatgcgaattcgactttaagttttacgtgtttatcaatcgatcttgagaaaaaatcacatagaattcttagtttgagaacatttttgaggattttctaattttattaagttttaatctagttatttagggttttcttattaactagtaaacattgaccaaattttgggtcaaatttgttaagtcaacaacaagttgaagattaaaattgcgagcacgatagtcggtgaataattgtaaatagttgaagaataaaatgagcatttttcccgttagttaaatcttttaaaatatctttatgttaaagtcgttaaaaaaatttatataataaaataaaataaatataaaatacctgatactacaaaaaagggaaaaaacccaaaaaaaaaaacaaactattttttatttgaaactttaatacccaattgtttttgattggaacctaaaatcccaaaataataaatgtcgttcaagaaaaacacaatctaattgttcgtggttaaatcatacatgcgcgttaacagacgttaatttgactgacggaatcactaaaccgaggttaatggttaacaatccgcggtttaattgactaactaaaagactacagtaccctcatttgttttccctttaagtctctgtgttcgtgaatgtttattgccctaatttcagttttcttcttttgctcagaaaaattgaatgatggtgagccatagctctggatctgatgcaaactcgttgagccggaattggggtcctctttgcaactgcggcagagctacgacagtggtgaaaagctggactaacgataaccctggaagaagatttttcaaatgtggtgttcatggcttctttgattagagagatgctgagaagccatatggttggcagaaggtgagcttactagaagcgagggatgagattcgtcagcagaaagagaaaatcaaggcacttaaggaatctgtaagggctatgagttgccaagatttgagtgggtcaacgactgtcaatcatgggttagtcaaactcgacgagcaagagaaagacaagcttgaaaatgaagttgtgatagctaatgagagggaaaaaatgcttcgtcagtttattctgttgtcttggggaggcttcattgttgtcattgggatgatacttgcaatggggaagtattgttttgttgttgttagtgttgttgtttgaatctgttttgtttgctgtcttgttgtatgttagttgttgtcttgcctaatgtaactcttgtttgaagtagtaatggaatgttaaacttgcatcaatagtcattctatttaaccaaaagagccgttaagtttaacatgaaaacaaggatcccacaaaaaacaaagtgggatcacaccatcctacatagttaagccacatcatcctacatagttaagaacacatcatcctacattaataagaaccttaaagtcataatactactgctttccaggctaccacacatcaaagacttggttagtccatggagacatgtagaagacaggcggcttagaagcttcatctgattttttgccacgacccttgccacggcccttcccactgttttttccttcaccgtttttaacccttggaggacgtccacgagctcgtcctgtacccgtttgattagctgcgggagcacttgagtattgaggaatttgtgtagactggctttgtaatgccccgcattacgactaggaatatttggtaagaaccgcggatcgtacaaaattatgttagtatcagaaattcagtccgggtaagctatcgtaacggcagttcttcaggtcatacttccggacgtgttgggtgacttaggtaatagttaggggagaattatattattattaccaagggatttaggatttttagggttaggcatggtgtaaggatcggaatcatcctcgacaattgatgagttgacggtacaggaacgtaccgcgggtgagaaaccgagcggtcatggtttggccatgagctgcttgggcggtcatcagaacgtgtggatgagagtgagccgaccttacttgtggccaagagttgcccacgtccatgcttatccttatcccatgactcatgtgtttatccatatccttatcctatccaaaactcatcattatccttatccgttagtaacttggtgaccaagtttcgtagcttagcccctaagtttcgccaactatataaaccccttctcatttcattccaaaccatcactcaccacttcacaaacccacctaaagtcacttaggaaaaacgctagcattttaggaagctctcgggaagttccaagtccgttctgccaacgaactgtgagtttccggtcgtgtgaagtagaacacgattaggaattttaaatatttatttatttatttaatttatgcatgaggttgatattttatacttggtataaattatgcatagattaggattagcttattatacgttttatcgtataatcggcttaagtatttttaggatagatcttgcatgcttgcttggtttatttgggtagttgcaggatgttagattagtatttagtatatccgttatgctgcccgcataaccttatactatttcataattttattacgcattatttactatcaagcatttgaattgtggtttgttgattgcattgtttgttgattgcattgcttgttaattgcattgtttgttgatggttaatcttgcttcggctcgattaacctttgtgtggtagttgcttgttagtagattagtatgagtattgcatttagtctatattcgtagaattgttatggtagttgttaggcgaattatcagattgtccccaacggctcggagtgggtcgcaaccgccgggcactacctgacgaggtagtaaatattatgccgaaagggaataaggtcccgtacttacggcacggagaaggggtgtgatccttctagcctttgtggctaagggtcgaggaagcatcgcctagggaggggaaatcgaactcgccggaagttaaaaggccttaggaattatggagtctatagcatgctagtttaggattgtgtttccgttgcttgtggcttctatgccgttttgtttgttattagttatttttgattgtttgattgggggttgggattggggattactaaccattagagaacccggactcattgagtaatattagattactcatgacgctacctatttgttttggaggtaaccagtagagggtaaaccatagagggagctaggacgttaggaaaagccagtgtaggtttcctgcctttttgtaaaatatgtttgtatgaataaggctttgtaatcttttggaggctagctcccagtcgtaaaaccttatttcatattctctgtttggtagtgtaatctacctgaatgatcttattgttaaataaataagcttgttttatattcgatgttgttctcacatgattaaggtcttgtccggaccgtcccaacactttttctcggcaagggttggcaagcctggacccgagtctaagtgggatgcgcccgcggtacgttggccgggatgttgaattcgttttaaccatcttggccggctgtccgcgagtgtcatcaagtagcatcttcggccatcctgtttatagaacggtttgggggtgttacaggctttgagctccggttggtgtggactggctttgagcttgctgccacctccttggtgcattgtgtatgctccatggatcatcattatcctatgacaaatcaacaactcagatcagatctcattacttaccagtttaatcaaaacagatctcattacttaccagattcttccttggtctccctcttttgcgtggaggagctgatagtactgtggcatttttacaagtccctttgttatgccctacttgtttacagttagtacaagtcacagttcctccttctcttgttgcctttgttggattacttgcggattcacctggttcctttgtcctagcaaacttcttaggacgtcctctcttcttccttctatcaggcacttcaattgtgctttttcctgttttcttccatagcatctctccattgactggttttatgtttttcttgtagttggcttgctaaacacttgtcaacaagtatctagaaacatagctgcatttacatgaaaggaaaatcaatcaatcaagtataaagaaaacggttaaagcatactcaaattttgaatcacttactcttctggatcacggttatgctcattgatgacatagattgcatgtggacaaggaattcctgtgaggttccattgattacaagcgcaagtcctatgaagaatattggctgtaaagcctccattaccttccatcacctcatatacatgctcactatttttgagaacagtacataacttagctgatttgcgatttgctttaagtactcccattatgtgaggtgggaactttgacttacatttagcagtctggtcacgtcttttagaaatacgcttcattgcttgtcgccttacatcttcaagcatactaatcacaggcttcttcctagcatcccttaatccgttatggccctgttgaaactctctgataagttattgcaaacatcctcacagcaagaatgcccactgaaaaaggctctacaccacgtctttggctctgttttaagcaaatcctcataagcaagcggatcataacttttcaaagctctcatgttgtatgtgtaagtaccatctgttgagctgtaggcaatggcccagaagtaactctcatgacagtagtccccgtaaaccttcttccaattggaatagatgtgcctagcacaatgcctatgttcagcctctggaagcaagtcagcaactgcattgagcaaccccttctgcttatccgaaataactgtcagtccattacccacacctaactccaaatccttctttaggtgatccacaaaccaagcccacgagtcattgtcttccaccctaactacagcccaagctatagggtagattctattatatgcatccctctccacagctgttagaatctcacccttcaattctcatttcaaaaatgacccatctagaccaatgataggccgacaacaatttttccaagttctactaagagctttaaaacatacataaaacttgtcaaactgttgcttaccacactctcttgggatggtcacaatatcagtgtggatatccttattagacctttgaagttctgcctcataatcccatagctttccaaactgaactttctgagtttctaccaccatgtctaaagccattcttcttgctttttggcatatccacttagacacagagagtgtgtacctcatcataatctcatctttgatgtcagtccatctcaaaaaaggccgccttcttgcttcatctctgaacatcctagcgatgactccctgtttcagcatttttgctttcccactcttagcatggtgatgcttatcaacataagtttatactctccatatacctgaacgcttatgagtggagcagtatatcttccactcacaattttcatggctgcagattgctgccaacttatttgcaccccatctacacaacttcacatcataattcatcttcaatacataccgcaagagttgatccttaacctcttaaccactattgaaagtctgcaacatccaaatgtatggaggtttatccttcgaaaacttctgtcgagatgatgatctttctgcttggtcatacgcatcccattcatcatctgtgtccattgcatgatccggacgctctacatcataacactgtctctcaaattcatcttcatcttcaacctcttcagcaacggtttcttctggtactgtgttaatgtcttcagctgcagcatcatcaacaacatcatctgcagcttctgtaccattgtgaatttcgtcaaagaaagcctcaaaccgaggatcatcgtgccttctttcttctactggatcttctccattagcttgtactctttcagggcactcattagtttctgctgcaggctcctcgtctatgatatcttcggcatcatcatcctcaactccaagttcctcgtcttctacaacatcatttggaagcggaaaagctgcaggtacagagacggcattgacgatgtatatgtcaacttccccaccaatcatcgcctcacgacataactcccttatcccaccatctttgtcggcaccgataactcttgctgaatagatttcctcttctggaagcttgtaccaaatcgattcgacttcaccattgactccattttctttgcaagaatcgtcgaatatagaccatgtcatcagatcaggatccatcaccatgtctttcgcctcgacccctccagagtaatcgaacccttggtccgtgaaggatacatcgcctctatagtttatgttgagtttcaaacactcgaaatcactggaaaatagaaattaaccgattagtagtggtaaacaaactataacctaactgattcataacccctaacccaatttcaaacaaacccagaaaatttcaaacttaagaaccctaaaaattcaaatcgacagacccacaacacacaaatcgacatacctcatcttttcgactgtttaccaactggatcgaacgcagatatacccgatcaaacgcttcgaatcatcgcctctttcaatttctaagttttttggagagaaattagaaatttggggagttagggtttctcaatcccaaatcgatttgggggaaaacaaatgagggtactgtagtcttttagttagtcaattaaaccgcggattgttaaccattaaccccggtttagtgattccgtcagccaaattaacgtctgttaacgcgcatgaatgatttaaccacgaacaattaaatagtgtttttcttgaacaaaatttaatattttggaactttaggttccaatcaaaaacaattgggtattaaagttttaaataaaaaatagttgggttttttttagattttttccctaaaaaaaaagaataatattttgcaaaaaaattaaataatttttaagaaaaagaaataataaaaccaaatatttattgtgtagtggccatagtgggcaatcacctactatccactcttatggaatgtacccgaagggacgagtaataaatttcttattttttaattttggcagcaagtaataaataaattaattaaaagttaaaaataaataaaaagagacaaaatttgttggaggaagaaagtgggtcctagggttttcttctatctgtcgttttgatttctgcgtttaataagagacaagtccccgtctacagtcttttagagacggaagctactgagacagagattcacaccattgttctttgtctcttcctctgattctttctctctctctctctctctctctctctctctctctctctctctctctctctctctctctctctctctctctctctctctgtctcgtctttgtttcggtttcaagaaagcaagaggaagaagaagaagaagaagatgggtaggtcaaagtgtttcatggacattagcattggaggtgagcttgaaggaaggattgttattgagctttacgatgatgttgttcccaaaaccgctgagaattttcgattactctgtaccggtgagaagggtttaggtccaaatactggtgtacctctccattacaaggttctctctttctctctatatctttgtttatactctcttatgtatgaaatgtagaaatgggtatttgttgtttctgtgatttagggtttgtggtttaatgggtcattcgtcattggggtttataaagatcaaaacttggttaaatttgcaattagttgtgaaagaaagatcaaaactttaggatgcaattgtactatagaatggttctgaatgcttatgatttgaggtttaatgggtttttgctcgtattgctgaatagcttctgactttgtttcagtattgcaattaggttactgtagtttgtagtggtgaggtaaagatcaaaactttaggttgaaattgtactataggatgatgtacttatggtatttggtgtatttgtttacaggggaatcgatttcatcgtgttatcaaggggtttatgatacaaggtggggatatatcagctaatgatggtactggtggtgagtctatctatggcttgaagtttgacgatgagaattttgagctgaaacatgagaggaaagggatgctctctatggctaactctggtcccaacactaatggctctcagtttttcattacgacaactcgcacttctcatttagatgggaaacatgttgtgtttggaagggttacgaaaggaatgggtgttgttcggtcgattgagcatgttagcatagaggaacagtcttgtccttctcaggatgttgtgatccatgactgtggagaaatccctgagggtgcagatgatgggatttgtgactttttcaaggatggtgatgtgtaccctgactggcctattgatctgaatgaaagcccagctgagttatcttggtggatggagactgttgattttgtcaaggctcatgggaatgagcactttaaggtgctttttccattgttttaaattgaatatatacgtttgtctgttccatattttcatttctgtgagtctgatctgtttttgaccttgatttactctcagaaacaagactataagatggctcttagaaagtaccgtaaggctttacgctatctggatatttgctgggagaaagagggcattgatgaaggtggtttatcagtttttctctctatatatgtttccacttacttcatctcaaaaaatatttatactatccataccaatgttcccactcactctctacttgggatcttgtagagacgagtactgccttgcgtaagacaaagtcgcagatcttcactaatagtgctgtaagttcatcatgcttttacaccttttttaaagctacatacatccttgttgatatcttttcttgtaagttgaacatatctaccttatatgtgtgtgtgctttacgtaccatctgaagattgattgtctttggagtcgttgatttttccaaaagaacttaaatttcttactctgttgggtttttaacattacaattttttttgttgaatctgcttaattcttacggatgagctgtaccgtcgatagaatgataagcaattgattgtgaactaaaaattaatttgaagtgctctacactgcagacctgtcatttatgttggtttctgctgtttgattaatttcttgggaaaaagtagggtaggttgaccttgacataagcaggataatattctctgagattatgcttgtgggacatacattgctcatatgaattattgtttgcatctctgtttacgttgccagtgttttcacttgtccaacttaattgctttgttgtgcctgtataaccgatttttttttactatgttatctcattgtattgtaactggctgttgtggcaggcctgcaaactcaaattcggagatgcaaaaggagcgttgttggacactgaatttgctatgcgtgatgaagataacaatgttaaagcattgtttcgacaaggccaggtacttaaaaacttattgtttgacagttttctagaacctagaccacaataacgaaaattctagatttctcatgagaggaagatggtgtctatttcttatctgcgtttgtttataatgttaggcatacatggctcttaataacgtcgatgctgctgctgaaagccttgagaaagctcttcaattcgaacctaatgacggtgagtgattcatcaagcttctattagttgtggtttgacaagtttggttcatcattatcaatgtatgaacatagtacaacacacttaaatatattacgagagaaatctaactagcatttatttctgtgagttgatttttcagctggtatcaagaaagaatatgctgctgttatgaaaaaggtcggtatgcggataaagaacacaagttctttttgcagttactttacttctagtataaaatcttagagctgacgttaataaccatgtgttgcagattgcctttagagacaacgaagagaaaaagcagtaccgcaaaatgttcgtataggggggggggggggtgctctgcttcatttagggtaagcctaagatttgttgttaatctcagaaaactgacctagtgtaagctttatgtcaactaatttaactctcagggtttttgatgttgtctatgtaggtttggtcggatagtgaggaagaagactaacaaaaagtgaaaagaagcatataaagaaagaaaaaacattcaaaaaaggactttgggaattgtttctatttccctcattttggtaaacatgtttttacttttgcatcatggcaaagactgatgcatagtaatatcgactgggaaattgtttttacccaaaggatagattcagtgcttgagactgttaatgaaattttgagttacttggccactctgagttctttgctttcttccacgatttttttcacgtttgcttgaatcagcaagtgggcactacaatgctagggaattttggtttccgcagcatgcatatatgcttacaaaaaatccattgggaactgtttctatttccctccttatgaaataaaatcaaatacgattatttttttttgcgaaaacaatactttcttctgtttctaaatgattgattttctagaaaaagaattgtttctaaaagattgatttttaaagtttttcatgtgatattaattggttagtattgtgaactgtaatttccaagaaaaatagttaattatcattggtttagagttatagaaaactataaaataataaaataatatatttatattgttttcttaatatgtgtgttttgctaaaaatcaatctttaacttaatagagcaggtagaactgaaacagttttatactaataagtgtagaccaacgacaatcacaaattacagcgaccgtctcggaggacctccaccattctgacaaccaccgccgcgaccacctttaccgcgttgactacatgatgctgatactggtattagcttccttctctctgctattttatttataataaaaaagaaaactcacaatttattaaatgctaactaaaattaatctactgatttaatgaaaatactctaaatagtgtagggtcctttttattgttgatccaaactgaaccaaaatcgaaattgtatcaaacaaatgaactgatttgctttcatttttttccgattgatatcaaaacaataactaaaaaatatagttaaggaaatcaataaaatgaaattttaaattccttgaaacttttaaaattaatatataataattcaaacgaaaagccgatatcaaatgaagtcgattgaaaatcagtttctcttttggattaaaaattcctaagaaaatctatttgtgttttaggaccagattaactcatatattgttttacatacactaacgagaaagaaaagaaaaaagaagtattgatagagagaccgttgatacgccatgggtgtaactcttgtcgagaagaaaacacacagtttatgcgccaaggggccgccaataaagccagtaaaagcaagaagacaagccccaaactcgaaggacccttttttgccatctttgttactctcttttgttagtttgctaaaccgctgaatttaacgagtgaacaaaaaaattcaaacataaatacaaaccaagagttcttcttcgccacacatttagtcaacaaaagactggttgaaatattataaacacggcctcgcaacaaaaactgagaaattttatttctttccacatcacatgacttgtaatttccgttgaatttgtttaagttggcaatccaccataaacatgacttgttctgggaccttggtcttcctctcaactacaactcttcttcttcttcttcttgatcgtctcatttccaaccttaacacaagaacaattctccatcgacagagacagtcctgtcctgtatgagaatttccctcaaatgcattatgtttaaccccacaaagcaacttctccaaaaaccttaaccgtcttgtcttgtcttgtctcttcaaatatcctttgtctcacttcctacacttatggcttctacaatctctcttgcggaagagattcggatcaagaacaagtcgaggctattgggccacatcttcttctaatatctcatgtcttgttcattaggttaagaaccacacataacctatgtctaatcttgtataagaggcgttggccgtgaatgaaactcaataagaaaatctctttaagaacttctaagtttcttgaccgaatacctatgggaaatccgctgatcacgacgatacctatgagaaattttataatttctttcaacatcacatgccttttcgttagaatttgtttaagttctcacaatcaaccaaattgttgctaataatttgcatgtaaacagaaatattttgacattataaaaagagaaagaaaagctcatgcgatgtggtgaaatattactcgcggcattgtcttctcggatgttcgctacgttagaaatgtcaattatggcaatgtcttcttgaacgtttgcaataagttcatatcaaacgtttggatacccttcaatgtctagtcctatcaccgtaacttcattttccttcctttaagtttacatttctaacaaaacaaaatcctaattttttttttttgcgagtacagcgatgtctttggacgcaaacgcaatcaacaaaaccaacacatcacacaaatcaatgaaacatatcccataaacctctatcttgtgttgtatattttcacgtttagtgaaatgggaaacgtcgaaaagatatgggaatattaccaactttaagaaaactattttgtttagttgaaaatgtctttgtaatttactttactttgaaatgtaagtaacttaagcaagttgcatgttaatttttgttccgactacacgtccacaccggccgaactttgagcttttatgttacatcaccttatcgtcactcaaacgtaattagaagacaaattaatgctgaaactttacaagatgattcgtaaaatatatgtttggattcgtcaacgttaattagttcaagtagcaattaaatcagagacaagtttcttccacttaaatatgcattgacctacttagtcaacgtccttccactaaacaagtccaatgcattctttttcttatgtatccttctcttttatttggtttctcacttctgttccatttttaatttattttatcataggctataattcaaaattttacggccgtaccttactttttcacgcatgtaaatgaatgtaacattgtgcgctaaaaatgttagttcgataatcattcttctttgttatcaaatattttaataaaataatgtgactaaaatctcacattttcggcagttttgcaccatatctcttgtatttcctccttctataaatagccaatctctaaagtttcaaagaacaccaacacaatctcttatcaaataactaacaattcacaagaagaaacaatggtacactctcgttttttaaacgttgttttagtcctagtgaccattgcttccatattctccacatttgccgaggccaataggggctttgggtggggttggggtggacactccaacaattcaagtggttcaggttcaaactcgaggtccggatggggttggggttggggtcaaggctccaactattcaagtggttcagcttcaaccccagggtcaggatggggtttcggctctagtcgaaacggctcaggctggggttggggttggggcggggttcccaacaatacacacagctcagggtctggcggctcgggttggggcatggggcctaacaacaattacagctcgggatctggcggctcgggttcgggctggggatatggaggtcattcaaaaaactataatgccacctacaatggacctagaaagatcatagtcggtggagacaaagagtggacttatggattcaattacgctgactgggcttctaagactgctccattctttctcaatgacatacttggtgagtcattttagacattatctcgcattatttaggaaatgcatatacttttgatggcggtcgagtaatctattgcgagaccacttgatttttggggcggataatctatccataacattttgtttcctaaccgtatggataacaaaaaatatatttacgtatccacacataaatacgtttaggttccattccaatgaagtagtctgccgtatacgtttctacacttatagcaattttaacaaaaatattcatgcggatgcagttttcaaatacaacccaccagccccgttcacgcacagcgtttacttgcttccgaacccatcgagttatgaaaagtgtgacgtgaagaaaggcaaaatgattgcgtctccgaagcaaggtgctggaaaaggctttgagtttgttctaaaacagatgaagccttactacatttcgtgtggcgagcatgacggtgctcattgcagcaatggtaccatgaagttcaccgtcatgcccatgctaccccgttggtaatttggtggtattaaatccaatgctaaagtatcaaacattaggtttttgttttgtttttgtgtcgtcaataaatgagattaccattatttacgtgcgttataccatattcacattttgttggaattgtttgtgcttctgctttatgtctttatgagatcaccattgtttgaatattaccatatgtttatggtaagatggcaaggtttggtatttttgtgacgaaaaatgacaaattttaatatttgtttgccgttatccgttaacaatgttagaataatggtacaaacctcaaaacatcatgcggtcagaaaaatgcgactgttgttcattagagtattattaggggttaaaatgggtcaagtttatgggtaaacacaattcagctcaacgcaacgcatgaactctaatgagctaaatttttttactcaaataattagatggatcaaatgaattgagttacaatggattagtggtttacccattaacccaccaattttggctaaattgaataaaccaacttaaatctctaaagtaatatcaatttgagtttaaccaaaacctttaaactaattgcatataactaattttttccaaatagcttatcaacccatcaatttattcattatcaacattcaacacaatatcattatcatattaccatcaccatcgcaaccataccataatcatcatactatcttcatcatcataatatcaacataccatagtcatgatagctatcattttaatctaatatataattttgaaatttatttatcctttgttgaattgaatttacttgttgatcatttactttctcctattacatgtagacgtcgatcttaatctcgtatataatttttaaatttatatacgtaaataagacttaagatggataataaaaagacattcatatagaaaactttgaagaagtgataaaaactaatttatataggatgtcaaactaagtacaacacagaagaagaccatggtggtacactcactggtgcataaagcacatgcaaaacaatgtggtatacgttgattatagttaactctttatactgactagataattaagttttgagttatacaaaattaatcatgcgatatttaaggatttcctctctttttttttatagtacaattatcttttgttggttgacaaaagaaaacatcacatagacgcaagtaattaataattactcgtagatgtgataattacacgaaatataaaaaagaaactgttgtaaattatatgttctactcccaaatcaatcgggaatatacgtcttaattaggttatctttctctataaatacgtttctcacataaccaacacagattatcgcagttcacaataagcaaagcaagagtcacacaacatatactaaacaaagcacgtaaaaagaagaaaaacacgatggctctatctggttcacaaaaaaagctgctcatactcgtcgtggccattgcatgtctctcctcatctggcgcagaggcgtggagctggagttggagttacgggtcgggttggggttggggatctgacgggtcaagtacctctagctcaggtactggttcagactctgacggttcaagttggagttggggatccgatgataactccggctcgggtttgggttcaaactctaataatggctctggttggggttggggcacgggatcaaaccgtggttctggctcgggttcaagtaccaaccctgatggttcaagaaggagttggaactggagtcttaagtcaggctggagttggagttggggctcaaacgataacgactcaaacagttccggttcggattcgggctcgggtttggaccgtgaaacaccaaaaaagatcatagtgggaggatcagacggatggaaaaaagggttagattacaaagattgggcttctaagaatgctcctttctacgtcaatgatgttcttggtaagttattttatgtgtacaattccttattttctaatgttaaataacctaattggtgaataacttcttttaacatggtgcagttttcaagtacgacaaatctgctaagagaaggaataatgtatatttgttcaaagaccgatggagttacatgaactgcgacattaaaaatgcgaggaagattggttcaacgagaaaaggatcagaagaaagtttcaacttcacacttaagaaaatacagccttacttctttgcctcgggggagcatgatggtgattattgtcgtaaccataacatgaagttcactatcttcccagtcctcaccgttctgattaaatcctatcatgtattcatgttagggtttttgtttgttttgttttgttttggatatgagatatttgagtttgatcatgatttggtgcatgattggttgggctttaagtctgacttacagccttaatttttcttaaagccttgattacaaaccaatcgtgctatagctttatttttaaacttatagaccaaatattttttattttgtttttaaggctgtagtagagtgaattctcaaaaccctattttcttagctgtagaaaatttaattcattagataaatacaaaaaactaaaattatcaacataaatatataacaaaaaacaaagataagttctaaacaaactgataattatcaaacttaaaagaaaaaatttagattgtaatgaatttatggaataatcatagataaaatttagatttattttattaagaattcttaggatttttttttatatcatcataatatatatatttaaattagtaatacaaggcattttatttattataaaagaaaaacttttattacaactattatatttactaatccattttttataaatatttaaagttaaaaacttacagcaataattctactgcaataaaagttacagctataaccaacacaactacaacataatctctacaacaaaaattctacaggggagccaataacccacttgatttattggaaagacgttattatgataaatcacatgtaataaaaataaattagatcatattgagtgggagacaattgatggatctgagggaaattagtgtttagttaaatcgatgtaaagccaatgataacgaaagaattgagcacatatatatttcttcttaaattaaccccacgcgcttctcgtttttgtatcagtttcatctcaatgtacaatatatagcagacaaaaatatcaatttaaagggacgatattaaagagctctgtgttgattttgttgatagagtacttgcattgcaaggtaactctcacattaaattctccctcagtgattccggtattgaattcggatcgagtggattgttggatagagaatgtgatggtgcgtggtgtttcggagattaatctataaatcattttggatccagcagcaggagaaaactatagtatgtttccaaaagtttttgagaacaagctggaattaacttatacatttaaaactctcttttttcttttttttttttttttttttttttttcaatacttaaaattctcgttctacacttagtttggttaactgttaataagtttgagattcttcttcctgctttgcctgcgcttgaggaattagtcatgtatgagatagactagaaagaatgggatgtgagtgtgtctgtatcaagtgcaagcctcaagacactaacaataaaatccaccgattgtttggaaagtttttcatttgatacacctagtcttgtttacttatcttactctgatttcgtcgcggaagattattgtttccatggtctctttcaccatgtcacagctaaatgcggggatgcttgtgactgtgtttctcgataggacagaggtcggtcactcacatcttgccctctaaaaatattagagattaaagggcttcaaggaacaatgaaagagatgaacatagtaaagcatttcttagaatattttccatgtttgagagagataaaaatctatatggaagagagtgatcctacacaactcaaagtcacagaaggttctcaagttatcgcggagaagatggaaatcaacaacaagttatcgagttgcaatatccagctccttttgattggttgcttgtataagaagtggactgcacaatgaagtctttgaagagccaaagttgctcatagtgttgccaacgtttccttggaatttgacattggttttattttgtttatttggcttgaaaactgtttcaaaccaaacgaatcggagataaagatgttcttctcttctctttcatagacatcttttaatttacttccccagcaattatttggtagacaaaatcatatactattatgcaagtacaatttgttaccttccccacttgtgttagtagttatttattaaaaatctggatatcgtttcgaaagttccaaccaaatgacatgtttaattgaaggtaaaacatctttagtgtttgttctcacaaatctgtaatcaatcaacatgttacatgtgtatgttgaagtgtataccaaagtcaaaattgtacaaccgttaagacattgacatttggagtttctcaaataataaactcaacttgcaaaactcgtttagtactactctatagaccatcgaccacgactttatgtatacgcatttgtgttttaactataataatttaaactgaaaatttgatttgatttttttttgtcaaatagcaaacacgagaacaacgtttggttgcatgcaaaatgtttcttttcttattttcagggaaaagtatagaagaaacaatataagttttttttcctttttttttttctttgtgtgtaaaagaagcagtatgtgtcggtggactgttttttgatattgggagattccaaatcaattccaaaatctatgaaaacaaaaataaccaaaaatacggtaaatttttgttccaatatcttgaactcccactgtttatcaaaaaaataaataataactatgacaacatgacatgtttttcttattttcatactgttcaacaaccatgattaaaattgtaatgaaaagattttgaacatctgtttagaactatatagctaattagggtctaaactcagtacagtatatgggatctaaccttttagctattgaatcattttcagttatcaattaaattgttctccgtatgaagtaaccacaaaccgagacttaaagtaacatgcatcaaagtaatactagtcttcgccggctcaaaacctgttgataattttaaattttaaaaagagacgatgacattgacaaatacgaataaaaacctataattagtcgcattataacacaagaaacatcacagagtttaagctattataatgtaatttggagtgtgttatatatatcttgcaaaaaaatagattataaattggatatttggaggtatatagccgccattagtgtaaccattacgttaatcacgtagaaaaataagaattcgagaagccatctctattgaacatgatatcaattatattaattttatttcattagagtacaaaaaaactgcaacaatagtcaatattcatgaaataaaaggacaacaattaactctttgctgcatgagaaaaccgaaccttttccccacatgagtttgacaaattacaagtttttagctttttttttcatttctggtgaaaaactttagatacgtgagctcaaaaataattatgaaatatattataaatttcttatgtcacaaataatttatttaaactaatccctatagatatattaaaatttataaccaagaaattaattaattaaccaacttatattattacaagagttttgtgcaacgaattctcaaatcgctcatttttacaactttaccttatgaagtcaaaaataataaacaatataatccatttttgcaactttacatattgtaaacgttttcacgatcacatacatttgtttttgaaaaatttaaagatatagttgaactcctcatttcgaagatttcgattatattatttatcaaaattttaaatttgacaatagtgaaaatgggttatattgcgtattatttttgatttcatatgattattttgcattttttttagacgtgaaagataaaattgcaaacatgactgtaaagaggttttttgcacaaaatcctatatttagtaattaaatattatttgcgattttgctatacataactgaaaaattttggtaaacaaagttttgtctaacaatactaggaaatacatatgaataacaatttttttttttttttgcccaaaaaaaacaatttttttgcttaactgaaccaaattattattgaccatatgaataacggaaccgcaaaacaatttcttctaagcaaaaccaagtaaactaaaaaaatagtggaaaaataaaaccaattcattctggtgtcacccacagttagacatattgtcaaaaccaaatcatgaataaacgagtcggttatgataaataatggtttgaaaaagtatgtcttcctaattcatcaaatgtactgtgataaatattaaattagctagagactacatttattgagttattcacaagaaaaaaagtttcaggttctatttatacagatgtaatctattcaaatttcagtctggaaagatgtaaggaccaataatgtataaatcctcttgatatataaaataaacaactatgaaaactaaaaaaaaacacagccaatttggtccaaaaaaacatatagaatagagagttagaaaaatcacaataattaagtcacgacccatgaggtaggtaacacttataaaggcatctcctaattcattcaccattcattttctccatctctctctctccttgtacctctctaaagtcaagcttttcgtctaaaagggaacaccttacaacaaccaagaaaggcaaaagaagaacagagcatccaaagaacaaaccattaatggagatagaagtggcagaagcagcagcagcagaactcaattttgacagcacaacttcgtctccttacataacagctccttcgagcccaactcgatttggcaacaactttttcagtgcaccaacaagcccttctccttccacttcctctaacataccttttgattgggatgaccaaccaagaactcccaagaagagatcagccatcggtttcgaagacgattttgagttcaatttcagtggtcagttggagaaaacttctttctctgcagctgatgagctctttgatggaggaaagattcgtcctttaaggacacctctcactcctactgtttcttctcctagatctaggggtcttgagatagaagattcggatgatcagaaagatcgaggaagagaccggtcaccaggatcttcttcttcgcgttatgatcgtaaaggaagccgttctatgtctccgttaagggtttcagacattatggttgatgaagaagaagaagtacaatcaacaaaaatggttgcttccaacacaagtaatcaaaaatcctctgttttcttgtcagcaattctgttccctggtcgtgcatataagaagtggaaactcaaagatctgttgctattcaggagtgcatcggatggaagaccgattccgaccaaagagtctttaaataggtacgatatacttacaaagaaagatgccgaggaagtgagaaattcgagtatcagatcgagagagagttgtgaatcttcggtgtctaggtcaaggaggaggaacggagcggtggtttcggctcacgagatgcattacactgagaacagagcagtatcggaagaattgaagaggaagacattcttgccgtacaagcaaggctggttaggctgcttagggtttaaccctgcggtcaatgaaattgctagagttgggtcattgtcacgtgcttcctcttgatccctctcgcactttttttttgtcctaatctattatttattcacttttttggtggatttaaatgtggtgttgaggttccatcaaattgatgggaaaatatgataattgtttaattcgtgacgtttgatacaagtgaatacaagaaaaaacaaatgtaaaatttgacatacaatgtattttggctattgcgttcattcgacgaagaatgtccatcggatactaattgacaattaaacaaatttgccccaccattactaggctagtgagtagtgagagtgctcagtcttttcacgagctccatatgttatgtgggcattaaaagattttaaaacaattgacgttagaattttcttatcgaaagtgttaaaggatcaatattcaataccatatgagtcgatccaataactactaattgatttcttagtcgtaattctcatatagtattagaattcagtaactctaaccatgtttaatgtcttaaagtggaattc

SEQ ID NO: 233 - DNA, 84544 bp, Arabidopsis thaliana
ttgattcctctagaccttaactttctcataaccatcacagctccatcaatctctttcgaatcaagacaagattttatcaacaaatcgaatacaaacggagcagagccacatcgattataactcttaatcaacgaacggaacactttcaagactctgtcttcgtcttcgtcggtggcggcgagacggagagcgagacgtatgatttcactagcgtggcttttgagacgagatcgagagaggatgtggatgagagttgagcaggagtgtgtgtcgtgagagcagagagagtaacggcgagtgaagaggaagaaacggagagagaggtgaggattgttgcggaggcagagagtgatttcggagaattgagaaggtgtgaagcctgaaggctggagtgatcggagagtggaccaacgggatttggagcggtggtgtgttaggattgagacggcgtcggaaattagaggatctgatggcggagacggcggagaagagacggtagtgaggagagagattgagaggattgcatcgggtttgggtttccgggtcgggtcgagtatccgtcttagtattgaagttgacattttaaaagtttcttttactttcgagttgaactctcacagttttatactctggtttggagaaaaactgggtaaaaaaatctgacaaaacagccgattcctgcataaacttagctaactatgaactgaaagaaacatatacgtggggttattggcccaaagacatatatatggttctcttatgcaactcccgagtactctctttctttgcatggttgatacatgatcggatagtatcagaatttttcacattgtttgggattaagatttttaagtattatataaacgatgtcacaattcttaactcttgagctagcttttgggttaagttaggccacatttctaatagatagacaatgttttttgttataatgttgaagagagaaaaaatcacctcttcttctctttttgatactcatcgtaaatatggcttttcttacgcataaattttgtgggattgacttccacaccaattagaattaggttctctcttctctacataacttaactcttacctccgattaaactcttcctcctaaggtatgtcttccaatcgacgatttaccgcatttggagggaaagaaacgcaaggcgacatggggaaataaaatcaactcacaaccggctactcaagctcatcgacaagaacatagaaatcgactcaactcaatacgtgaaacaatggacagaaactacgactacggacggatggagtggctcaccctcagctccattccgtaaggcagtcatcaagttttttttatcacttcaagattctttcaaaaatataattcaaaaacagatgcattcattgtaaaaacattttttggtttaatacaattttacattcaattttttaaaaaataaaaatctcacctttcttaaaaatattttttaaattttaactttttctttataggtttttaaaccttcgtattttagtaaaaggtaaatatttaataaacttaggccatctacatcgttgattctcaaaaagagtttctcatgaataaaattttatttattttaatcaaattcagataaagtattaaattttaattaaaaaataaaatcaacaattcctgaaaaaacacagagacgattctcacttctctctcctctttttcactgctttatattattttaataataaatatctcttctagatactgctgatgaaggtgcttatcagattagataccggtttagctggttaacttaaatcaattgtatagctatagtataaatacatgtacattacacattatgtgattgaatgagaaaatcagattaatatcctcaacaaactctctctgatcttcttcttcgtaatatggtatcagagccaacaacgctctcatctccatcgtttttttttccgacttgatttcttcgttctgagctccgattcgtcttcctcgttgcatttccttaagatccaatggtgacggtagctcgtgtgactcggaaatcgactcgctcgaaagctggtacaagttcagtgactcggaagtcgcgatccaccggtgctgttactactcctccgaattctcctccggttaacagatctggagcttcgcgagccttaacatcatcggaatctggagatccgactcaatctccctttttcctgcatagtgcagatcatccaggtttgaacataatctctcatcgccttgatgaaacgaattatggtgactggagtgttgctatgcttatttctttggatgctaagaacaaaactggattcatagatggaactttatctcgtcctttagaatcagatttgaattttcgtctatggtctagatgtaatagcatggtgaagtcttggctattgaactctgtttctcctcagatttatcgaagcattctccgtatgaatgatgcttctgatatatggcgtgatcttaatagtcgattcaatgtgactaatcttccacgcacgtataatcttactcaagagattcaggactttcgtcagggaactttgtctttgtctgagtactacactcgtctcaagacattgtgggatcaattggatagtacagaggctttggatgagccttgtacttgtggtaaagcgatgcgtctgcaacagaaggcggagcaagctaagatagtgaagtttttggctggtttgaatgagtcttatgctattgttcgcaggcagatcatagctaagaaggctttacctagcttgggagaggtgtatcacattctggatcaagacaatagtcaacagagtttctccaatgtggttgctccacctgctgctttccaagtttctgaaataacacaatctcctagtatggatcccacagtttgctatgttcagaatggtcctaataaaggtaggccaatttgttctttctacaatagagttggtcacattgctgagagatgttacaagaaacacggttttcctcctggtttcactccaaaaggtaaggctggtgagaaacttcagaaaccaaaacctttggctgcaaatgttgctgaatctagtgaagttaatactagtttggagagtatggttggaaatttgagtaaggaacagcttcagcaattcattgctatgttcagttctcagcttcagaatactcctccgagtacttatgcaactgcaagcacttctcagtcagataatcttggtatttgtttttcaccatctacctatagtttcattggaattttgactgtagctcgtcatactctttcttctgcaacatgggtgatagactctggagctacacaccatgtgtctcatgatagaagtttattctcaagcttggatacttctgttttgagtgcagtgaatctgccaacaggacccactgtgaagatcagtggtgttggtactttgaaactgaatgatgacattctacttaagaatgtgttattcatcccggagtttcgactgaatcttataagtataagttctttgactgatgatattggctcccgtgtgatatttgataaaaattcttgtgaaattcaggatcttatcaagggccggatgcttggtcaaggtagacgagtggcgaacctctacttgttggatgttggagatcagtctatctcagtgaatgcagttgtggacatcagcatgtggcataggaggcttggtcatgcttctttgcaaagacttgatgctatttctgattcattgggaactactaggcataagaataagggttctgacttttgtcatgtatgtcatttggcaaaacagcgaaagttatcttttcctacttcgaataaagtttgtaaagagatatttgatctactacacattgatgtttggggtcctttctcagttgaaacagttgaaggatataagtatttcttgactattgttgatgatcattcaagagcaacatggatgtatttgcttaagactaaatcagaggttcttacagtatttccagcgttcattcaacaagtggagaatcaatataaagtgaaggttaaggctgtacgttctgataatgcacctgagttaaaatttacaagcttctatgcagaaaaagggattgtttcttttcactcatgtcccgagactccagagcagaattcagttgtggaaagaaaacatcaacacattttgaacgttgctcgagctctcatgtttcagtctcaggtacctctttctctgtggggtgattgtgttcttactgctgtgtttttgataaacaggactccatcacagctattgatgaacaagactccatatgagattctcactggtacagcacctgtttatgagcagcttcgtacttttggttgcttgtgttatagttctacatctccaaaacaaagacataagtttcagccaaggtcacgagcttgtttgttcttgggttatccttctggttacaaaggttacaagctgatggacttggagagtaacacagtgttcatctcaaggaatgttcagtttcacgaagaagtgtttcctctggcaaagaatccgggttcagagagttcgttgaagttgtttacaccaatggttcctgtgtcctcaggtatcatatctgatactactcattctccctcttctcttccatcacaaatttctgatctaccaccacaaatttcttctcagagagttaggaaacctcctgctcatctgaatgattatcattgcaacaccatgcaatctgatcacaaatatcctatttcttctactatctcttactctaaaatttctccatctcatatgtgttatatcaataatatcacaaaaattcctattcccactaattatgctgaggcacaggacaccaaggaatggtgtgaggcagttgatgcagagattggtgcaatggagaagacaaatacatgggagattactacgttacctaaagggaagaaagcagttggttgtaaatgggtgtttactttgaagtttttggcagatggtaatcttgagaggtataaggcacgtttggttgcgaagggttacacacagaaagaaggcttggattacacagatactttttctccggttgctaaaatgaccactattaagctgttgttgaaagtttcagcctctaagaagtggtttcttaagcaacttgatgtttctaatgctttcttgaatggtgagttggaagaagagatattcatgaagatacctgaaggatatgcagagagaaaaggaattgtgttaccatctaatgttgttctaaggttgaagagatcaatttatgggttgaaacaggcttcaaggcagtggttcaagaaattttcaagctctttactcagtttgggttttaaaaagactcatggtgatcatactttgtttctgaagatgtatgatggtgagtttgtgattgttctggtttatgtggacgatattgtgatagctagcactagtgaagctgctgcagcacaattgactgaagagctggatcaacgtttcaaactgagagatttgggtgatttaaagtattttttgggtcttgaagtggctaggacgactgcagggatttcaatttgtcaacgcaagtatgctttggagctattacagtctacaggtatgcttgcttgtaaacctgtttcggtccctatgattccaaatttgaagatgagaaaagatgatggtgatttgatagaggatatagagcagtatcgacggattgttggtaagctaatgtatttgaccataacaagacctgacattacatttgctgtcaacaagttgtgtcaattctcatcagcacctcggactactcatctcactgctgcttatagagttctgcagtacatcaaaggcacggttggacagggtcttttctattcagcatcttctgatcttactctcaagggatttgctgattctgattgggcttcttgtcaagacagtcgacgctctactacaagtttcacaatgtttgttggtgattccttaatatcttggcggtctaaaaagcagcacactgtttcaagatcttctgcagaggcagaatatagagctttagctctagccacctgtgaaatggtctggttgtttactctgcttgtctctttgcaggcttcaccaccagttcctattctgtactctgatagtactgcagcgatctatattgctacaaacccggtcttccatgagcggaccaagcatataaaattggactgtcacacagttagagaacgcttagacaatggcgaactcaagttgctgcatgtacgaacagaggatcaggtggccgatatactgactaaaccattgttcccctatcaattcgaacatctcaagtccaagatgagcattctcaacatcttctcatgctcatcttgagggggcctatcagattagataccggtttagctggtttagtatagctggttaacttaaatcaattgtatagctatagtataaatacatgtacattacacattatgtgattgaatgagaaaatcagattaatatcctcaacaaactctctttgatcttcttcttcgtaatagtgctcttaacttaaattaaaatcaaacaaactattatattaaacataaagaaatcaaacaaactattatattaaaactttttttgataaaaggtgagcaaatcatatctttaagataaaaaaattagttgtccgaaaaaaaaaaaaaagagagaaagagtttgtaaggctaaatttgttgcctccagactccaggttattgagtaagaactacttggtgtgagattcattaattgtaaggttgtgtcacaacgtactgactgtatttaaacaaaaaaaaatgtaatcatatatatatcagcttcatttcctatatatacggaaaatccaatatcataacgtctttatcatagatcagcccaaatgaaaacatagagaatcgaaaccgcttaagggtgtctatgaacccttaattatttatttgtttgataacatagcacataatgtagaaaggatacaaatagtaggaatatcacaccagaataacgagaaaagactcatacaagacttgaaacatatatattttgcttcactcggtaacttgattaatcatagacgcatgaccagtgagcttaacaacaaaaaggatgcacatcattgactctttcagaggcttatcggtgatgcttattatgatagtatatccaatctgaggttgttaagaaaaaacatatcgttagatcataaaaaaaattaatcaaatttaggtttgaaattaaatgcagtaacttaatggtaaagagaagttactgctgttcttttttcacgcggagtgaatatgttagggagagtaagcacaatcgggccaggtgcaacagggcatgctgttatatcacagagggagtaactttttgtagagaccggaaacatgcctaccgcgagcttgagatttacggttactccatcagagatttctttgtctgttcaaaccaaaatttgtatcaagataaaaacataataatggaaaagtttacatcaatgttgcgggaaaaagcattttagcattacttacttgtaacaccggttatcgtaatctctccattaccgctacgcttaaccgggtctggagatatctccacagaactgacctttaggggatactctttaccagctacaacaagaagaacaaaatgatatacttttttttttttctttaacttccacaaatgaaagtaattcttttttttgttctacatgtatatgaaaataaaatttgatacttactatcgcaagtttggaatttggggccgcataaagcaggtgagaaaaagagtgacacaaggagaagaagcaaaagctgggtgtgagatatcgccatggatatcactagagaaaaatacttttctttttagttttactaagaagtatgtagtacgtgttatgcttacatgcatgcttactattttataggtggtagatcataagattttgcattaaggctaaaggtaatacccctatattactttatatcccacgttatacgcgataatcttaaaaatatggatgtaatgctgtattataggatatatttttctgtttggtatgatctcgtttgagtaccaagaatcatgtaaatcacgtgttatgctaataagttacatgcatacctatactctttattagttggtggattgatacataagatcttcgtaaaagtatttatacgcgagaacctaaagacaagaatttatatggagtatttttttttacaagaatttagatataatttaaacctaaaatattgtaataattcaaacactaccgactttttaaaactgtaaacggaaattaaaataagttagattgggtttaacagtcgtttaagtattatatacatttttagatatataaaacccaaagttttaagaaaaaatatcaaagcattgggtattttctttgagttttgatattttagataccacggtcttgatccggaataaggtatttaccaaaaaatgattgtctaaacaagacgtggctgtttcattgttggatgattagtcttagtgatttctaagactgtttttgttgttgttcgacaactaaatctaatgaaattaatccgtcaaatctctagtgaaatcagttgaaaatagactgttacttgcgccacgatttttctcaggagaggaataatgtcaaaaactgtttatatttgtacattaggttagtaccattagcagtgagagtaacaacgtctatcatgcgttaatagtatacattatttctgttaaaaagtaacatattttgataatatgtattaagtttaattttaggaaaactacccattttactgtaaaacatacatttattttaacattcatttaagcattttttcatttctgacaataaacccaaaaaatttcttataaatgcattttgcatctctttttgatgaaaaataccaaaattgattaatcaccacctaaaaatgcattttgcatcttcttcgagtttctattttgtataccaaaagaaacacaaacaaacatgggtgcttcattttctggatcctccatgtgtcatatgatcacgaatcacgatctcaaatcaacgcaaagatatcacaaccgggatctgaaaaattatagcaaccgaggtcgcatcttttgagtatccatttgtataatatctcggagaaatcaaagtggaataagaatgcaagatcctctaaaaatagaactgttttgcagattctaactttgaccatgtggttcgaataatgatatcagaagcaatgttttagttattgattattttgcacaggctaaagagacgatttttagcttaacgtatggttggaaaaaaaaacactaatccttcattttttaagtttctaaaaataaccatttaccataatcaagtagtgatggacccaagattttttttactatgatcggaagtaaaattttagattttgtttaatgacatatatgacgagtttctcttttttttttttttaattttatattaaattaaattaaaaaagaacagccaatgttgttacaacaagtgctaactatagtttaaaggttataatctaaaaacagattctaagttatctctctctcaacccaaacatgtaaacctctgtcaaatcttctatcaccactctgttttatagccatcaaatgatttcgaatgtgcttatctatccaattgataagccgacttgaagggttcggggaagccccatgtttgcgctcgtttcgctctcgccatagagtataaatcgtcactgcaaaatgcaacgggttaggaaacctgcactgcgatccggccaattgtttgagtttctaagcttacaaattaattggattaagtttctaatcatttgtgtttccgggtcgggtgaaggatctgctttagtattgagtttgacatttttgttttgttttttttgtaaatattagttatgttctaagaccagatccaacagcgtctctaatgggttcctaaacctacatggtcttaaagaaaaaggccaaaaataaaaaagaaatgaaaaaagaagaaagacgtttctaagcttagaaattaattggattagaaagacccaaacgtggcatattctgattgggttcattttttttggtttcacgattttgtttctttgtctccctcggcgattctgatagcgactgcaatttacggtgtgtctgtagcacctcgtattctgaggaagtaggtcggaaagcctaatccgtagaaatttgcgtatagaagtaagtcgttaagtcccgtgaaagagaaagaggaaaagaagcaagaagaaaagaagaaagaagcggaggacaaagacgagaaggaaggtaattattcctcgaatcactttcaatctggcgattgtaccctccaagttaaacaagaaaaagagactcacggtccaagtttttaaggaacatccgtacttctttcgtatcgcaaccatactacgagaaaggtaattgtattctatggctcgcataaggacataggttaagcgaagaaagtcggattataagggaaaggtgtgaaggattcaagagagaaagttgcccgagaagagaagaatcaagaaaagtcttgatctgaatgaggagttagtcgccaaagcaataagaccgaagaagagtttcagatagaaggaaatattcgaaacgaagaaagaagaaagcttgtgtaagaattcgggaaaagaaggtgaatgagaaaggaaatcggacttggtatttataaaattctaactttcaccaagacgtgaaatttcgacgattagtcttgtttcggaaacttgcaactcaagttggctcacttggagcggaagttaatcagaagtggagcccaagttttgttgtcggaagtcatgcaagttacacaacctttcattgctaagcggacgtgccaatttgcgctataaaatgcttgccctcattattccacgagtttttggaaggagaatagagaaattagaaagaaacagagagagctagagagaaagaaggcagagagaactaagacgaggctgagaccacgagaagcgaccaagagtctagcccaaaccgtcgtagctccgaccaagaaaacccctccgagaatccgttcttgtgagtcgtagtgactacattgtttgcttcctatgcattctagatttacacttgaaatccggttgcatgcatgataagctatgacctaaacgcctagttcatcacctagtataatcgcttgcatatttcagtttagaaatcgtcacttagcttatttctttgagtttttcgctaaaatccggcacttcgtgtgtgagccaactcgataataggtttatccgagtttggcgatcgcgttggtaaactaataaagaattagaataaatcgttgaaaatccggctaacttaaacaatgaattagatgcatgtagttgaagtatgttatttcttgagttccgattgtttgtctttgcttgatttcgacttctatgttgcttgatgtttgttgccatcaccgagttcatattggactgggatgtgcttggttgttttgtaggatcccttggatgcggaatccgagtattttaggcgtgtgtagaatagtgtgttgttgttccgttctgtggtggatgcctatgagctttgatcatgagtggtcagtcatgctaaggtatggcccggaacctaggccgggaatgcatgacgatgcatagttcttattggttttctttgtggattcaataagatgtgttggtcggcagttgacaagtccctatcagatccaacttgcgacggtgtgtgaggagaaacagagcacatagcccatagaagaagtgtctatttgtttgccgatagtattctcgttcactaaggcttattcatttcttttgcgtgcttcgtgttcactgaaaatccctttgcgattattaacctcattatcttgcttgcgttgctttagaattttaattcatagtcccaactcactgagtaatactagattactcgtgattctacttgtcttacaggtaacacgtagcaatcaacaagtagaggggacacgaacgttaacaccgccagtccggaaatagccatctatcccaaggggaattggaatttacatattccccttcaaagattgaatatttggtgttagaggaaacagagcacgagatcttggaggtgcttcggcgtataacacatctcagggaccacggaaactctagtaacattaacatgttgtcttctgaattctgtcaaattttaatcatctcttgcgtttttttctaggtttgtcaactttacttatgaatgtttggattgcatatatgacattctcttcgtctttttaactgaagtttgtctcttacacaaatcctaaattaacctcaaaatcaaagctaaagtccgtctatctcattattaaactacttgtctccttattattaaaagagaaatacaaattgaaaaatagtcaaatttggcctcaatttcaatttcaattttggattttgttcattgttaatcataatcgttaagaataatttggacataaattttcattaaacattataggatctgcgtgattaaatctggtgggttaggagtaattactcttaatcacagattcaagttcctaatcgggtttagcatccaaattttgcaatcttaaccattcaacaatttttttatatttacctcatttttggtatctaaatatatgagcatattcgatccctaataactgcacattcaatcatatattgcctaatcgctcgaaaatcgtattaacttattctcataaatctaatcctaaccataaccaactctacaatattcaccacttatctaaatatagccaatcattcaattctattcaaaattcgaatatatattgttcatagtatctttaagtttatgctttttctccaagatttttttcaagattttcaaaatattggagccagaaaccctagcatccttcaacgctataaatatcaacttcattctcatttccaattcattactcaaataactcttaggtagcaactcaatcgtatgctttttcttcttttcttatcacaaatggctcaagcaattgcttacctcgatgacttcaaaccatacaaaatatcttggagagtttatgtccgtgtccttcatacctggaataccacaaagtttggtgatactttcgacatggttctctctgatgtcaaagtaaaatatggccttgaatggtacactaatataatttctttttgagtggtagagatagaagattcatgcttctgtgaagagagagcatctgaaccgttttgagaagctcatggttccaggagagtggaaggctactgaaaactttggattgacttatgcaaaattcaaagcaactaatcatcgttacaaaatgggcttcatggctaaaacaagagttgtgaggatggaaccattatcagattcatattatttgtccttgacttctttcattgatgttttaactggcggtctcaaccaaaactacttgattggtacattttcatcttctgtttttaatctttttaatcttctgtgttattcaatatatatttatgttttgttgttctttttggttcaagatgttgttggtcaaattgtgaatgttggtgaaatggagactattaatgtccacaataaacccactaagaagattaattttgaattgagggatcataagtaaacttcattcagtacatctatttttcattcaaaataaaagttcgttaatatgtttatctaatatctctggggttcatttgcaggacaagttttcactgcatgtgaagcttctaatggtgagatgatcatatgtttggtcagatatgctaagatcaaaacttacaaaggtattctgttttggtattactttcacttactttaacacaccatgtgaaacagccctgacgttaataaacattaaaaacatgacggggacaaaaatacaacactttggttatgaaaaacagaaactatagtgaaaaatagagcatgagatttgagtttctcttggatagggttaacagataccatagatgattttagaatcgtgaggtgccggtcatgggaaaatggggtccaatacaaaacaaaatttatttgatgagttccacctatatttgtaataacaaagagatagaatttaaaatatgaaaataaatctgaaactttcataaaaatggggcctattgttgaaataaaaaaatgttttgaggcctaatttttcttaataaaagtcataaaaattttagaggcccaatacatatgtatcttgagtatctatcacaggcagggtctgggtaacccattgattatcatttccaaatttttgttagattttcatataaattcgttgcttcaatgaaatttttcaggttcatcactcatcatgattcaactaatgtatgaaatacatgttaagaaaaagggtgtaatgaaataaacttgcccataaaaatgaaagtgagacatatctaattgaacaaaggcaaaattacaaagttttagaagaacttatcagctatcttccttgaagttaataatcgaactttgccattccatgagcacttgtatttttcaacaaaagtcttcactaccatatctgcacatacaacatgtactttgatagatttagatctcttataccgtatattcttcttcatatccatattatatttggcaattgccttcttgaaactatctttaccgctaaaagcttgaccgacacggaatggaatcacctcgctagatgaatcatcactatcattgttctcttgcatctggaaacaatcaacttcctcactcgattccttatcatcatcataagtatggtcttcgactccctcgccatctttcccaatatcatcacgtatgtgcatactatcacttaacaataagtaaaattaattatatgtaaaggtgatttgttcatcaaataaaccaaattttttttccttgatactagctaaattaattttagaagtaaggaaattgcggtaaaccttaaattaagaaaaacgctttacctcatcttagtttattcttgtagaataattggagaagataattctctaggaaaaaccttacgaagaagagaaagcaattaaagagtacttagaaaccctatgaggatgccttacattttattctgttttataaggagtcatacttctttattttttattaaacaattcgttttactattgttgcttagttaacaaacgttaacgtcgggggatgtttcatgcggtttgttaaggtcagggtttaataacccaaataaaagggtcaggtttatttttctgttttttaaaaacttcaggtttttttactcatttttcctctctttggtgtggatcgtatttttctccgttctctgttgcccatcaaggttgtgagttgataatttttgttagaagaaacaaacatgaaaattgtataaagacacaaactttgagtttgagaaagtggagcttcaccattctagacgcaaatcaacctagaaatcctaatttgaaaacaacgataagtttaaaaaatataaatataacattaaaaacattaagatgaaagattacaattggattggagtctcacatgttatatatggcgatttactttgaagtgtaagcaaagagatcatggtgattctttggttgattagttcttgcatcttaagagtcgtaaattggttgccattgttaacacgggggttaaggaggaattcgatattatgtgaggtaaacgtattaaatcaaactagaacggagaaaccttaccttaatcagcaaagtttgatgaaacgacaattagcagaagcaataaaaattatgtttatgtggtctccgaagcagttctagcaatcaatcattcaaaaaataatagcattagtagatgcggtaaaagagcaatcattcaaaagaattttaaaacctttgtaattcattttaaaactcttgtaaatacttttaaaaccttttatgagggctcacaagagttttaaaataattcaaaaagatttacaaatgtgttaaatatttacaaatgtttttaagagttgaaaaataattgacatatgctttcaaagactttataagtgttttaaatggatttaaaaggattttaaaaccattttaaatccttttaaaattcttttaaaacttttgtaaatattttcaaaccttttacaattgttttatgatatttaaaggactttaaaatattgacaaaggtttttgcagacttaataaggatttgaagagtttttaaagtgatttaaaagtgtttttaacaactttacaaaaaaaaaaaaaatgagtttacaaagatgttcgtagattttttaatggatttacaagaattgtttaaggcattgaaaaaaattaaaagggtaatttagtcattttatatattaaaagggggtatttttaaaaattgatgatgcaaaggggtatttttgcaaaatgacattgaaaaagtattattacaaatcttccttattttaaatagattttttattatatgtttttgatgatgggtatcggatcttaatatttctagatataactataatgtttgtatggatattggaaatccaaattcggatagttgagattcatatctaacttatttattagaaattctaatttcacatttgtcttaaaaaaaataagtttattatggttctatttattttatttttataaaaaatcttattgtaatcaaaatctacttctatttccatatagtctaagatatcatccaaaagtttgtaccgaatcgaaccgcttcatataacttattatgtaaacaatatttttcctcaagaatagctctttttcttcatttttttgaatactagaaggttctgaaccgaagtctgtaatctctcgagagccgaaactacagaatgtaatattagttttgtcctcctcagaaatggttattttgagctctaactaaaaggtgtcgataacaaaaatataagatgtcatccaaaattggctccaaaaatctgtaatattcgaaaaaaattcgatagtctttgtaattttagtaaaataatatatcagtttttaaacaatattatacaaaattgaaatttatcaagattggtaagtaacgtttttaaatttcatttattttaaatagatccatgtttaaatatatgtttataacaaagagaaatccatttatgtttataataaagagcccatcaaaagtctctctgtgacttaaagaggttgttaagaaagagaagcccatgtcaaggcctatcggatgtctctgtatgaattgtaagagtttaacaagagaagtccatgtaggcccaagaaaacagatccaataagactctgacgaagaagaaagaaagggtgcttcgccgctgagaaattctggcggccttctgcaactccggtgaaaccctccaccaagtcttgggtatacgaagacactcatttcctccacctaaaacccgaaacttttgtatctactttgatggtgaactccgcctgtaatttcttcaattgccggtaataacttccggcgagtccgacgcatattaagaatcctcttcatcttattatttttaccatgaacttgtgtaatctcaggtatccttgctgaaattgcagaatttcttactactcttcttcttctgatgggctcctggtcggcccatacaagttattctttatggttttggttttatgatttagcttaacatgatattactaaatctatgatatggtgtttattttcttttaaggtttttttatatatatatgtaaccataagcagaagaataagaaattaatagctaaacaaacttttgtgtcaattgtttctaatctcatgattggacctatcatcttcgcacaacttctatgaagaacacattgcgtctcattgctcgctatctctttaactcaaaacctttttcagcatttcaggtgaaagttctcaaactttcaatttcttggttcatgatgggtgtttcttagagtaaaagctcgtgtaggaatgatagaaaagatggtgatatatctagaaaggacgagtcaaaagcctatggataatgtttacctacaatacgagattctgatagctatatctaggcgagaacgtttgaaacttttgagtgatgatattaagaagttgcttttggatgtgaagcagaaattattggttcctgtataaatagattatattacaataatttagtgtatggtttctgtagcctgggttctaaaagatatgctccacattgaagtcataagaacttgaggtataagagttgttgtcttgactttccttgttcttagatcctggaaccatgtgtttgttttaccttttagattgatgagaaaagctcaaagaagaagaagcagaagaagaataagaagaagatagggttagagaaatttttgattgagattattcaacaagatgctctggtgatggtattgcatgcacacgcccatccctctcggatagccggtgctttcaagtctttgttggtctttgtaggataagatattttacctgtaattttctgcaattttgtagaaacatttgctatggagtttagataattttgtaaaccactttgatcagagatctccgattgcttatacattactttcgactcattgatagaagaaagcttggatcaacggattttttttgagtagttattcaagtttcagactaaactaaacacaattctaatattattttcatcatcaatgttctcaagttataaaatccaaacatcaatcacatcatctctcaacaaaaaagaagaatcagtacccaaaagactagaaaaacgagtcaaaagcattattctgaatatatttgtctatatcattattagcttcaaaaccaccaccaagataaagagctgaaagaagcatcagtacccaaaagaccggagaaaaacatagcatcaacaaagcaaacaatctagacaaacgcagcagaaacaatcacactatcagtagtatctagagtgggttttcaagacattcaatgaccgcagtttaagaaagcaagcaaaccaaaagagtagatagcacgagagaatctctgagatggagatctttgtcaatagaaaagctaagaagaaagcccagctcctcctggtcctgggctgtcacctaaatcacctatatatgaagcgtacgtacttgtcgaaaccgtgacatgccttgtatgtgttaggcatgccaccttccttcttcttctgatgccgtcctctaaattcagtccgatctgaaattatccaaatcagagagatatgagtttccataaacaaaattagtttactcagaataaaaaatcaagcgctctatttttggaatcgaaattcaaaaattcatcagcgaatcgcgcaaatctatgtctatttagcatcacttatcgaatagaaatctaaaatcgaaacataatcaactaacaaacgccacagattgttagcaaaaatcgaatccatctatttttggaatcaaaattcaaatattcctcaaaaatcagcaaatcgaatttctctctatttcctcaatttttgcacaaatctatgtctatttagcatcaataatcgtaacaaaatcaactaacaaacgccgcagattgttaccaaaatttgaatccatctatttttagaatcaaaattcaaatattactcaaaaatcagcgaatcgaatttctctctcgttcctcaattttcgtacaaatatatgtctatttagcatcaataagaaaaacacaatcaaccaacaaacgccgctgattattactaaaactttaattcatctatattgaaatcaaaattcaaatattcctcaaaaattagcggatcgaaattctctctactttctcaattttcgcacaaatctatgtctttttttttttgggcaaacttatcttatcataaaagagaaagagttttaacctctaccaacagaggatacaacatagcaacaacaagtcggaaaagctaaagcatcgacaaacatagagatcaaacataagcgaaagctagcaacaacaatgctcaaaaagagacttggggacaagggtgaacccaaaggttctagcaaagcagcaactaaccaagagcatccaaaaaagcaaacacctttagcttggaagaccttgtcgaaaccacaataaggaggaaacaaagcctccaatgacactaacgtcaaacaatcggcaaaggctgaatgagaacagtcttgaacaacaatcctcgcttctacttcaagcagatcagtattgcacacaatgctccctgtaactttatcactaaacacaagtgaagtatttgagaggataaaaagctccataaaggagagatgagggctatgaaatccccaatgaaccagaaaaactggtaggttgtctgaaatcaaagccctccgtctaagctgcgaagagacaacttttaacaaaaacaaatcgagatagaatccgcatactgcagtaaaagatcgcattaaagcgatagaggtattacaagagagcacaaaagtatccaaaacattctgtctaagctgcgatgagacaacttttaacaaaggcgaattaagacatccacatattgtggtaagtgatcgcatcaaagcgatagaggtgctacaagagagcacaaaagtatccaagccaatcgaaactagataagctacatatgaattacacaaacccaaattccacaaaaccagagccacaaactctatcaacaaccaaacccttccaatcttagaagaaacatacggcgaagagtaagagcaaacctgagggaaatactgaggaagaaaagtggtgtcgtcggcgagaaggaaaacatcaatgaaaaaatcagtgatcgaagaggtcggtgacggagattcagatatggcggaggagatatggagaatgagcgagaccaaatctgggagggaagaggagctcaacgactgagcataagaatcagcaaaagtgaagcagatctgagaatctggtggatccggtggttccggtggagtcggcggagatggaggctctggtggtggtgcacaaggtggcctcagaaggaggaaggcgaccgaagacgacggtaagcgacgagagtggctcgcattcgagagaaaaaggaaagtcatttcaagtgaaagactcgccggaaaacaattacgccaccggaaaagtagattcattggagagatctcactttagtagtagctacaatcaggaacgcaggcagtcagaggagcaacgccggtgaagagaactaatcacgaacaaggcttgcggctaccttggttatcttgcttgagagaaaatttttttttttttttttttttttttttagtaagagccttttattcaccaataagaattttgttctttctaagtatacaaaatgactaaagagtattttacttaactcacaaatagtacacaggagagctctaacagattgaaacgtgaacctcacctggaaagaaagtactttctttcatcacacactaaagtcttcaaaagctgttgaaagttctttacttgtttcaaaagcgaccaaggttcctaagaattgtttagctcagagaccaacttccaaaaaaaaagatattaacctgtagaaagcttttgttctggatcttgaactcgcaacaaacatcgcagcttccctcaacaaaacattgctttaggatccagaacaaatatggtcatggtctttgaacaatgttaccacataatctgttaaatctcctgcttttcaaacatgtaagtgaatttcaacagaaacaaatctagctccactctatgaatattgaagcagttttctgagaatccggaaagggcctataaatcaaaagagaaataaaacacctcaggtaggagagtcttgaactttgaatagtatactagtctttttggatccttctaaggttacattagcaacatcaacgaccttggagttatgaaaaagcctagcaatgtctcttacatcatctccaccacattcatcaaccgaaaccacacaaaatccgccacgtctcaccgtcctctccatctcctccacaaactgccacggaaacagagcttcagctagatgtgcagtgaaggcaaaatcaaagacaccgtcgaaaaacggaaggttatgaggatcagctcttttcacaagaggaatcgaatcaaccaattcaactgcggtaacatcagataatccgatctgagaaagagccatcagagcatggcctgctccggcggagagacagagagctttggtgtgattttgaatgaatccgagatcgcgaaatcggaggaagtaggtagagaaggagtatagacgagatttccaagctccagaggaccagattcgagcgttcttctttgggagaggaagatgctgacgaggcgatgaatcgcatgtagatctcgggaaatgcgtatgaggtttcgatggagcttctggagaaatacaagtttttggtgtctggagaatcataattaccattaatactgttccgatgcttaagaacactattgatactctcttcagcatcttctcgacgtttctctccatcgtcgccgatcaaaactccgatcaaaatatctatgtttatataacatcaataataaaaacacaatcacctaacaaacgccgttgattgttaccaaaactctaaataatctatttttggaacgaaattcaaatattcatataagattagcggatcgaatttctctctatttcctcaattttccacaaatctatgtcgatttagtataattaatcgaaacatggtcaactaacaaacgctgcgaattgttatcaaaactcgaatccatctatttttggaattaaaattcaaatattcctcaaaaattagcaaatcaaatttctctcagttcctcaatttttacacaaatctatgtctatttagcatcaataattaaaacacaatcaactaacaaacaccgccgattgttaccaaaactcgaatccatctatttttaaaaacaaaattcaaatattcctcaaaaattagcggatcgaatttctctctaattcctcattttggcacaaatctatgtatatttagcatcaataatcgaaacacattcaactaacaaacgctgcagatctaatccatctatttttagaatcgaaattcaaatcttcctcaaaaattagcggatcaaatttctctcttgttcctcaattttcgcacaaatctatgtctatatagcatcaataatcaaaatacaatcagctaacaaatgcgctgctttgtcaccaaaactcgaattcacttatttttagaatcaaaattcaaatattcctcaaaaatcagcggatcgaatttctctctaattattcgatcaagaaacaaatcctacattgttagcaagtagtgggtataatgactggaaaaatgctgcgcaaaggctgaaaagacatgaaacaactcatcgtcatattatttccatgactcattggatggagctagaagtgagattacaaaagagtaaaacaattgataaccatatggaataggcaattaagaaggagaaaaaacattggagagatgtattggtgagaataattgcagtggtaaagactctagctaaacaaaatttagcattttgtggaactaaagagaatgttgatgatccaaatagtggaaatattttggcatttattagaatgattggaggttttaattcggatatgaaggaacacattcggcgggctaataaaggtgaaattcattgccattttcccagtcataagagtcagaatgaattgacagaattacttgctaatgataccaagatgatgatcttaaagaagattaaagatgcgaagtatttttcagtcattcttgattccattccggatgttagtcgtaaagaacaaatgaccttcttaattcgatgtgtggatgtttcaacgtgttcacctaagattgaggagttcttcttgacgtttctacacatcaaagataagaggggtgaggggctttttaagactcttcaagatgcattgattgatcttaagttgaatattgatgatgtaagatgacaagcatacgacaactgacaaaatatgaagagaaaacataaaggagttcagaaaaggttgcttgatataaatccaagagcattttacactccatgtggatgccatggtcttaaccttgcactttgtgatatggcttcatcatccaagaaagctgtttctttttttggaattgttcagcgaatacattgtctgtttgaagcttcaaccaacaattgggaagtgtttagagaaacagtgaatggtattacacttaaaccgttgtctcaaacgcgttgggaaagccgcattgatagtcttaaaccaataagatattaagcttcaaagatacagatacaagatgcacttttttatttggcagaatacactgataatccaggacaccggagtgatgttgagtctcttacagagagtgaaacacatggaattggagggtttgaatttttatttggaatgataatttggtacgatttgctagctgctgtgaatatagtaagcaaatccttacagtttgaggatatggatcttgaggttgctatttctcagttaggagggcttgttacttatttgaaaaactacaaagaaacaggtttcgagaaagccaaagttgaatctacacaaattgccattgagatgaagattgcgccggtatttccaaaaaagtcggtgaaaaaaaaaaagcaatttgttgaggatgttgagaagattgatgaaagtaagattgcagaggagagttttagaattgattacttcatcaatataatggatcaagctataatgtgtattgagataagattcgagcaattccaagtatatgaacaaatatttggatttttgtttggtgtaaagagattgaaggtagcagaagatgatgagttaaggacatcgtgtatgaagcttgaagcttctttgaagcatgatgtgcattcagatgttgatggagaagatctgtttatggagctgaaacttttaaaagatgtgttgccaaaagagattacaaagccggtcgaagtgttgaaatttttgaaaataatggatagctgttatccaaacacatggatcgcttatcgtatactactcaccattccggtttcagttgctttggcggagagaactttttcaaaattaaagctcataaaaaaatatctacgttcgactatgtctcaagagcgattgaatggtttggcgctgatatctgtataacaagaactggttgagaagctcgattaccaaaaattgatgaatgaatttgcaggagcgaaagctaggaggattatgtttcgccaggaagaaaactgagatttctatttattttttttcttgttaacaatttttatgttcaattttcttaaacaaaataaatttcatattattttattttgcgaaaaaaatatatttgggcatcaattttgaatttgctttaagcatcaaatatcctcggaccggcactaaatctagggttaccattctgcttcttcttccatcttttcttctgctttcccatgatttaatttcctttgaaaattttccaatggaaacaatgtcctattctttccgctgcacgctgcattttatagattttttttagattcacccgtataactatgattaaataactctttatacaaacaatctcgacttggcccagtggtctaagtctctctcttttaccctacgcgcctactagcgcctggtttgaccttttacatctacatctttttctctctttttttttcccttcatttaaaccagatcgaaccagtttcgattcggttaaattatcgaaatagtcaattacaacatcacaatatcgactttttctactggttcacttggtatttttaaacgacacttatatgtaagatcattgtttctattattgttatacgaaccaatctaaatatgatttaattagctacccaatcaaacccctttctttcttaaaaacatgttattttgttataatctggataagtatggatcctaccaaaaaatctggataagtatggatgtaattatccatcactcatctatatccataagatatggataatgcgtatctctatccattattttctccctaagtctattatttcctcgctaagtctattacttctttgttaagtctattacttcttagtaagtctattactttttcgttaagtctattactttattgtaagaagtacagagaagagaagagaatgagtaagcaataagaaaactctcgtttcggtctttactctttttagttttcattcttctttaaatattttataacaggttatcagtaagagcgtctctccgggtgattgtctaaccgaccgatcgtctatttgttcaagcatcttttgaggtaatatttgaattatgttaaattcattttaattcattgcggcggacccataaatactttttaccgaattaaactacaacttaaaagaattagtaatttaaaaaaattaaattactaaataaaattatttccttaaaaaagaccacaaagtaggttaaatatttatgggtgaatcaaacaaaaaggctaaaacatgtcaaaaatagtatcaaaacacaaagtagaagaaaaatatgatcaaatttaaagggtttcgatacaaatttctaatttcaagggggtcaacagagaagaaatataaataatattttaaatatttaaagggctgtaatacgaatttagaattttccagggcatctcatcccttcccatctatactctttaccgtgtcaaaataaaacttaaaataattaataactaaaacttttaaaaaatctttatttactgaaaattaccacaaattaggttcaaactttattggtgaaacaaacaaaaacaaatacaaagagtaaaaacatataagaaatagtgttaaaacacaaagtagaagaaaaatatgataaaaacttatagcgtttacatgcaaatatgtaattttaaggagattagaaccgaaaaatataattaatatcataactattaaagggatataatgtaaatgtagaattttagtgtggttttcccctttaatcatctttgggtctgcccatacatatttcttatcctgaaatttgaaatagacatgcgcgattttcttaacaacttataaacaaatatgttcttatacatttttcttacacaacttttaggatatttatcttaggattttatttatttattttacgtttaaagattacaaataatttttagacgttaccgccacaaaaaacttatccacaaaatattttacgttattttattttacgattaaagataacaaaaacttatcggtttattaataattgtcttgtggatcgtcgtataccgtaatttgataacaattctaaactataaattataaatattctataaatagatacaatttggaaaatttaatatatattaactttaaaaaatagtgttaaaaatctagttttaaggttaatagttgagttatgttctaaatctttccaagtttatatatttttgtactttaatgtttactcatcaaaaataaattaacaaaaactcttatttcaaaagcaaagtcaatagtacaaaatatcaagttttttcagaaaaaaaagtgaattagcgtattgaattttaaaaagtgaaggtttttatatgagagatgatttttttttctataattaccataaatatctgatccttaactatgtcagcagaggatatacatttgttttttgttacaaaagagttgggttctaacttcaaaagagtgaaggtttcaaacagttaaaaaaaaacatttactgttaatatttataatttcatcaataatgggcagaaagttttataccaattaatattctacattcttattctcttatggactttcttacatttgcagcaacttaaagattccacttgataaactcccatctttctttttggatgctccaagtcacttgattaaagcttctccagaatctcctctataaattatgattcataccaaactcttgtagacaaaaccgattttcaaaaaaacaaaacataaaaatattttttaaaaacaatgaaatacgcagatatatcacattttagtcaccctcaacacaacctcaaattcgactacacggagaaacccttcaaatgtgatggatgcaatgaagttggtatcggctctcgctatcgctgctccggtgataatcatggaagctgtgattttgatctccatgcgcactgtgccctgccctcagcgtccataacacatccgttctacaaaaagtgtacgtttcagtttgtggcgcggccaccagggaacgaaagacggtactgcaatgcgtgcgagaaggatgtatcggggtttttgtaccattgcaaggcttgtgggtttgatcttcacccgtgttgcgctatgcttcctatggttttggacgatggagagaccaatctctttctttatcgtaaagttagttcgtcttgtcatcgatgtggaaaaaaaggccgtagctggagttacaggtctctcttcttgattctcttcttgttctttcattattatgataccaaagattagcatgtaagaaaaataaaaattgtttcgtcttttttttataattattagcatgttttatttgaaaacatatatagttcgctatattagaaatatagtatgttatatgttagaaaataactaagatacaactcaaatcaaatatatagaatggtaattggaaaaaaaaatgagcattgctttagttgtttttgtttttatttattttagttcgctgttttcattggtgttttaagtcaacatcagcatatattccaaatcaacatctctaaagaatattttaaagcaatatgataaaattttggattacgtttatttattgattcttgaacattaatttcggctttaaaccgaatatatgttagagaaaaaggaaaaattaaagcaatggcattcaaacacaaactttctcttttctcaaagaaatgcttgtgcttggtaattggtagacatgttacatagcgtgcactctaagttagaactttacaagtttatacactgacttagcacattatatatgtgtcatcgccgaagtttttaaatagataacgttagttcttagttatcaaaattatataccaaaatagaaattttagagtcaaattccttgattaatgcattgcaacataattttgagccagttaataataaaaatcaggttttaaatcagctaaatatgtttgttttttttgtcacaaaaatacaggtcatcttgcaaaaagtacaatctccatgtcgcgtgtgtgagagagatgttggtggagaattggcgagagctgtacacaggacaacatggtaaaagcattgaacacaagagcctggtcttaaagaacacacttgagcatcaccaccgtagcagccgcaaaggtaaagttcaaaaatgctgcgagatcgccggtatagccgtgcagtttgtcatttccgccgtactcggggatccaacgaccctaatcgcgggagttgtaggctcccttatttctcgaggatgattccccttcaaagtatttcagtttgagtgtttaaccatcgtgttataaactcttaattaggagcatgtgaaagttgatacattagagtttgatatccttttaagtttcttgtccataaaccaaaaacgtgtaatgttgaaaaataataataattaattacgtaagacagcttagtaaagtctattttaagtgatttaatttgaacatttaaacattttcgtacgagttaccaattatatatttctaactgaatatttcactctgttaatttttctgtcaattgacttaacgacgtgcttaaaacgacaaaatcaacaaaagttatatattaattctaaaatcaataacaagtttggtattttagtggtattttggaagttggggatttaaacgtaccaaatttaaaagtttatgatttttttgacattttttcaattatatattgaagtgttctaagataaaatcatgagcctggtaaaaagtttttgtatcttaccttttttaggtagctgtttttctctattttgctcatcatttcttaagatttacaggttgtaaaaggccaagacttagtgagaataaaactgttggaagtaattatatttattttaaagtctatcaaaaatatcataatcttaatacaatttgtaagaaacattttttttttgggcaaaacaattagtaagaaacttgtattcaaaatgattaggattttggaatgcacactatatatatattattgtcactaaatcaaaccaaaccaaatagaacaacagtcatgagaacaattcaaaatgaaatatttattacaagtttacaactatataatagtatatgattttttagttggaaagattcatttcagctttaatggcagcaacaaggtgatcataagcctgaccccaagccaccttcatctccggtgaccacatctccggcactgcctcctttatcgtctccaacaatgcatacttggccacctgcagttataaatcatttttacatcaaccaaaaaaaatcaagttaacatatttgtatgataaagaacattttgagatatgacaaataactactaacctcaaagtgttcgtcaacgacaccgtatttagaatggctggctccaagtctcttcaaagtagtctccctcaccgtaactttccctgttttcctcagttgtactgctgattcacaacactgataataaaccccaaaactcaacaatctttgattcgaatatataagcaaaatcatgttatttgatattgattattaccatgacaaaaacagacattgcgtgaggcttgagctttggattttgctcagcaggaattggtgagtctctcaagaaagagaacatcttcttcgttgttggtgcaatctcaaagatcctacagttcaaaatagtagttcatatctcagactatatacataaaaagaaaatagagagagatcaatgggatcattacttacttgatgaagagtttgagacctaattcagctgagtttttcttcatgacactccaagacttcactacaagagcctcttgctcttctgtgaacacaatctttccttcactctccataatatttcacaacctctaaatgatttaaagtatacaactctctgttttgtagatcttactccaattatgaaaagtatcctatatataggttttgataaaagacccttttgtgttaccgaagagacagttcttgataagcaagtttaagataaagttgcttggttaaaaagtgaaaccatgtgctctgtactggtaatggaacatagtttgtaatggtaggcttgaccaattattagtcaaaacactaaagaaaagtcttttagatctctttatctcattaatttacttatttatgtattggccaaccacaccaagtggtataagttgggatacactgaatctattgatcaaattggcagaacagagattatactactcaaatgaatctctccctcatccaatttatttgcacaactatgaacaaaacttgtgagagttatgtagcaccatgtggctttcatatctaagaggtaagaaaaggttgaaactttacacactgaatgtcaggcaatgaacattacagaggagggtgtttaatttctttcaaactcaaccgtatccgtaagttacatcgcgtttcgctacaacagagtcaaatggtatttcgactctttccttaacaaggcaccgtgcttctccatcttcaatcacaagaactttccctggtggacattggttaggtgttctcttccctctggtagctcggtgcgggagaagtccaaaaaggttcaaggaagcgcctcttttcctcatctctggaccatatcctgatgcagacaatagagagataacaccgatgattggaagcacgatctttgcgacagagcctaagaagcgaataaccccatgactcgaacctccagatcctccgttgggacttttcgcctctgcctcgttcctcacatgtcctgagccgaacccattcgcatccgatttcttcttcgaaggtaagtgagataggtaaccattattattatctaaaccaagggagagaggaggatggacaggataaggaggaagtaaaagatcattctcataatcaactctttcaccagcaaaagtcgtagtctcacgtaacacttcaaaatctttccctttgtactccttaagcttctcaagcaacattttcctactgtaatcaatctcagagagagccagttgcttctcatattgttgtctttgccttagattctgttcaccacaaaccaaaaaccatccccacattaaccaccaccaagacttgaagcaattcagacattatagaccagacttgaagcaaaattcagactcagtttcagttaaaaccagaacctaacactttcaatgttcaatactacactaaaagccagaaacttgatgagaagcagaggaattttttagggtttggttcaaacctgtaaagaagcaattcagacattatagaccagacttgaagcaaattcagactcaatttcagttaaaaccagaacctaacactttcaatgtccaatactacactaaaagccagaaacttgatgagaagcagaggaaatttttagggtttggttcaaacctgtaaagaagcaagctgagactcaagagcttcaagagcatcacgaatacgcaaaagccgttcagcttctgcttcatctacatcctcagagctgattgagtcaaaatccttgtcttgattcccaataatctcgctttttcttccttctccgggagaaagatcctcgtttccatcgccgttgtcgctgacggtggtactggagttatcgatacaatcgctgatcttgagtctgagctcggtggctctggctaaaattaacccgatgccttcttcgtcttccatcgcagagattgaggaaaagaatttgggggtggagaaattagggttagggtttttgtaaggtagtggtggtggggaagagaagagagacaagtaatttggagtgtttggagtggatttgttttgtggttggcttaactcagattttcagatttgtttctgctgctttcccggttttaatcaacggccacaaaaaatcaacaaatttttattgaatttatttaaatttggggaaaaaatgaaaaagaaccataagaaatttggaagaggccaattttggactctaacaaagatgacaaatctgacatatcattctacataaataaaataaaagaatctgtgtactaaaatatagacttctatgtcagaaaaaacgtaaattttaagttattattttttaccgtctagatttattatttattataaattataaaaattatcgtagaatcgtttttgtaacaattctttttctttgaactatggttagcatttttttgtttgtcaacgccgaagtcaactgatcggtttaccggaattgtatgttcataatattaaccagatgacgtcatatagttcataaatatggtcatgcaatacatgtacttcgtgtagctcaagatacaatattatacttggtatatatgacagcgtaattctctatatttcgtgtagttagccatcttttttccttttataaaagataacaaagtaattgaaaatgaatatgttttttccttttttggctcaacaacaataattatcattaaacaacagagttttacaacttgtctaattccacaaacgattttacccaatttggcactatagaatacaacttaggatcataattctcaagagaaagagattcctttgctatcctatctgccactccattgcctccacgatgcatgaacacaaactttgtttcctcaaaatgctgaagcaagaacttgatgtcttgtataatagggtccagagtaggcatatcatcgttatcaacaagaatagacaccaattgttgggaatcagattcaaagattacctttcggtagttgagtcgagagagtgacaacaccgcccaacgcaacgcttcagcctcagtaaccaaggcggattgagcctttggtatagcccttgcacccatccaaagcacgttcttgtcggagtttctaagcacccagcaaatgccacacttgttgcattctgcattccaaactccatctgagttacacttaacccacccatgtgggagttgcttccacttgatcacttgcttctcagagctctctatgagaaatgtatatgtttaaaatgaatatgtctgaaaatgaatatttttaaaatgtagtttgagatggtttaaaaatattagttagaaatattttaatttaaaataagacattaaaagaagtattcaagttaaattacattaaaattattaaataacactaaaaatacattatattgatgagagacacaaaagtgaaccaaaaataataaaattatattagtgagagattcaataggtatctcaccaaacaaaattttttaggggatgcattcaataaaaaaattacaaccagaaaaagtgaaaaactaaggttagccaatttttcagattgcgggacactctctcaccgtcacaacaaaaacctcataccatctcaaatatataacgcatatgtacaagagattcatatccatgaattaggtacgatccacctacgtttagttaaaaatttacacctcgaggcactgagagaagcctgagttcataggcagcttcaaatatgatccactataagtctataaccattatcctatgtaaactccgaaactgattgaaattttgtaagtaacgatgcttgaccccttctttcagaactgaagagggttaggtaaggtcactgacaaattaagcagaggggattgggtttagagctataaatatccgggtaacacactttatttggacaaaaagggtgttattgggaggtgaagaaggataagtgttcatttccgctcaatggcttccgctggcaagtttaaatctagtaaggtggtttggctgtttctgtaactttcgtctattctagcacgcttcccggaagagcaacttgtgtcttccgacttccctgactccaaagcttgatcgagcctggacgtccatcctgtattaaagagtttgctttgtaagattaccggtaagtctccaacctaatgatgtgaagtttcaagatttactgcttgtaccacaatccgaagactgaccaacagcttccttggaattctgggaactataaaaatcagatgctcgttctatgccgtttgatctgtatggagtaatgttgtggatgccaagttgcagagaacccaacaagtcattctcaatgcattcatacctgcaaaaagcttgacatgtcagtttcaatataggttgttagcactctctgatgtcttttagattattaactaacatattttcgcagagtgtatcgaccgcaactgacaaattgatgacttgaatccttatctgcatgaccttatcatcagcaaattgatcaaaaggttcctccaagaacttagaaagtttctcaacattagcctcaagctgctgctgctgatcctcaaacagattttgttttatttctctttcctcagagctcatctcatctttaaacagctcatctccaaacatgtaaaatgcgaaagggtatgaatatgaaagaactcgtcttgatctaaataaccgatggagtccattggtagcccagctgaagtctttaagttgtaactccctcttttctgaaatagacacctttttactaatattattactaagcttagcctctagcttggaggagtcgatatgtgctttgtatcggttatgataatgcatataccgcttgagatcccttttcgctctctccatttgtttctctttatcttcttggaaccgaccacaactatgacccgagattctagcccaagtgtggtcccttccagtagcttcaccacacaaccaactgtataaagtaataaccaaacaaaaagttcatcaccacctgatataatgttcactagaaagcagaggagaaacaaggctaaaattcataccaaaaagattgtcgacaaagacaagtcacgagattgcatccaccattcttttcaacaggcttgtgacatttgggacacggctttgtgtgaacagttatccaattaacagtctcggactcatcaaagcacttctttctccatagttcccacatcacacaagagcaaggggagtgagcttgagatgaacaactgaaacagaactgcaaaccacaagagcattcaacctcacagagctcgtcatcctcaacacgtatggcattcccacaatgaggagtactcggacaccacttcaccattttgttatcttcgatatacgactcaagaagaaaacgatcaaacttctcagctaaatctggttggcttttactaactagagccctgacaacatcttcatcacaaatagcattacacttatgagccatgcatataatccttttgctctgaccttcatttatctttacagtaaaatgcccagtccaacctaaaacaacaaaaccatattaactaaacaacttcatttcaggatatcattaagaaaaggatgagactcacagttattgcaaaagctatggccacagtccatccttgtcagctgataacccggtacatcctctacgcagatatcacaactcatcatcgaagaagaaccagaaacggaagaatcacaactttggttttcaagaagtgtaacaccagcaccagaaaacaagctatctttccctttctcaacaagaacagcaaacaacttctccacatcccatcggtaatgtataagaagagtccgagcatggtgctccttaaccgataacaattccatcactctccgcaaatcctccctctacattgattcaaaaacagtttagccttcaaaattgaaactccacagtatatatggatcaaaagaagagtcattgctctttcactaacctgtgcagccaaaagtgattccttcgtaataacctacaaaatgcagattcacattcatgcaaacatcaaacgcttttattctaattgaaccaatgccactactcttctaatcctcttcacagcattacagagatgaaatttcacagtataacacaaaaccctaattttaactagagaacaacagagatcacagaactgatttttcaaatcaacatttcaactaagtgattcaatttcacgaattcgttacaaaattaacaaaatccgaaaaagaatcgagagaaatttagctcaaaaaccttgacagtatttgatcgggaagaaacaggtatcgaaacggattcatcattatcaatcccgttgagagattcctgatcggaggagtaatagtaatcttcttcctcgccgcttaaattatcatccatggatcaatttttaaactgatcagaatgaaattgtcgacaaatgatatgattgacggaagagagtattatagaacgacggaggtgataaagtacgagagtaataacgaaggaagagaacgatgacggagattttgagacatgaaggatgtgggatgatatttgccggcgagatcaaaagaggagtgttaaaaggactgaatcaaccggaggagaagagaaagaggacatcgttatttacggaccaaacggcaccgttttatatgaaatcactttttttatttgagtatctaaacagtttttttttttttttttttttttttgtcatcagcatcttattgatttataaatcagcagtgtagtcacaatgtacagcatatgttattacattaggaacccagaaatgattcaagaataaagattggttttgaagagtacctttagcaaaaatatcagctggagtattgtgatgtcttcttatccaattgaaatggattgattcaaacttccttgaccaccaatgaatgtcccgtatccagttgtgaacgccaaaatgtaccttggatccgttaattaggtcaaacagcatgttgttatcttcttcaaagcaaacccgtttgtaaccatgactccaacagtgctgcattgaaatgattagcgcttgaatttcactctccagagcattgtccacctttcttcctatagcctgccccgccagtagataacttccattactatcccgaacaacccaacctgctttactttctacatcaccattaacgaatgagccatcaaagttgcatttgatccatcctcttcaggtcgtctccatctgtcatggttatcctcctctctcacccctctgctacgtgtatttatttgtgctactgtattcgcctcggtatactcatgagcatcagtttgagcaagacgcaaagtaatttcccagggaatatgtcttctttgaaaatataaaacgttcctgcttttccaaatcctccataggatccacaacggtagctgatggaattgacttgtccgtggtgaaagagccatatgaagtataacacgtattttattgactttttttaatgaaaatttcattatgaaaacttgccacatagacttcataaaataaataatacataattagtaattaattcaacataacaactaaaataggagtttttggactctaaatccctattcctctggcagctggatttggaggaagctttgtaaactgcgccctcttgctaggccctttcttgtttgtgagattggttcaggggaaacggcaagcttctggcaggacaactggaccgggcaggggcctttaattgatctgacgggaactaacggtccaagatctgtggggatgcctcttaatgccgtggtaagagatgccttgcgtggtgataactggtggttgtcttctagtagaagcagaaacccgtccattgctctgttaaaaagtgttctgccttcgagcgagagtatgattgaatgtcagcatgatgatgtctataaatggaagccggaccatcatgctccttcaaacattttctcagcgtcaaaaacttggactgctctcaatcccgatggtgttttggtgccttggcagaaatctgtttggttcaaagacagaatcccgaagcatgcttttatatgttgggtggcagcttggaagagacttcatactcgtgataggttgactcaatgggggcttaacattcctaccgtctgtgtcttgtgcaatgttgtggatgagactcatgatcatttgtttttccagtgtcagttcagcaatgaaatctggagtttcttcatgataagggcgggtatgactcctcctcatctttttggtcccattttgctttggttgaagtcggcctcttcctcaaagaacctttctcttatcatcaagctcctcttccaagcttctgtgtatctgatttggagagagagaaactgtagaattcatactactcattcaagaacccctcctactatcattaaggaggtccagcagcttatccgagctaggttggatcctatctgtcgggaaagacctgtggggctttctcgatcatctcttctagctacttggttcgaacttttccaagtttagttctcttcggctggttttgtggacctgctttccttcaacgtctcctgtggtccttgggtgcaggtatggcttctgcgacgtggtttcggttgctgggtcttcttggttctttgggtctttgtcggccttttggcctttgtgggtttctgtgggcctgcgtgccgggtgggctttggccttgtttttctcctttcttgtcttttgtttcttttgtagggcctgcgtgcctgtgtttgttgggggagtttccctctgtaatctgttttttcttttaattggaaaattatgaaaaaaaaaaaaaaaaaaacaactaaaataggaggatataattaatgagaatttgaaccatcactctttctatattttttaattcaatatatcctctttaattttgagattcaattaagtggttaaagtgatcataaaatccaaacatgctacacatattccttgcctaaaaattagacgattattatgaaagaaactaaatgacagattaaatatatctaagcttttcgagatttatgctaagaaaacaagtaatttgaaagatgtttgaggagctatccttataactaatacgtaagatataagattatgacaaaaatttaactaaactttctaagaacatcaagttgaatatgcttacattgaatatatagagacatggttaataaagacatgttatatttttagtgtaagatataaattttctaaaatttcaccgtctcacaatctaaacagataacaaaaaaaacaaggatatataaattaaaataaaaaactgaaaatctaaaacaacaataaaaaacaactcaagcacattcgttttcagatgaactaatatagttggacttttcaaaaacacttacaaatcatttttatgtttcataaccgatgcattcaactgtactttatatgaacagacattatataaaacaatttgtaaatagtaatacataaacccgcacgtagtgcgggtactcatctagtacagttaaagtgttgttaacaaaaaattaatgtttacaaggattaataatagtgaagaggctaaatttagacaatgataaaaagaaaagaaaaataatcattttttaaaaaaacttaataaaagcatttctaaagatgatttttttattatgtttgccaaaaccttaaatttgaggtagaaaggtgttaaaaatcttagtatttttgcattatagtcttcactgttgacagatcaataaaatttacataactataaaacatacattaaaaaaatcttaaaagcaatattagttaataaaacattacattataatacaaaattaacaaatgaatataaacatataaactaagtgaaaatatacaaaaaaaaagttgaaaatgtaatgaatttactgaaatgaatatactgaaatgaattttttggtcacttggtgaaatatgagtagagttttattttatacattctaacacatacaatgcttttagtgcatacagaaaaattgaaaaaaataatgagatcttaagaatgatctttctttattatttttttgacaacaaatctttttttatttgataagaatgtttgtattatttaattatgttttattttacaaatttcaactcatttaaaattaatttgtcagccgataaaataatatgaggaaaatatcttaaacaatgttggttttcaatttttttgtgaattttcacttcttttactaattgtttttgtaaattttttaattccaactaagatataaatttgatatgatgcatatattgtgttgtaaataatgtttctagctttaatcaattaagggtttgaatggtgacggcggtcgggatggacaaacccgtcagcgatttagtccactctatttttagggcggatatcaaatcgccgcagaccaactttatttgtatgtaaaaacggtttatggttggtttgtggaggttttcttttagttttcttgagtccacactactactgattaaatttgttaatggttaataaaaagtagtatgtggttggtttgttatgattttcttttagttttttttccgtctacatcactacggattatatttgtgaatggtgaaaaaagcggtccagtctacaagaggatttgtccgccttaaccggtgcaaccattcggaccctaagatgaaatgcgtgaaaactctaaaatatggttttatgattatataaatagttaaattgtattgaaaaatagaatatgtgattactcgaataataatctgatacactttaaccgcaaaatagtatattcgaggtcaattcataaagaataatggtacgctaatgatttttgagagtcgcatttagctcaataagaatactgattttggttttaagacttgtaaataaaaattcaagaagaataaataaatattggatcataggttaactcgtaaatcaattaaaaacaattaaacaccgttcttgcatgaacaaataatagactaatcctctctgtatcaatcactaaacttgaatatttgaaaactaaactctcatttgaaatctcctactcaaatttgcataaacaaacaagtttctttaattctcaacaatttttagcatcaactctcattggttagaaccacattgttcaatttataatcattcagagtttctatctaatatttttgacgcatataaaaaattgggaaaaatatcaaaaaaagcgcgaactttcaaatttgggacgaaaaaaacatgaactttcgaattatcatttaaatcacaaagtttcgtttgacttttttaaaaaattgtcaagtttcgttgacttggccattttgagcacgttgttaaatttctgttaacggagttaaccttctgttagaaatttctgttaaatcgaaacgacgtcgttttgaaacatcgttttggacgttttagacttccaaaacgacgtcgtttcgttagaaaataatgatgctaaatccgcattcacatgaaatcgaacatatgacctattggactcctaaaagacaatctaccgctgagctacgagaacagtttgataaaaaaaacaaacatagcatatatatagtaacaaataaaactacacaattaattgaaaatatatacaataaattaaaaattacaaaaccacaaaaaaacaaatatgtacaaagtttttaaatatacctaccatacatatatattttgaaatttgaaatattaattttctatatagatgttttctatatttgagaaattatttttaattttcaatttttctgtattccaaataaaaaataacaatagaaaagacttatgcaaattattttcaattttcagtttttcagtttttatctattccaaaaatacagaagatgtctttatatatataattaaatatttgaaatttaaaatatattatggtaagtttatttaattttttttatttaattttgttatttttaatttattgcatatattttttaattaatagtatattatatttgttagtatatgtatgcaatgtttgctattattgtaaattattgtcgtagctcagcggtatgagtccaataggtcatatgttcgagtctttgtggacgcggattttgcatcattattttctaatgaaacgacgtcgttttggagatctaaaaacgacgtcgttttgatttaacagaaagttaaagtgtccaaaatggccaagtcaacgaaacttgacaattttttaaaaaagtcaaacgaaactttgtgatttaaatgatatttcgaaagttcacacttttttcgtcccaaatttgaaaattcgcgcttttttgacattttttccataaaaaattatgatttaagacataatggttaagccaattttaacattaagaacatgtgaatcgaagaacctaaagatagagagagtctcaaacaacaatcaagtcattaaatcattaaaagccttatttagaacctaaaatctaattaaaagagtatttactcataacaaaagaaagaacgcgaatagatatgaaagaaaacatgcttcaatatttactctattaatcaatttcgtttttgagttcgacactcaattaaaatcaagatttgtaaaggggacaataattcaatagaatttattaataaatataacatgaaccataacacagaattaataaaaaaaaccatgatgtgatgatattgtattattgcttaggcatgatcctctgttttagaagcctgagtttccgatgacacattgactttttcagtagcagtacctttatacaacaaagaaatcagtattagcaatttatgaataaattaactaatctattgagaatgtaataagttaccttgttcaatactttgagcattttttattttgttcttcagatgaaaaaggtatataacactgaagatcacaagtataaccactagtactgagaagattatatacttttctgtataatatagttaattatttttaaaaacttatatatgtttattgaaattagtactcattaaatcagcttcatcttgagttcgatatctattaattttatttttttgacggggcaggtcgatatttatttaatatctttcttttttttttgaatatgaatatctatttaatatcaagattcataacgtaaacaatgatataatagaattatttaataaaaataacggtcacaataatttacaatacatcacggaaactataacatagattcaactaataaaaccatactaaatatattgacaaatttgaaatgtgaacaaatgtcttatcattttcattgtccatccacaacttcattgtctttgctcatagaattattcttcttgtttgcggtgtagctcccgaagagagtctccatctcctctagaggtataccacgtgtctccgggaggaaagtgaagaagaagacccatgcggcggcagcaactccggcgaatagaaggaacgcaccgccgatggtgagacctttagaaagagataggaatgtcattccaataataccactcattagtctattcaacatcactcctaaacttgccccttgagctcttagcctcacagggaatatctctgagcagtagacccacgtcacggggcctgcacctattgagaatgttgccacaaaagtcatcaccgtcgtaacggcgagccctatagcccacttgagtgtttgcccggggttcctgttgatcaccgtgagactagttccaagtgcggtcaaggaaagaaacattccgcccatactcgtaagcaacaaggcacgacgtccgaaccgatccaccacacaagtccctaccacgatgaagagagtcttgacaactccgacagcgaccgtagccaagagctggtcattcttggacttcagtccagcctttgagaagattgtcggagagtaaagcacaaccgcatcaattccagaggcttgctgggcgaaatgaataccaaggcatgctatgaggatgtgtcgaacggacggggttggtcgaacgagaaggtccttccacacgccttttccagcgctctttttattcggaacgactataacatcgtctgtcatatcatcggggattccaactgcgcgtttgatgtcatcgagcctagagatagcttcttctttggtgttggaggttttgtcaaggactttaaaagcatccccgagacgaccctgaaggacgagccaccgaggagactccggcattgccaacactccaatggctaggaacaccgagggaaccgctcctacacctaacatgaacctccatccgaggtgctcgggaagcttggagaagaagtaattggatacgtatcccaaaagtataccaatattgataaaaatctgcatacaaaaatcacattatcatcatcaacctccgttatcatttccaatcatacataaaaaaaaaaaaactttggatcagttgaacctcagggaaagaggtaaggaagcctcgggaagaggcgggagcgacttcagcggtgtaaacaggcgcaatcatcatagcataaccaacaccgataccggctacaaaacggccaaccattatgaaagggtagtttgtggcaaagcccattagtagggctccgcaaaagaagaaggctcctgccaacactattgtatatcgtcttccgagccaatcagaagttctaccagctgcgccggaaccgaccagagagtagatgtttagaattcccataagaatctcaagttgtacatcagacagtttcaaatcgtcttttatgaaaattgaagctccactcatcactccaatgtctgtaacatccccaaacatgtaagaatgattatctaaatcgtaaaaccaaaccaaatctgaattgattgttaatttaaaaagaagacgaaccgtaaccaaggatgatagaagtcatggaggctaagattgcacaagcaaaagcatatcggcttctattccccctcggtggctctgactccgcaatcacaacaccttgttcaactcccgaggaattcatcgtttccgtggtgattgtaaaacttaaggtgaaaataaaaattggtgaggagaagagagtatgatagtaatacgtgaacactgtttcttgtgagttaagaaaccttttggaaaatgaggtttaaatagatgtgtgatgctcacaactgaagccaactaatactaactgtttgaaacaagcgtatgttcagtaaactgaatacctgttaggttgttacagaaaaaaaaaatggtttaattgtttcaaggatatcaattagattagaaatatgtatcgagagatgcaagttttttctttctcatatccacatttttgtcctaaatttggcattttacgttaagattaccctccttttttgggtttgtttttttgttgttgttgttgttgtttccaaagttagaaacagaggtagataggcatcaatacatgtgtacatacaaaaaataataatctagatctaaacattgaaggtagaattgtgtagatatacagacaatcaaattaatttgcacaacctcattttctcttcttaagaagtattaattaaccatcaatctacaaccaatactactgtaatgagtcttgagacttgattcacagctccaatcattgcccttgcagtttatctaatagctagttgtattaaattaccagagttggatattgttttatattgtagtaatatagtgatatataattttcactctctttgaaaaatcttattacagtagaacctctataaattaatacttgatgaattaataaatacgataaatttaatctttgttggtctcgagtttgctcagtgtaaaaataaaccaaattctataagataataacttttaaaaaatcaatgtgtataaatatagtcccaataatatcatagattaataatcatgtaaatagccaaaactctttgtaagttttcaaattttgaatatgcattacattactaatactcatataggatattcaaatacaaaattaatgtcactatttataaatttgaaaacacatatttttttaaaaaaaaatatgtgaattctataatctttcctattcattgttcaaaaattgttttttcctctaaatattagatggttacgtataaaactacaaaatttataacattcaaagcattcagtttattaagatcaaattgctttaaatgatattttttaaaaaaatttaacaattaaaaaaaaatatttattaattttcacttaaattaataaatattgattaataaaatatcatggtcctaacattaatttatagaggttttactatatatttttactagtgataagtgataacatgtacaagtgctaattctagcacaactaagcatttatcaagtcttggaaaagactaaatattttgcgctttagaaatgttttgtttcatgactccaagcaattaccttaaaccaatggagattgtgagaaataggttgataaagtcaaaggctctctgaacaatggcctaaatattcattgactttctcctaatacttaccactatgattttcaccatgataaatgactcatgtttgatatttctaacacaatagctagaatgatttcaatcttgatgtggataataaaagtctcccgctggacacctcaataatgttactcttgtttcttacctagtgatctaaggtgcttactcatatacaattttttggattttgttgataaagtaattggatcttgtctcttagtatgacataaacttgagagattaactgttgaaaaactgatacagtggtggcctactcactttggagatgatcatatgaacgtcaaaaattcaatgaagttgatttttctgaagggtccattggaccgtatagtgtggacatatgcaactcagctactggatgagaaagctttgcatgcttagtctcatctaagtatcaagccatggtaagaggtaaatcaaagataagagttagatggattcgagctgtgtttgttttggtaacaattattcgcataaatcggcgcttgatagttaatttttaggaacatgattgatgtatttttggcatttgcttttggtatatttcgattatggaaattgagatctccatgtgataatttcatttttgaacagatcttggacaacgtcagaagaaacacttgaagaagggaggtggcaagaagaagcttaacatatacttcaatgcaggtcacagacatggacatggacataaatatgcatcacttaaatcttttaaacattttgccactttgatctaaccttttgctatttctcatgcaaaacttaaaaatcgctggcttgagtggcactcgggagaaaaccatataaaattctttggtcaccggactaagagaatgtatggatctcaaccttggcctatgacttcttagttattcaagagaaaaaaacatgtacatgttgtctttaatatttaaagtttgatgtattctattgtaaaaaatatatatatatatatgtgatgctaacttagtgaaataattgttatgcatgttcgattcaaatctatatttgataaaatcacctaatcaagataaaagtaagatacaattctaaaaacttaaatagaaatacaaacaaaaatgaattagcttaaaagattttttattttgcatgaattttaaattttatacaccaaaaaacctttgttacattatacgcatctttgatcagagaatctgaaatttgaagtttgagactaaatcaaataattttaaaagtttcaaaaaacgcagccctataagtgctttcttgcaacgttgatagccgactcttaaaaagtatatatccaaaagccaggctcgtggaactctctttacatcattgagatgcatcgaattcagttaccaagttcaatcctatgtttgagattcttgctgatgtaggaactagggagcttctccatgttgggttttattttagttctcttttatctttattttgaatattcttgttttggagttttccgattacatataggttttgataagtctttaagatactagataagtatcgattcctaaaatgagacaaggtttttcgtgttcttatatatagatgtcaatcccttgacttgcaactctgtaaggtacaacccctcgataatattgtggggcagcctggttggaactcccgtcgagagagatgcacacgcttagacatggctagagtgcttgtcaaagtagacttagagaagcctttgtccgctcaaataaaattatcattgaaaaaacttgtattggagttgacaaggattgtacgttgctcggagcctcaaaaatgcggaaatttcttgactctagtaacgaatggatataaacattggcctatgtgaaacaaattaagcatcagtaaaaagagagtgagcaatcttattgcatgtatctacacaattcttacttgcactgtttatatttagatttataacaatctgatacgtgtagatgcctatttacttatgtttctaagtttagaaaagaaaataacaaaaaaaaaaaacgtaaaaagtgagacaaaacttaaaatcttaaatgatctggtcttactgtaaactgccaattttaggacaaaacttgtagttgagagaaaaaacctgcgtctcttgatatcttctaatccgatttcctatcctctgaaactttttaaaccgttttaagtaactgaatgttttttattgtttaaacattcagttattggttggcttcagttgtgagtatcattcatctatttaaatctcttcatctttcaataggtctcgtgtctcacaagaaacaaagttcatctgctaatatcactctctcttctccttactaattacgttttcaccgtaagttttacaatcgcggtggacacaatgagttcctcaggagaagaacgaggtgttgttgttgccgagtccgagccgccaagagggaatagaagccgatttgcttttgcttgtgcaatcttagcctccatgacttctatcatccttggttatggttggtcttctaatcattctctaacgatcaaatttcagatttggtttggtttaacggtttagataatcatcctcacattttatggatgttgcagatattggagtgatgagtggagctgcaattttcataaaagacgatttgaagctgtcggacgtacaacttgagattcttatgggaattctaaatatctattctctgatcggttcaggagcagctggaagaacttccgattggatcggaagacgatataccatagtgttggcaggattcttcttcttttgtggagccctactaatgggttttgccactaactatcctttcattatggtcggccgttttgtagccggtatcggtgtcggttacgctatgatgattgcgcctgtttataccacggaagtcgctccagcctcttctcgaggcttccttagctctttccctgaggttcaatagatccaaattttactagtttatatgatataaaaaaaaagaaaattaggtttatattaatgtgatatgattttatatgcatgcagatatttatcaacattggtatactattgggatacgtatccaattacttcttcgccaagcttccagagcacattggatggaggttcatgttaggtattggagctgtgccctcagtgtttctagccattggagtgttggcaatgcccgagtctccacggtggctcgtcatgcagggtcgtctaggggacgcttttaaagtccttgacaaaacctcaaacaccaaagaagaagccatctcaaggctcaatgacatcaaacgcgcagttggaatccccgatgatatgacagacgatgttatagtcgttccgaataaaaagagcgctggaaaaggcgtgtggaaggaccttctcgttcgaccaaccccgtccgttcgacacatcctcatagcatgccttggtatccatttctcccagcaagcctccggaattgatgctgtcgtgctttactctccgaccatcttctcaagggctggactgaagtccaagaatgaccagctcttggctacggtcgctgtcggagttgtcaagactctcttcatcgtagtaggaacttgtttggtggaccggtttggacgtcgtgccttgttgcttacgagtatgggtggaatgtttttttccttgaccgcccttggaactagtctcacggtgatcgacaggaaccccgggcaaacactcaagtgggctatagggctcgccgttacgacggtgatgacttttgtcgcaacattctcattaggtgcaggccccgtgacgtgggtctacgcctcagagatattccccgtgaggctaagagcgcaaggagcaagtttgggagtgatgttgaatagactaatgagtggtattataggaatgacattcctatctctttctaagggtctcaccatcggtggtgcattccttctcttcgccggagttgcggttgccgcgtgggtcttcttcttcactttcctcccggagacacgtggtgtgcctttagaagaaatagagagtctcttcgggagctacagcgcaaacaaaaagaacaatgttatgagcaaagggaaacaagtagttgatgaacaatgagagtgaaacaaaatttgcttccatttcattatttggttaatggaacgtcgataccaaaagactcggttccgatccgagtcttcatcgggcgagtgtgaccaataagaaaattaataaagaattttacttgccatctctaaattcatgttgtatatctttaataagttgtttgcagagaacgagattaagaattaaacttttataatctgccatttcaattaataaatgcaacataggtttgattacaaccattttttttttttggaaaacttattaaggtacgtacgtttcggttactagattatttgctagtttagtttataactcaaaagtgggtttgatgatctacgatccttccaattagtctaatactcctatacaaaggtggtgtgatgaaattgttggtggaattatatttaatatcttattatcgttatgaaatatattgaatacatttgttaaaattagtaagtaattaactttatagatgtatataaatgtcaaaattgatatatgtggtaataaactttgtgtttatatgataagtctttgttaatttatcgaagcttgtagaattgtcgtttctatttaattggtttagggtttttgttgggttatgagcctaaatttatttatttttgttaaaaaaaagataacaaagtataataaattgcataaccacacatgccgactaaaaatcatttacacgtatattatatttacttcaaaagatgagtttgtacggtgacatgcatcatcaacaaacatatgttatatgaccagcaccaggaccatcaatccggtcactattctcgtgaaccgtccggccgtcagattttctttgttatgaataaagtttgctagttacacaaagtaattagagtaccctcattaagagtatttaacttgttacatagctacacataacaactaaattaatgtataagtaccctcattcttagcaacaaaaaaaataaagtaccctcatcaaaaattggattattacaaaatgacggacaccaacaagcataagttatatgaccaacattataatcatcaattaagtcactaatttggtgtacctcgcaagaaacttggtaaagattagaacctaaaaatataagagcaagtccaacggtgcatcttaacacatatcttagcataatatcttaggtttaagtaattaaaattaaatcaaaaatgacttaaatgctaagatttacatcttagctaaaatcttttatgtgtgctaagaagcatggacgtgtcctgaaatgagtggtccaaattaaagacaaaaccaaaaaataaaatcacgcgttcatcttctctttctctctttttttttttctctttctctcgttctcgagacatgcaaaacaaacacaaaaacttcaccatccgactcgatccgatgaattgagaagagatttgagtcggaaattcttcgttcatctgtggtcatcatcattaaccgaatatggagaccatcggcgatatctggttcaccagatcgagatcagaaaatcgaagaattcaccaaatcggagatttgagttattggctgctccaatctgtttcccatggtatgaatctctctctgttcaattgtttttcgcgttgaattcgggttatttgatttggtgtagaaattagggatttctcagctgaattggattctttaacatttggtttggagattgatgagttgttgttttcttttctatatttcttctgctgatattgtaattgtttctgtatgatgagttccgtgcgagtgtgtttgaggcattcgaagaagaggatagagtgatagagaacaatgaaggactgcctccagctttgttgggaagctgcaatgatcttgcaaggcagcctcatgcgtctccaggtttgatttctaaatggcatgtctagggtttggaaatgctttcttgatactaagaaatattagcttgttcgaaatgtgactccttttttggttgggtgaaactttgcttgcttctatgtttaggcaatatgaacattgagattttgtgtagttgagtatatcattttaaaaatgttaaaatgcaggcagctcacacgcttaagtgataaatgctttctctatttgtatgtgatcaatgctttctctgttttttaattgtttgattaggctattgtatgtgatcaatgctttctctgtttttaatagtttgattaggttgtctacatcaatctttaatgcacaattgattgtgcttgtagttgattgttatgaatttacttgaacacatactattaacctttcattctgctctttcttttcatctaaacactttaccagaagactttagtgcaatgtttgttatgtcacaatgaatttacgactacttgcttgttatgtcacagttaaagactttagtgcaatgtttggtagtagttgtcattgattgtttgctatgtcacagttaaacacataaacacatcatgaacctcttgttatatattaaacgtttcatctctaactttaaaccaaccacagaccattaacacacaccaaaaaatcttccttttgttctatcctactccttttaaaaccaaccaaagaactatcatatggatccatatccatatagtcatggatcaggttttgtgaacctcttaactagtcaacaagaggttcacactttggaaaccaatccgtgtgatgatgttcctatctttagtactcaatgtactgactctcccagcctagaagaacatgtacctaaggtgaaaagagagagaatgaaatggtcagccaaagaagacatggtgcttgtcagttcttggctcaacacaagtaaagatgcagtaataggcaatgaacaaaaggctaataccttttggtcaagaatagctgcctattatgatgcaagtccacagctgaacggtttgagaaagagaatgcaaggtaacataaagcagaggtgggctaagatcaatgatggtgtttgcaagtttgtagggagttatgaagctgcatcaagagagaagtctagtggacagaatgacaatgatgtcatatcactagcacacgaaatcttcaacaacgattatgggtataagttcccccttgagcatgcttggagagtgcttcgccatgatcaaaaatggtgttcacaagcaagtgtaatgtcaaaaagaagaaagtgtgacaaggctgcacaaccttcaacctcccagccaccttcccatggagtagaagaagcaatgtctcgccctattggtgttaaagctgcaaaggcaaaagcaaaaaagactgtgaccaagacaacaactgtggaagacaaagggaatgcaatgttggagattcagtctatttgggaaataaaacagaaggattgggagctaaggcaaaaggatcgagagcaagagaaggaggactttgaaaagaaagataggttatcgaaaaccactttgctggaatctctcatcgccaaaaaagagccacttactgataatgaagtgactcttaaaaacaaactaattgactttcttttggaacattagttaagtctctatgttgtgtttttgttgcatttcagtttatgtctttctgttgcatttcaacttatgttatgtctttctgttgtttccaatttcatttcaacttgtatgtgatcaaatgctttgtcgtttctgaatgctttgagtttgatgtctaaaattcagtgtttgtatgaactttctgttataagttaagatatgtctttctgaatcaatccttatgtttagtctttctgattctcatcaataaattagttcatcaatgaatgaatcaatttttctttaagttttttgtaacgttttgattggtttgatttggtttggttttcaggtttggtttggccagaatcacatgcagattatctctccttttcagtttgggtttcaggtttgatttggtccatgcagatcatctttattctatacttagcattaggtctctctcttagttgtactctcttcggccagttccggacataactcgtcggtcaatcaaccgcccatcacagccatcgttaaccattggttagcaaggcatattttcaaaatccttgtaaaatgcttgtatgactttggttgtatcattacttgtattggaagatattgtgatgtaaaaactgaattttttttctaagatattttctttgtaagatacatcaatggagctcatttttactaaaatactcttttacttatcttaacttacaaaaagcaaaatttagattataaatatacttaagatgcaaggttaagaatcaaatggttcttaaccattggacatgctctaaggtgtggacgagtcttatcagtatgcttacatcatatttatggtaaattgcgcacagtagctgttgacccacttttaatttcaaattttaacactgtgagctaggcctttcagttattagctattaaaccaaaaactgaccaaaatgcccctgacgaaactgaacccggtttgtacgtatggaccgcgtcgttggaatccaaaagaaccaggttcgtacgtacactgttcatcgatgagaaatgcattaaatgatttctgggtttcggcgaagttgacatttgagattggaattaaaaaattttaaaattcgttgggctcagaagtttttaatgctaaaaagttttgacaagactaaaacttatgattacctattataatagagattatattgtaagatatttagataatttagattagaattctggggaaaaaacgtaaatcgaaattgtgttaaggtgaagaaacgaaaattgaaattgtgttacggtgaagaatctgaagttttcagttgctgttttacaaagtttgaaggattgaaggggagacaatctgtgttctgggtaagaaattcgtgttaatcctaattacacttgagaacgtgatttgaatgatacgtttttaaaaatttctgggttcatacattgttttgttggagattttatttgtatttgtagatataaattaaagctctatgttttgtttagttaaatttataagtacataaattattttgttagagattctttttgtctttgttgacataaatgaaagccttcaaaaagatctgatttttttctatttaatgttggtctgacctgaggaatttatgttgcaggtatggagttacatgtattaattatggttggtgagtggatatacaaagaagaaggttggaaatttgaagctgaaaaaggaagtttcggacgctgtgtacgtattatagacacaacgacgtacacggatttggcaagtccaatatgtgatgttttcagctataagtttagtgaatggaaccctataataagttactggatgcctggaaagatgtctgatatgatagcaagtaatcgccctccagtatatattgagaatcaaatcagcctggatacatttatgttgattcgtaatggcgatccttctgttaacttgtttgtgtctttttaccctatcggcaatggaggccatacagagacagaggttacaaatgttgatgcagctcataatttttacgaagatataaatgtagatgaggaggatgacatagatgaaggtgatgaggatgaatatgaggacgaggataatgaagaggacgaagatatggatgtacatgacgatgacaccgatggtgaaagccgtggaagtacactcgaccctacagtagacgatagtgaaggtagtggcgaagattacgattacaataaatggggtgacatgattgtggaacaatatggaaatggtcatgttgaggagggcgtcgtgaatgacactcaacaaaccgtggaacccccaggggaactcactcgtctattggcatcgtgtacgtcgacgggtacacatgtacctcatgtagaacccactggtgttttggttgactgtacaccaacctctgctctatccccgacgtgtcaacatggtttgtaccaatgtacgtacactagagtctgtgcagaggagacaagatgcgaaggtgaattagttgagcacacggatgatatagctgagaacgtaactggagatgatggtatagtcgtcctagaaggggtttctgcaagtgggttaaatattgaatctgacgaccgtctagtgacaacaggtgaagcctacaaagtgtataaagggttttctacattgcataatgctgagaatgagttgctcgatactgatgcggctcctgtattcgatgatttagccaatgttcgagtcgatgagacagaagttgaattgagtacgtcaggtcatccgttgtatgtgggaagtgttttcaaaaacaagcaagtcatacagtagactatgcgacttgttgcaatcaaaaagtgcttccgttacaaacaaactcggtcatgccctaaaagattagagatggtttgcgtagatcgcaattgttcatggcatttgactgcacatgtcatacccaatttcaaatgtttcaaaatcacagggtatgattccatccatgtttgcaagatcgagactcgaaaggattatcgtaaacatgcaacttacaagcttttaggcgaggttatgaagaatagatatagttcttcgcaaggtggtccgagagctgtagatttgcctcaattggtcttaaatggtcttaatgttcggatctcatattctacagcatggagagctagagaggttgcagtaaactctataaggggtgatgatatggctagttacaggtttttacctacatatctgtatcttctacaattagcaaatcccggtacaatctgtcatctccactccactcctgaagataaaggtcgccagcgcttcaaatatgtattcgtttctctctcggcgtctataaaaggttggaaatgtatgaggaaagtcgttgttgtagacggaacgcagctagtcggtcgttacaaaggatgcctccttatagcatgtgcacaagacgggaactttcaaatttttccattagcttttggggttgttgacggcgagaccgatgcttcatggatttggttctttgagaaattatcagagattgttccagatactgacgatttgatgattgtctcggacaggcattcttccatatataaaggcgttagtgtggtgtacccgtaagcccatcatggagcatgtatagtacacctggagcgaaacatatcggtgtcttacgcaaggtacggtgtgtctggtttattctttagcgccactaaagcgtatcggattagagattttgaaaaatactttgaagagttaagaggtcggagccccggatgtgcaaagtatttagaggatgttggatttgagcattggactagggcatactgcaaaggggagcggtacaatatcatgactagcaacaactccgaggcaatgaacaatgtcttaagcaaggcaaaagcgtatccaattgtctatatgctagagttcatccgagaggtcatcatgcgatggtttgcagcaaggcagaaaaaagtgtcgaagtgtaactctttggtcaccccggaggtagatgaacgtttccttcaagacttgcctgcgtcaggaaagttctcagtcatgatgtctgggccttggagttatcaagttacttcaaagactggtgagcattttcacgttgtcctagatgagtgtacgtgtacttgtcttaggtacacaattttaagaatcccatgcgagaatgctctagctgctgcaatacattttggcatcaacccgaaggttgttgttggattgtggtatagccttcaagtgttttctgattctttccaagaacccgttttacctataccggacccaaaagacgttgttattcctcaagagttatcggacctgattctcatacctccacgcagcagatgaccacctaggagaccacccaccaagaggatactatctactggggaaaaccgggtaagattttcccccatcctcacttctatgcaatttttccttccttttaggcgccttaccattttttaactttcagaaaaagaggcagaaaagactcattcctaatcggtgtacaagatgtcggaaaacggggcataacaagaagacatgcaaaaaacctatttaggcctcgcgatggttagagtttacgtctccgtgcttttggaagctgttctacgtacgtttttggaaatcttttgatcagtctatgtagtaatattacatattattttgtctgtacgttaccttatgtacgtacgtttgtggacctcgtattatcgggtgtatttgattatcctttaactttttgtcaatcccgttgttttctgtacgtacttttgttaaacgttttcatttgtacgtacactgggtacatctaattatacagagttgacggttacatttttttgctataccgttacatcgatttgggaccaatcatcgcgtctttctaaaatctatttaagaaactggtgataacacccttaattcattcaaacaaacgtccaatcccatcacacacataaaacagaaagtcggttattctggtttttgttgttgtcatcatggatgatggatatcatgccatttccgaactttgtcccatgatcaccggatggagtatacgcgcttttgtggtcagggtgtttcaaaaatgcgtgggaataaatgagttcgacctgggtctcatcttggcagataatcgagtaatatttcgccaatgtctttataacgtttttactttcacataccgtacatgtcactaatcatgatgatttgttgtagggaatgcgttcccgcatagaggctaccattaatcgtcgccttgcttcattttactctgaccgtatccgagaaaatgagtggatagttatcaatactttctcagttcgtctccacaacagaccattgttaccaaagtttcaggattgcctgcaataccgtattatgattttactccttttgactacatcatcgagaggacagtttctaccggagtgttagtcggttagtatatttgactgtctattcatttttgtaaatatgtacgtacacataatgcttttatcttccattacgtacaccagatgttattggtgcgctcattgaggttggcaatttgaccaaagactaccgtgggcggaagcttccttttaaaataatggataaacagtaagttgtttatttttaatgtttttggctatatgtttgttatatcctgtgtataatatatattctctgtagcaaggaagttcttcaatgtgaagcaccaaaatgatcaagctttcgaatttcaaagattcttccagcggctaactggtcctcaaaacattatcgcactcgtatcttggcgtctaaccgggatccataaactgaaggttgtgaccaatggccctatctccaaagtcattgctaatccggatataccggaagtggaagaaatcagagtcgttgtctattagtttatttcttgtttcttttattctaaataactacagatttgtaaccgaatttaaacatatccctacttttatgctacagttttatcttctaattgctacagtttacttattacaaatacagcctaattgtaatgaccttccatggacgtacatttatgtttgtgtacgttcaaataggtgtactctatgtataatgtaaacaaacttagttccattcataccccgcacatatgaatatgatggcgcagacgatggttgcatcagctcggacgggtgcatgacgctgcatgagcttaagtgctccattgatgtcagtttcatgaattagaacacgtattgcttcgttatacacagccgtcggattgttagcgagaaggcaccttttgaaaaatggtcgattgcggccttctccttggggtccggttggattatggccacctcctacttggaagtcatcgggaacacggcacaagctgtagatgttagcgtctttaaggacatccggtcggtagacaatgtctcttccacgagtgccggatcgtatcagtggcttaaggtccaaccagcttttgtctgccactttcttagctatcatagcgaacaagtcgtcggaaatagtgggattgaccatcttagtaatgagatactccgaagaggtcaaattcttcctcccatttaataaccacggatggagatattgttggggaaattacagttacattcaatgagaaatttaattttacattgatggatgtcaaatcaatgttaccgcctgtatacacatcagtcgtgtactgtgtacacgtggacacgtagtttgtacgtactttggtaagatatcttgtttttgtacgttgttaattactacataaaatgttgcataacatccaaaagtaataaactgtttagaaaacaaacaagtaaatgtaaacacaaccaaacacaagttccaaaaggcatacaaaacacataagtttgctttagtttcaacttcgaataactagattaatggcccaattccatgctcgtagaggtcgactgcataacccttacggaagttgtacatatcatcttcttcaatcgaaaacctgtcctcaacaggagtgttaagcatgtacaactcaataaacttcatcgcgtacggaccgcattctccggtagttggattttgtgctagacgttgattccttatgtatgtaaaaggagtcacgggataaggcttatcgagataatctttgcatgtcgctctgactaggtacggtagcatctccattattggaaggatacgtgacctaaccacagactcccgcgtaagcgaacgcaaaggatccatgatttcaatagcacgacgttgcaggcatatagccaacccaacccaatgcttctcatctttccagttcatgggaacagatatgacgtccacatctctgatccaatgcagctgtggttcacgattaaggcattctcccttgggaaaccgtgtgagaagtttgtcccatttgaaagtgtcgggtttacgacaggatctgaatgcagtggcacaacttgacagaaggaaagtgagtctgggatccaccccgacataccgatttctcttcatatgctccccgttcttatgccacatcaagagtgccatcatttccatgtgctgaaaagtacataaaagtctgatgttatgtacgtactttcaaaaacatattattacatatacgtacaattacaacagtgtacgtaattaatggtcacttacgtatgagccaacccaatcattagcctcggctagagttgtgaagaattcgttgtccactttccgaaagccgaaaagagtatggcacctgaaattagtaagacatatgaaatagttatgattgatataagattgacaaacaaacagataattgtgtgaatgcacagatgcatatattttttcttcttgcattatattgcataatttctggaatttagcttcgtcaaccttctccaaaggattgtacaacgaatcgccagccttaaccaaaacctccaggcctgcctctctctcctcaacaaatgttacatcaggatcttttttatcatcatttttggtgtcatcggagaagttaactctccattttacgcttttcttctctttctcattgacgggagcaacgattgcttcagtttgagagacactcgcttcgacaacatcgtcctcctttcctgtctgcaagcacaaaatcatataattagattggtcatggaaacagctacaggagtacgtacactatatgcccgtctagttgaaatattaataggtacacgggataatatactgacctcttcggggattgcaaccttttcagatactttttcttcgagaacatcgtctttcaattgagtaagcacctaatgaaaacaatttaacaaacatcaaattataactccgacagtaatgttattaatagttagctaataaattatctcttcagggacgacaaccttctcaggaattttagatacattttctgcgagaatatcgtccttcaattgagtaagcacctaatgaaaacaatataacaaacatcaaatgatatctccgacagtaatgttatagttagttaggaacttaccttgctaacaactacggttggtgaagacgggtcactgagattcgcttcataatcaaaatcccctacagtcgtcggaggaacaagtcttggtaacgcagtgtccttcagatttagtaaccaaataattggttatatctctaattggcaaataagcgttacaaatagcaaaatagtaacacatacctccaaggcttcatctacaactcttggagatttagcctccttcaaagcttcctctccatcccgacaaattgtttcagcctgacctcattatatggagatggatggccatctattagtcaaactcacagcaaaacattcaaaggtgcgaaacagatttcaaaaacattgtacgtacaatgggattgccatcttctgtaacttcaaaagcaaattcttgcctaaccttgacctccggtgattgtggctcctccaactgttgtgactcaggagcaacaacgtcttcttcaggattaccaccaaggcctttcgcaacgtcctatacaaatgcaaacaatacaaattagaaataatctgtacgtacactaaaattagtagtacgtactcttgtacctgatgggacgaggaagatacatcatctgacattttctcaatgattgggtcagacagtattgggtcaggcaggagttgttcaaagttaccaccatcaggaatgccatgttcgggctgttgtgtcgaaagtaagaacattaagaacataaaatattttgtacatacaataataaaataataagaacacaagttacctggtgagatggtgatggaacacgatcgacattgtcttccattacagagtcacagacattttggtgtaactttgaagaatcttcttcaacctccgagttccctccttcctccttcgaaatcaaaaccatacaattggtcagtaatatttctttatgtacgtacaataaggcaaaaattgtaacatgactattacacaagtgagttacctgttcagttgaagatgctccacccaaatatatattgtccatatcatagtcagagacggtatgttttgctgaaacttcgccatccccatcattgcctggtacctcctgtgaataaacaccaatataacgcattcctaagtatttggttatacgtacacttaataaaaacctttttttggattgtatttacacaaggtacatgctgtagacgtacctcaacaggaagactaccagttgcagccttcttgggagtattgttcaacttggaagatcttcttggaacaaagtttttttgtttggtggatttctttacagattttctctgtacctgttcagctgccttctcaactcttttgttcgccttctcaacccttttgttcaccttctcaacagttttggtcaccctctcaaccttctcagatggtgaatcagatttgtgggatgctcgtgggccttcttcgtttcggtcctgggactgtagagcagcacgtatctcttcacggacaaatacttttaaatcttcaaatttattatccaaaagttgtgtttgcctcttgaagaaacgcctcaattcgcccgcatacttatcgaacgcttcgtctccaacttcaccatcaccaccacttggtccaccttcaccatcaccaccactgggtccaccttcaccatcagcaccactgggtccaccttcaccatcaccaccacttggtccaccttcaccatcaccaccactgggtccaccttcaccatcatcagagtgactaattttcctttttttgttttcaacaggatttgccacccgtctttgcctcttcaaaataactatattaaacggttaaatcatgcattactactcttagaggaacctaattctgatataagttatacgatgaaaagatatggttacctctctctccagttgctgagggccgaacttgcttcttaggcgcatcatcgcctccaacccacattttctcattccactcctgctcagatttcaacatccttaaaatgttatcaactcttgggtcctctttttctttcctccatacaaaagattttgggcaattactgtctgctgggtccacaatatatgtgatatccacctacatagacgatcattgttaattttagagtgtatgtacttacaacaacaactgcacaaacctgttcagcagactcgcatgccaatatggtggatgtcttgattggacgcagtttggaaaggtttttaatagtcctctctgtaaagacggcggtatctccttcagaaggtaggagactagcaatagacgggatagttttgaatgcaaggagttggagtccaagtgggaagccatggagtacataagaatgttgcttgcaaccactccggagttttttaacgtcggtctctcctttgaaacttgcgatacgctccaaagtaagcagaaatgatgtccttccccagggatatttacaggagaaatcaaggttcttcgtcagctcaactgtcatctcatttggtctcaaaggaggagacttgtcacatattagcaccccatccacaatgataattaaggcgagagctaatttcttccatgcaggcatgtcagtttcagaaatcaatctatcccttaattcttcaactgttggattagctttatcatctccaaacagagtagcccaaactgtattttcaccttcctcccgctgcataacactttctacatccttatctttaggataggttccacattccaaaccagttataagtgcccattctcttaatccgagcctaataggatgaccagcgaataccatccacatctcataacgtttctttgtaactaactaacggcatattaatccaagaacaagtttaccagaaaaggatgccttgttagtagggatcctaaagaggtcaccaaatggagaatctagaaggaacgtcatttctggtgtgtccttaagcgcagctgctatttgaccaatgtactccggtctggagtacgcatttatctttgccttgctagggtagtgatcgagtgcaaacaacctttgtggtaattcacccggatcattagaagtacttcctgaaagttgaacaagacgaagaagttcttaacacgtacactatatccaaataccaactaaacataaactcgatattcatatacacgtacaccgaaaccttttatactcaatcaactgtttttggcggaaaaaaccaaaaacccctttgtcaattgaaaatttctgagttgaaatctctaaaattaacctagattttgaatcaaatcattctccaaacgaagttagggaaaactaacccagatttgtcgtcgccgccgatgcctcatcaatatccgaaactcctcgccgccgactactcttcctcgtcgccgccattagagctcttctctgaacagttaatcgataaacccaaaaatcgtattattgttccacactttaacacgaaccctatcgaaattttctccactttagcaatgactcgaactcgaacagagcctcaatcggaattgtgtttcagtttcgtcggaatttctctggttcttcgaaatcattcttcgtttcgtcggaactgttctgctttctcgaagaagacagttttttttatttattttaagttttaaaattaataattttaaatatttaaattattttgaaaccagaaaacggttaaggaaactgaaccggctccacgaaactaaaccgcctccgtcagtttttcgttccagagcaaattcggccattttagttctaatggctaaaatgtggttgacccagcccactttgcctttttgtgaaagaaaaagtcaggtgtccaacgtgaaaattactttaatatttatgtggttaattggtcgatagtacaaattcgcagagtggttaattaagtacatttatcatttcaatggattgtgagttcgaataaggaaaaattgctgtcatctctcatacactgttaagatgctttgcatatatattctcgaaagtttgtcaagtttataattcaaaaagttcactcgaatttaaataatacaatatgacataagaaaagatatgtaagaagaaaaagaaaatgataatcgtaaagttaaaacaaaaattaaaactaaaggcatgacattttcatttttctcattaaattaataagattttctcatatgtttatccattcatcacaaaaatgattattaacgctatatacactcatatgtgtttatctattcctcacaacaaaaaaaaagaatattaatgatagtgtagatcttgtaggctcaagttgatgagtcttccatataagaaaaataacgaaaagatatgatcttgacttaacaaacgaattaagaatctacaaaagttttattcaggaccccttttttcccttcaacttttgctttcattttatggtttctatgagtatatatccttaatttaaataaagtatttttcgtattgattaccagagtaattatcacaagaaataataatacaaaagcgcaaattatcaataaaagtaatcgtcatcctcaaaaccctaaagagaaacacgatgcaaaaaaataaaaaaaaataaacttacgatgcaaaccaaaagcaaacgctaaagatacgatctgatcttcttataagtcacaggttaaatggtccttcggggtcgagctgtttgcatagactaagataagttatgtagacaacacgatccttagaaccggttcgatgtttagaattcaactgacaaaagtaccttagttggtccaaagtacagcatcccaacatttgccctaacagaagaaacaaccagttaatttcttccttcctctcggacatcacaggcttcatctcactcttgcatgtcctacacggaatcagtttcggggttgaccaactacccggggctcgatggcgcatctcctccttgttcaccttaatgtatccatacaattccgaaaatttctcctccagattatattcaaccgtgtcggtcctatcgcaagttttgcagtggacttgtccagagatgacgtttatattgttggaagacaagtctctgaaagactggattttgcctggctttttggtggcccatggatacggtggtacgatctccctgtcacctacgtttctttcaaccccagccaccggtctttttgagttacgacgtgcttgtcctcctggtggacgacctctgcggggagttgccaaggccacggtggcaacctggttcagttgaggagggggaaggacttcttctgaaggttgataaggcaatggggtcctcactgagacgtttgggggcggtacagcttgctcaagagcctgcgtgggaacaatcacatggtttgttccgttggcaaaagaagtcatgtcatttggttgaggaggagagggttgggtattttgtggaggatctgatgtcaagagttgcatgacctcgccttgttcctcttgtctttgaggaaccaacccgtttttctcattaacggttttttttggttgtgtatataaccttaaagacaaatcgagatcttcgtcgtcactcatgaggtgtaaagtgatgatgaagaatgactacaatggtggtatatatagacttgtttgttaacgagatatgtatatttaattattatttttgtaaataaacgggtttgtaaggatttgtacagctttcaacgtaatccacattaaagatttaattgattttgtcaaatatgtagtatagttttgataactgagtttttatttgtttattattattgttataagatatctatgaataatactttttattttcaaatctttcgtaaatttatccaaacatgagtcattattatccatttttatttacaacaattatgaaaaaaaaaacgggtcacacgaaggagcttggtttctcgacgttgtatatcggtttcttcttccttcttttcacaactctacggtggtgggatggcgatgaccctgcgccgccttctctgttcgactcccgtcttcctgactcaccggtggtcttattcaagcgagtttccacgacacagtggaaggcagctttgattagattttgtgatagaatcttaggagttatgtgtctccgggtttagatcggttatctgctagtttagattgggtttgatcttaggttgattttggtttggttccaggtttggttggtgtaattggactagagacccaaagataattattggatgggcctattctgaaaataacctaataaacatatctacttatacatttttggtgaaacttttgtaaaaaatcatttatgtaaatactatttagtttttaatctctaccaaaaatatctaaacaaaatattttaaagtacaaaacttacaaatcatcaatcaacattaaacacttacataaatactttcctttcttaacatccaatttatgaataattataattgagtccagcgaatttttgtccaaaagtaaataatatttagttttgagtccctacaaaatttattctaagaagatattatcttaaatatatatccataattaaattttatctttattgcactacatttaattaattgctaattacctaaactctctttacctacattaaatataaatatataaaaaaatttcacttttatttgttcttatttctaatttactttgattttatataaaaatacatatcgttaataaatgttagatttttttctgcatacaatgtaattcaaattttaaaaaactgacataccgatgaagaaaacaaaatatatctacaggttgtacattgcttacaaaaatgggcaatggttcaaagtcatactataaaaaggatcaagatgattcttaatacgaatgagcaaaaagcttgatttatcaggcatccaaaatttagaatgttaaccggtttactccggtattttttttaaggactcaaaactttaaaaagtttcaaaatattataaatactaaactttacaacgttttaaatatttataattttaaaacttttatgaagatttaaatattataaatatttgaacgttataaaaagtttgaatattataaaattaaacattataaatacttaaaaaagatgttaatatgggacgatataccacatataaagttctagatataacaattaaatgaagtttggatcgaaataagtttttttgaagttctattattataaatatttgaagtttataaaactatgacaaaatcttagatataataatcaaaatacaattataaagtttagatcaatattaattttgtttttgaagtttcaaatatttatagtatttgaattttataagaaaataataaaatgatgtttaacttcatgggacatggttatatgggatatgtcttgatcgatattattacgggatgatatattatgggtgaaaccctagaattaacaatcaaaacataattatacaattgtaaacactaaacaaaataaataatattaacacaacagatacaatttaaaattaaatataaattttagttataaaaatcgtcacaaggtgtatcatacattaaaaaaacaatggcctatatatatatatataaatcattttaaagacaaaaaaatcaatttttatttaataaaattatagacccgtaatatatctcttgaatatgttattcatatataaataatattaattaaaataaaaaataactttttaaagaaaatatagacccgcggtgtaccgcaggtcaacatctagtgttttaataaaattgcatacctttcacgaaaaaatggttcgcactaaataggtgtaactagacggttataatttataaaggatgcaagaccttctatcacatgatatgatgctttataattcttcgaataaagcatagtaattcaaaatttattctcataaactcattaatattttttgatctaatataacgaatgaaaatactataatacaatgataaatacaaattttgttaataaatgttaaattttaattgatcaataacacatataaaaacaaatttgttaatttatcttttggttaagaaaaatatttttttttagatataattatataaattagtatatgtaaatttgttttattttttaattttgctatttctgtaaaggaaaaaaaatcaattatttaattcatatctatatttggtcgatagatttgacacgtgccacaatcatgtgagttattaactttaaaaaccatagtttacataataaaatataatatattttggttaaacttccactgtttttatttatatgtagtttaagtaaattttgttttattacaaaaaagtgatattgtaaactgttaatgcaaaacaataaatatatttaatatggcaggtaaaatttgttaacaaggttacacatgccgccgcaatagtaagacgtaaaatgaaagagaaaaatttataaaaaactatcattcgtatcatttgttttcctttagtgtttctttattaaagtggtggcattttctttcaagttgaaacagagttagttatataaagtagccatacacattcaccacggacggctaataatgcttgttttcgaaagagggaaatgaatcacttttgcgggagacaaaatggatctttataaaacattggagctaaaggaattaagctgcacatccctgttaaaagtgggacagtttaggggaagctgtaaaagctgtaactgatcttcttggcatgcagtcttgtaaggttaggcgcgcttcttcatacgttaatacatttttcattagcataaaaaaaaatcataactgagatatgatctggcattgttgttcttcttaattcttatgataattgtttcgggggtttcgggttcagggtacggagacggttgcaagcaacgcaagatcacacacatgtttaccatcaggtttgtatatagggaacgtgaaagtgttggtgaaggcacagtttggaatggacagctcaaaggaaattgtaatgaaactggctgttcgagcagaggatccatctgtcagcgatgcgattcacgcacttgttgctaacggctaaacatatcaaaggttcgcagggatctttccctttcgcttttggtcttgaaaagtgcttattgtcatttctctaaacatttttttgagtttgctactttttaccattagtataaatattcttttgatgagcttatttgaggatatgtcgtagtggatcgtttcttctttcgttgattcacacaagtttgtttaattatagtacggtggcagaagaatactaataactagtaacctgttcaatcgattcagttgctaaagtcgattcacattcagacaaaaaaaacttagagaagcaacaaagcccacaaggactgttacatctttcaaagacagctcaagagacccattgttacagagaaccaaaagtttcaacctttcaaaaaatgatagaactgaaggaatgtttccttcaattacagtgaaaaatcagtgaacatttttacaaatacaaatcccattaagtatttgagtccaaagtgtcatcatgaaataaattagtcccatcacacacaaatgacaaacagtacaagatgttgaaaaagaacaaaggaccattctcatccagaagaaacaatgttgaaaatgttaagcataaataatcaagattaagacagagaactaaaagaaactgcaaaaccttgttcttgagaccaaacaaaatgaaagatacatgtataaagctcgttcaagagataaaaaaagaaacgcataggtaagagaacaaaatgacatgccctttgctttcacctgactccaatgatcgtctctatccttcttctctccttgtcccttctcagtctgattctgaatctgaatctgattgatgatattctggctccaccaatggaggatggactgacttgagctgttctaaatcgttaacattatgattctccccgtggtttacaaaggtgcaaacgctacaaggtttcgtaactgcttcaccaaaaccttgtatttcaacacgttagagagtgttccttccgaagttgaagcaatacaatttacacgcagaatatcatcaatcagattcagattcagaatcagactgagaataagaggcgcggattagccgtggacctggtccggcacaactccttgaaatatggagtaccaaacattgatgcccatcgctttgacacgcaacaaaacctcacgaccgactctgctggcaatctcgacaatatctccatgatgagatcattcgttaaggaatatgaattcatgatttcagatcgaacgaagaaggagatttgttaaaatttacatattaatgtaagacctagagaaacctagcttatatactactaaagagacctagctttcgtgaatttatttatccgattttagtcggttaagaaacacaaaaatgggctgatttaacgtctaagtgggcctccaagcttgtcttcttcaggatattcataccaaggagataaaaatggacgtggtagactaattaagatgatgttcaaacaggtcacgcacattgcaacagaacgaacagaacatcaattgttgttgttggcttatcggtttaggtcatccttctcagacgtggattgtgtcttcgtttcttcagaatccatacttaattttagaggccaagaaataaagattcaaactgaagttttccagatatgcatgaccagccaaattgacaataaaaggttaccattgagttgataatttgattctagggtcattcaattcatacatataacgattttgataaattggtctcaaaatattaagctacagagctacatccgataaacaagaagcaaagttcatatgcaaaaaccaaactaaagtcattacataaaacttaagacaataaagttcttttacgtagtaacttcttctccaagacaccctcacatccatcctcattagggtttggagacaactagaagtagctcctttggtttgatgaatgtgaatttgcaggtatcaccaacagcaaggggatactctttaaccacacgacgccatccaccagagaaagctccaaacctctccagataaaccacattccatgatttcttcccatttgggtgatggatcttgaatactgttttctcatccggcacttgatccttcgatacagaattcgggatcctctaaacactcaaacaaaagattcattcacataccaatttttagctcaatacagagattttgtttagagtgtcttggtttgtgttatcttaccaggaatacgagatatccttgcttgaacaagatggtgaatgctgcagcagtagatgaagaggcaccagcgtaatcacttcgggctctaaccactttctcggtccttttagaactttgggattccttagctgccctcttcccaaggttgagctttcttcctttagattcagctgcagttgtctggccacggttagaagataccactacctcttccttaatgtcattttcctcttgttctgttttgatacgacctgttgcatcaacaaaaactaaagactcaatgactttatccagtttcactgtttcataatcagaaaaacaaatcttacttacttgaagaagcaaagaaggatctggattgtggaggttgcatcatctctttcccgtctagcttaaagatgttcacggtaaagtgcattttccctttgtgagtgaaggtaagtaactcactgtttcccaaagcattgtccctcacaaacttctcccagccagacttctccatgaagtaaaatctagggtttttagagattcctacttcccaagagtttccccattgcgctcttatcttcatcttacgtgagagctctttgtcggtgaagcttctcgaaaagtcatgtggaagtgctctctttcattatgcaaataaaatgaagagacgatataagaagactaaaatttcaataaagcaagaatggttgatctaaagaacgtttcttcaactacagggaatcaacaagtatttggtccacagtttcaaattaacagaggacaaatctcattcagaagaaacagaggtgaaaaataattcatgacgactcctcacatctaaactgagtaatgagagaagcagcaaaacaatgttcttgatatcagataaagagaattgacgaaaagagtcaacctttaaacaaacagctaacaagattcaacgttacaaaggaccaaaagtttcaacatttccaaactaaactaacgaagtgaacgttcttacacatcccatcaagtcttaagtacaaagtttcaaatctcaccatgtaacaaatatagtgtgacaaacacaacaaaatgttttggcataacattcttttccattcttccatatgtgagcccaaagtttaattagtcccatcacacgcaaatgacaaaccaaacaagacaatgaaaaataacagagggcagatctcatctaaaggaaacaaagatgcaaaataatgcatgaatgctcacattcagacagagaactaagtgaagcaactaaaacaggagaaagacaatgaaaaataacagaggacagatctcatctagaagaaacaaagatgcaaaataaagcatgaatcctcacattcagacagaaaaatacgagtgtagaatgaagaaagttcgttacatagagaagatctgtgagttttttttcctgatacccataaagacaatttacgaaaagtttcaacctttccaaactaaaataacaagtgtcaaagtttaagacaaacccctgttacaaagaaccgaaagtttcaatctttccaaactaagccaacaaatttaacaaggagaagagtttagaaggttgttaccttgttttctgaagaaacatttatactctgaacaaccttgaagaagctttcattcttgcgctcttctttgcaccgaagataaccagcgttcgtagccatctctctaattcaagctcacccacaaagcttttgctctcgtctctctttcacactctcttcctatatctctctccctctctcttttgtaaggaccaaacctgttgaaatctctaccaaatttcaaaggaaaagattcagtcaaagtggttaaagttagaactgagaaataagtacaatgtgaggtcatgtactttttgtcacacataactcttatatgtgtttctttaatgtataaatacaatgttggtattgtccaattaagacgagggaggagttgttattaacttattatccaattaaaaataaaatgttcagaagatgtattctatttatctaatatataattttaaaatcttaaatagattataatactagtcaataattagctcagaaacaaaatcaggtgggacaatatttgtggaccaaagtataaaatttgcatgattcaactgagagatgagcatttttctagtcagagcaaaactttggttctcagtcttagtactagtctcgttgcataagttgttgagagagtccaaaacattaattggcgcagaaaatcaaaacaacagagtactgaacaacgtccaaggaggatggaggatggactggcttgagttgttttaaaccgttaaacattaagatcctctacaaggtttcttaaacgctttacaacctttgacgagaatgttccatctttcaaagacagcttacaagacccattgttacagagaaccaaaagtttcaaactttaaaaacaaagctaacaagaagttgtatagtttaagaacatgaagacgacttagactaaataaaagaacattaaggaactttttcttcaattatagtgaaaaaaacagtgaatattgttacatatcccattaagtatttgactccaaaacgtcatcatgaaatcatttccatcacacacaaacgacaaacactgaaagatattgaaaaagaacagaggacagatctcatacagaagaacaatattgataatttaagcaaatatactcagattaagacagaactaagagaaactgcaaaaccttgttcttaagtataaatttcgttaaagagagatagataaggttgatttaaaagtaaaataaaaaaagcctagttaagagaacaaaatgaaatgctcattgctttcacctaaatgataatctctctatcttcttctgattctgaatctgattcatcatattctggctgcaccgatggaggatggactgacttgaaatgttttaaattgtaaacattaagatcctctacgtgatctacaaaggtgtaaactgtaccaaatttagtaaacgcttcaaaaccttggatttcaacacgtcggagattgttcctttcgggattgaagtagtaaacataaaacggttgttcagatgtatacttgcgcatcgaaaacactatttcacccgaagcagtcattccaaccacggaaacctgagaacggtataatttatcctcggtccaagtgtaggcatatttcgaccattcctttttctcgacatcctctagaacccacacatgcatctcatcaatggcatcatctttcacatcatcatcatccacatcatcccaaaaaattacagctaatttgcccttatagtttatcaattgaccacattctaagccaataaaggtgaaactttcggatcttaaatcaaagcaaactaacacattaccagacgttacatcatgatcattatcccaatctgacgtgtcacctaagtaatacaaaacaccattgatgcatatcccttgactgtaaatatcatgtagtacacgatattttatctttttccaattcatatccccatctccaaaagtaagaattttactgtgaccaggaccagatggatagatcatggacaatgccttgtactgcttgtcaattgggtcaaacccgaaaaagctaaacgcctttctataagtatagcacttaggtaagatcgtataccttcctgtgttggggttacatatcagaggtgtagcctcgtatcgatcaccatataaatagatcaagccagaggcgtaaccaattgaaaaatatcttggggtattatcatgatagattcgtagattgtttggagataacttcatatgaaattcagcggttgctacaagagtcgacgacgacttctctaaccgaggagatgaaaagaatctccacacaccgttttgtacgatggcaaataagaggcgtggcttagcagaggatctggtcaggaacaactctttgaaatatggactaccaaacattgatgcccaccgctttgacacgcaatgaaacctcgcgactgactttaaaggcaatcttgacaaaacctccaggatgagatcattcgttaagaaatgtgaattcatgatggccgatcgaacgaagaagaaggagatttgttaagacttaaatattaagacacctagataacctaattaacaaaagccctagaaaaacctagcaatcttatagaataaagtagggttctccttataactcacttcaccagaagttgatacgtgtcacctaaggactttccttctctccaaattcatcattttctataaaaaaaaaaattaaacaacttagttttatgttaatgcacaatttatttacttcaaatacatcactattttccaacaatacaatgtttactttatttgttaaaaattagcaaaatctaatttaataaatgatcaaatctgttttcttattattttccccttctaacaatatctgtattttgttacatttaatcttttaactttgtaaaatgcaatataatagatgattaaatcaaatctgtatttttattattttccccatccaataatatctgtattttaataactttaaactttttgaatttcaaaatctaatataatagatgatcaaatctgtatccttaaactctgtgtttttataaaactttactttattatataagataggtagtggaaaaagaaaatactaaaagcaaaataaatcccagcgaatttgttttaacaatttacgtaagcaattgcaaaaaaaacacgttgataataaacacacaattattcaaatgaatgcaaattccttaccctaaaattccttcatttttatccccaccctaaaatttcttatatgttcgatttaggaaagaaaaaaaaattgaaaaaaaaaacggaaaaatatttgtcttcaggttcattgactttccaagaaaaaatcttaggttttttcatggaagaatatcttagcttacttaaatgttaatgtgttttgtttagagcatagatcatacaagtctcacgatagtccataatccgaccatagaagtagaacaattgcaatctgtcaaacatgttctacagcgactgaagtaactgctttgacgaagaaggaatcaaatttctgtaagagaaatgttaaagattcggactttgtgatctgattaaaaaaggaaaccaagtagtcctttaaaatgtttgagagaggttttgagttttgcaaacaatttttttttgtcatccgcttaagtaatgatgcccaaacaaatcattcctaaaggatattgtttacataagtgacatgatgcggttcggtacaaactttttatgctaaagatccgcttttatattcgcactacgaaaaactaaaaataaagagaattctttcttgtcaatttggatctcctttagatatactaagaaattagagaatccgcttcagttttgaagagatcatgtttgtaacaagaagaatactattattactaggcccttattacactaccatatataaattcttgggaatttagaaacatgatttttatatatattataagatcttgtgaaatttgtttctcatatgtttatggattcctatcgaaataacatattgcatgataataaatttattaggtaatggtacttttaagatattttttatctaacttatataattgtattctaatagtttagaatatattatgctatatattttaaaaaatgagtatagtttttattgtatcatttgccggtgctcaagaatactatgtggtagaatatctgatttagaatttatttttggaaaatgtaagaaatagaagaaaaacaaatcattcatcattgtgaactaatctaaattaaatgcgtgaaaatgttggctaacccgccagtgtagtcattttctagatttctacactaactcggtgcaatcagttgaaacagctatattgtcatttaccagtgcttaataatatatggcataacccacataagtgctttcaactaggcctgtactggagatatgcttcttccgttcttcttcgtacattcttggcccttatgatagatacatccacgttgtcctgaaaaaaatatcaggctaaactcaaaaacgatgggtctgattgaaaaccaaaaattatacaaaaaactatacaaaaatactgagagtaaaatcttatgtaatacttttggtaaagcttttgtgattggtaactatcaaaactgtatacactgttttaaagtgttaagtggttaccattcaaagcggatatgtctccctttaggtctctgtaatccagcgatgtaacatcgataaccaatatattcagggattaggtaattagtggaattatgatccactaattgttctttaacttgaacatcttcccatgacatattatatcatttgaataaaatatattttatgtatttgttctagttggaatatgagagatgactttccaaaatttgtcataatttaatatgtttatctatcggaactgtatgtaaattgaaagttgtaattgcaaacgttaaatggaaactatgatgtgatacacatgtggatcacaccatagacaacataagttaaaatttatagataattaaaatactttagagaagcctgaaaattgaataagagacatatattattattctattatacacccagcgtagcatagctctttggcgttaggatatttttgttcattccaacaaagttttttcttagctctcggtccgaaacaacaccaacaatgcttttcaaatgttagtaccttgcaaaaggttttgatacacggtggtattgtaatattgagcatcgatctatgtatagctccaccctccattctacctacacattgatttaaaatacacaaaaatttgactaatgggaaaaaagagagatcatttgtatatattatacattaagtgtaaatatttagagagaaaaacctatacgtactctcatgtagagcgaagagagagaacatgactatgcatattaaagctatatgtgaagatttcatggtttggatgtctcaaatgactttgttgtggttcttgtttgtaatttgtaaatacataatgtatatatatatatatatataatccaccattttacaactttcataccatttccattatctgaaatatttttaataatttaccatatatcaatattttgaatatatcataaaattaacaattttccattttttccttctaaattgtctattagtagatagattcttgttgaatttatctatactatagaaaagttgaagctgtttggttcttgccattagttaacatttcttgccattagattagttgacattttttagatttaataattttatatattttttattattgtaaaatggaaaaaatcaatatatggagacatactaaaggttaaaaaatatcaacactttcaaaatatttttcatcaaattccaaagttttatttgtaatactttactaaaattataaatgaaatatttaaaatatggaaaatatcttaaataaaaatatggaaacagaataagaattaaaaaaattctaaatattaacattcataatataaggataatcaaggaaataattctttataaaattttactaaaattataaacaaaaatatttaacaatatggaaaatatattaaataaaaatataaagctacgtaaatctgtccgtacatacacttagaagtcgaactaattatatcattaaaccaaaaccccaaacctgaaactaaaccgtgataaggttctggatcggcctggcaaaaacctaaaactcgaaccaaaaaatctgatcctgatccgaacttttattgagaaataccctaatggatcttggtgatatggtatttcgggtttgggtaatatatgaaccgaacccgaactagtggacctccagctaattcatatattttcgaatatttttagggatttatggtagattttaacctagttttcggatagtttagttactttcaaatattttttgattgttttttacttatagtttcggattcggatccgaagcaaaccgaactcgactcgaatatgtaaaatatccgaatggggctcgaggcctaaacctgaaaacccaaaaagtgaaataagaggatagatgatctgaaaaaggaactaagaggcaattgctacataattcgcaaagaggggaaaagacagaagaaataaatagagatgataaagcgagccaaatacagagaagagaagcattctgatccattcttctccgttgctttgtctgaagtcacatatttagtcacctctcctgttatgcttccatctcctgctctagggtagacacaactgctataacctataaacaagaaagccaaaacaatgaaaagaaatgttagtgtgtgtgattataggaaaatgtaagacgactctctttttttttttgtagtcttataaattaattattaatccactcaagttttagaagttggaaatgtgtaacaactataactcgcattcttaatgtagacgaataacatgaaaactttagaaatctaatatcaaatagtctgtatcatattcctagctatctaacttccacctaaatttagatataatttcaggtcagaaaaagaactaaaaaaacaaaacaaaaaacaaatataagtttataattggtttctcttagtaaaatttgtttccaccaaatgcatacttaccaactcatgattctataacaagtaggatatgaaagatgaagaggaaaataacttactagggttctcagaagtgatcctggcggttttagagaaatcgcaatccgtagggttttcaggagatttttggaaataaagattcatggcataggctgtatgagaggcgacattgttaggctcgaaacaaactcctcctggcattattgggccacaatcaattccctgcccacaaacccaatctagactatcttgcaactgctcttgagttgcatcctcctttggcacacaccatcccattgatgttacttttcccaactgtggagattgtgacgtctactatcatccaaaaaagattcaatagaaacggttaagtatctcgaaaaataaccaattcatggtggtgtagtagtttcaactccgtttgccttaaatagcaagaatatcaggcttttcacacgctgtgggagattagtgttgatgtctgtccaagatcccccggttatataaattttttttacatatttaacaaatgaaattattatggtatcgtagtacctggctactagtagttttagtgagtccaatgtcgtaggccatggaaagatcaggcttgaaaaggccaaaagattgctcaaaagaaggaccaggcttgagattctcgtcaaagagagcgaaaatgtaagtgtcgatggattttccgggcatgagcggagtcccaaccatggaccttaagtgagcaatgagatttccgttgtaagctttagcattctcaacactcggacctacctcgttgctgtcaccgg

SEQ ID NO: 234 - DNA, 114418 bp, Arabidopsis thaliana
gaattcaaagaaaaatgagaatgtgacatattaaattgagaaattagtaaatgcaaattttgactaatatgttcagggtgaaatcatgtacaaaatgatgtttgtaaaaaccattttcagtttatcctctggattcttctttagtataaagaataaacacacacaaaaaacaaaggaaaaaaactattgttaagacttgaacccgggacacagtcattttaacacaatacagataaaccatctgacctacaggcaccaattgtgatatgaagaaaacttaatataatatcttgtaacaagaattgcttcacctgaaaatgttcttgtcctctcctacctctttcagtcttttttttctttgttaaaaaaaaaaaacagtttgatccatttagacaaaaatttatcaccgaaaaacaaaatcatcctcaaaaccctaagcctaaaaagctttcagatctcttagggttttctcgttttttgttttctaatatctccctttgagatttttatggacgagtgttgtagaagacgaagaagacgaagaaactgatccctttttctcgctcatggattctgattctgagagagcttctctggagtcgattaaagataattctgaatgtgttcatgtttccaacgaacctaatctcacggcaacatgcgttgattcgtctgttggagaggaaggagttacggatgtaaattcgtccgccgctgtgtcggagctcgtgccgccggagcaaggagaaggtgcgcttttgaattccgtccctgagatcagtgaaagggggattcctgttgatgtcgtttcctcggtagatggaggaggagaagaaaatgcagcttttaatattcaggagattgattctgttggcggtgacgctgcggcggtggaggaggttcctctgaaatcgtcttcggtggttggggaaggaagagaagaggaagctggggcttcaatcgtcaaagaagaggattttgtagctgaagctaatttgtcaggagataggcttgaggaaaacaaagaagtttccatggaagaagaaccttcatcacatgagctctcggtttgtgaggtaaacggagttgattctttgaatgatgaggaaaatagagaggtaggtgaacagatagtttgtggaagtatgggtggtgaggagatagagagtgatttagagtctaaaaaggaaaaggtagatgtgatagaggaggaaaccacagcgcaagctgcttccttggttaatgcaattgaaattcctgatgataaagaggtagcttgcgtggctgggtttacggaaatttcctctcaagataaagggttagacgaatcaggaaatggatttttagatgaagagccagtgaaagagttgcaaataggtgaaggagctaaagatctgacagatggagatgcaaaagaaggtgtggatgttacagaagatgaaatggatatacaggtattgaagaaatctaaggaggaagaaaaggttgatagtactactgaattagagatagaaactatgcgcctagaggtgcatgacgtggctactgagatgtccgacaaaactgttatatcatcagctgttgttactcagtttactggggaaacaagtaatgataaggaaactgttatggatgatgtcaaagaagatgttgacaaggattcagaagctggtaaatcactggacatacatgtaccagaggctacagaagaagtagacacagatgttaattacggtgttgggatagagaaagaaggcgatggggtgggtggtgcggaagaagcagggcagacagttgatttggaggaaattcgagaagaaaaccaagaactgtctaaggaactggctcaagtagatgaaaccaagatttctgaaatgtcggaagtaacggagacaatgatcaaagatgaggatcaggagaaagatgacaatatgactgatttggcggaggatgtggaaaaccatagagattcctcagtagctgatattgaggagggaagggaagatcatgaagatatgggagtgacagagacacagaaggagactgttttgggtaaagtagacagaacaaaaattgctgaagtgtcagaagaaacagacacaaggattgaagatgaggatcaggagaaagatgatgagatgactgatgttgcggaagatgtgaaaacgcatggagactcctcagtagctgatattgaagagggaagggaaagtcaagaagagatgacagagacacaggaggacagtgttatggctgatgaagagcctgaggaagttgaggaagaaaataagagtgctggaggaaagaggaaacgggggagaaatacaaagacagtcaaagggacaggaaagaagaaagaggaagatgtttgttttatgtgctttgatgggggtgatcttgtcctttgtgaccgcaggtgaactttcatttgtagtttctgtgactttgctgttggtccttctccttcttgcttatggtcccttccctttaacatatgataaattttattaatgtatgatcctgttggcttgcaggggatgcacaaaagcgtaccacccttcctgtgtagatcgagatgaggctttcttccagacaaagggtaaatggaactgtggtaagttttttctgttattctctcagtaggtgtctgcttaaattaaatcagtgaactatagtttggaaaaacatgatacatcatctgctaagcacatattttctttcactagtgtatgtagtggtgaatattgtttactataggtatttagagtgtcttttaactgtacttccctagaaaatcatgacagcatatgtttttttatctgacttccggattatgacatttataacaattctttgtaatttaagcttcttctttcttcttttgtttgagttcctggcttgcagtttgtctttttaagtatttgctctcaaattattagtttgaacctttagttgaaagttatgtcaaaggcatttttctattgcttttcacatcatctttgattttcgtgttgttccttattgattcttactttagtctcaggcctgttgtaccactgtccaatgctacacaggcagtgacagatgttggattgtttgtgaaatggataagtctgattatcatcaaggctatgctcacccttttttgtgtacagtcatgactctttgagattccacaagaacttgtcaatggtagcttttagttgattctccgttgttcagtgtaaataccaaatagcagcagtgggatctgctatgtcgtttatttaaataaactataaaagtaaatacactggcattgatacttttaaatactttggtagttttctttccttgactatgggttggcgtggtgacatcatccagttttatcataccagaaatctacaccatttaaacttggtaacataacatattgatattaatgagaaagattaatttttcacgatcttctaggcaccaattaatggttatctctaagctattttcatgctgcaccgaattgtaaatgattcttgcatttatagcaaatggatcagattttttttggtacagatgttgttcaattccacaaactattgagatgcaggagcccaaaaaacactgtacagtctcttagtatagtactgtccctcatattttagaatacatgttttaaacttttaaaatagtacactgtttgagggattatttcccctaatttctttaaactagaattaattggcattctgcttcggttatgctgtatttttaagtttctctctgtgcatggtcatacttttgtttggttacctctctctgtgtatgtatgtattccgtgagctttcatcatttccatgtctttctaatagaacctaacataatgcttcatttttatgagtaggatggcacctatgtagcaaatgtgagaaaactgcaacgtacttgtgttatacatgtatgttttcattatgcaagggatgtgccaaggatgctgtcttcttttgcatcagaggtaataagggtttgtgtgagacatgcatggagacagtcaagttgatagaaagaaaacagcaggaaaaggagccggtatgcctgacatactcttgtagtttttttttgcttaccgaaatgttttcttttcttgtaacaatgagctgataaactgctcatgttgcagtagctcatgatcttatatttcctgtttctctcattaaacatgttgtgataagtctgatgatcaatcttctgttgattctctttcaacctagttgatgcatgataaccttacatttctttcttttactatgtaatgtcactaataaattatgagtttattttcacttctgccttagtttccactttgttatttgaatgacagttttttatttttctgatctctttcttacgtcgttttgtcttttacaggcgcagttggattttaatgacaagaccagctgggaatatctctttaaggattactggattgatttgaaaacccagctatctttaagtccagaggaacttgatcaggctaagaggccactgaaaggacatgagaccaatgctagcaaacagggaacagccagtgagactgactatgttactgatggaggatcagattcagatagttctccaaaaaagaggaagaccaggagtcgatcaaagtctggttctgctgagaaaatcctatcatcaggcgataagaatttgtcagatgaaactatggagtgggcttccaaggaacttttggatctggtcgtgcacatgagacgtggtgacagatctttcttacctatgttagaagtacagactctcctactggcttatataaaaagatacaatcttcgtgatccccgtcgtaaaagccaggttatctgcgactccaggcttcagaatttgttcggcaaatcacatgttggacactttgagatgttaaatcttcttgactctcattttctgaaaaaagagcaaaatcaggcagatgatattcaaggtgacatagttgatacagaagaacctaatcatgtggatgttgatgaaaacttggaccatccagtcaaaagtgggaaggataagaaacgtaaaacacgcaaaaaaaatgtcaggaaaggacgtcaatctaatcttgatgattttgctgctgttgatatgcacaacattaatttgatatacttaaggcggagcttggtggaagatctacttgaagattctacagcattcgaagaaaaagttgctagtgcatttgttaggttaaggatatctggaaatcaaaagcaagatttatatcgactggttcaagttgttggtatgtttagttttctattttacagactaagtcaatatggttgatacaatgggtgactaagatctctttttgtttgaaacacaggcacaagcaaagctcctgaaccttataaagttggcaaaaaaacaacagactatgtacttgagatattgaacttggacaaaacggaagtgatatccattgacattatatcaaatcaagatttcactgaggtgacgtactgctgatatccaatgtccttttttgtcactggaaatgagaaaacatgttctctttttttggtcctaacatagtattttctattgcacttgcatatattgacaagccatggaggctgtggttagtacgaagtaattgttcaagggtgctatatgtttaacctataactttatgcaataatttcaggatgaatgcaagcgtcttaagcagagcataaaatgtggattaataaacaggctgacagtggtatgcttcatataacttgaactcttgcatttgattatgtctaaaaatctgtggaccatggtgttttgcatttctggtattctaatgtcaatgtttttttagggtgatatacaagaaaaggccattgcactgcaggaagtgagagtcaaaaacgtaagttgcgttttttcctgctgacgcattttcctgtctctaattttttcattattatatgtatggtaattgagcttgctggtctgggagacggaaaataactgtattatctgtctagggaatgtgcatgattctagttttatcgtctctattaggttttgggttctcaggtttcttaatattgcaaagctatcatgatagtatttaagaaatgtataaaaaaaaaatgtatgtctgcttcagtactgaagttattacttaaatgaatgcagttgctggaagcagagatcctacgtttcagtcatttgcgtgatcgtgctagtgacatgggccgcagaaaagaatatccttatctgttgaaactttcaagttcttgtcaaaaataatgatttcccatgctttggaaatgctcctctctgtgcatgtttttgtacttcagggaaagagcattgaatctatttgtagtggcagaaagcatatagtttccttctttttattcacttcgttattccttaactatgcttacgctgcgagaatgtgttgagaaactgcaactgttaaaatctccagaggaacggcagcgcaggctagaagaaattccagaaatacatgctgatcccaaaatggatccagattgtgaatcggaagatgaagatgaaaaagaagaaaaggaaaaaggtttcttctatgatttcaactttttagttgcaactaaactaaaacttgaagtttgtttatcttttgtttggtatattttctaattcttttgatgtttggtggttttaatacatctagagaaacaactgaggccgcgaagcagtagctttaacagaagaggaagagatccaatatctccacgaaaaggaggatttagttccaatgaatcatggactggcacaagtaactactcaaatacaagtgcaaatcgtgagttaagcagaagttattctggtagaggttctactgggagaggggattatcttggtagttctgacgacaaggttagtgatagtatgtggacttcagctagagaaagagaagtgcaaccatctttaggctctgagaagccaagatctgtttcaattcctgaaactcctgccagaagttctcgtgctattgcaccaccagaattatctcctaggattgcctctgaaatttcaatggcacctcctgctgttgtttcgcagcctgttcccaagtcaaatgattcagagaaaatatggcattacaaggacccatctggtaaagttcaaggacctttttcgatggcgcagctccgtaaatggaacaacactgggtacttccctgctaagttggaaatctggaaagcaaatgagtcaccgttggactctgttctactgactgatgcattggctggactatttcagaagcaaacccaggcggtggataatagctatatgaaagctcaggtagcagctttttctggtcaatcaagccaatctgaacccaatttaggttttgctgctaggattgctccaacaaccattgagattcctaggaattcccaagatacttggagtcaaggtggtagtcttccatcccctactccaaatcaaatcacaactccaacagcaaaaaggcgaaattttgagagcagatggtctccaaccaagccatctccacagtcagctaatcagtcgatgaattattcagtagcacaatctggacagagtcaaacttctaggatagatatccctgtggttgtaaattctgctggtgctctacagcctcaaacttaccctattccaacaccagatccgatcaacgtttctgttaatcactctgcgactcttcattctccaacaccagcaggtggaaagcaaagctgggggagcatgcagacagatcatggaggaagcaacactccctcttctcagaataactctacgtcttatggcaccccatctcctagtgttctcccctcacagagtcaaccaggatttcctccatctgattcttggaaggttgcagttccaagccaaccgaatgctcaggctcaggcccagtggggtatgaacatggtgaacaacaaccaaaactcagcacaacctcaggctccagcaaaccagaacagcagctggggtcaagggactgtaaatccaaacatgggatgggttggtcctgctcaaactggagtgaatgtaaattggggtggatcttctgttccctcaactgtgcaaggaatcactcattctggctgggtcgcgcctgtccaaggacaaacacaagcttatccaaatccaggatggggcccaacaggccaccctcaatctcaatcccagtctcaagttcaagctcaagcgggtactacgggctcgggatggatgcaaccaggtcaagggattcagtctggaaacagtaatcaaaattggggaactcaaaatcagacagcgatcccaagcggagggtcaggagggaaccaagccggttactggggaaaccaacaacagagccagaatggagattctgggtatggttggaacaggcagtcaggtgggcagcagaacaacttcaagggacaaagagtatgcaagttcttccgcgaaaatggacattgtcggaaaggagcatcctgcaattacctccacaactaaaacaccacttctctctctctctctctttctctctatgcttttgggttatgtatgcatcctaaaaagcagcgttaggcgtttttagccacttagttttttatgcactacagtcttttgttgggagcctttcactcagaattagctttaacatgtttattttttggggggttaggggcttagtagtatttaaatcttgtgatggtggatggtggatatgatagttataacctcttgcatataatatttgctaggccaacaatatgatgtttgtatcgtttaagagttttctccttgaacgagtgagtcttggttcagtaccttcctatgacattgagatcaaaacttttttttctttcttttttgctaagttggcataagtcccatttagggctcggcaaaaatatcggaaccgattacctgaaagacccgtatccgatcgggttttatctgaacccgacccgcttacctgaatgtccacccctagttccgttaacccaaatccatgttgttaatgaatcttaacagtcaaaaacgggaaaagaagggaaattaacaaaagatacaaggttttgagccagagatgtttctcctttaatttgtggaaggattatgagaaaaaaacacttgggaaaagaattcctgagccaaccccctcctgacacaaacatatcattattagtgatcagctaacaagtttttaattttgtcttagtaatcgtgctctaattcctttctaaaagctaataatgttgttccatactttgatttcattattaaattagagtagcatcaatataatgaagatatggcattatatatattacataaaacaatgaaaacaaagaaattcatgtatagttttagtaactaaatgaatataaaattaaatacaaatacgataatggatgacggttataggattttggaatttttaaattgaaatcagcaattttgaaaaaagaaatttttttacagatttttaataaactttgtcacaaaatatcgattaaacaagaaatatttaagtgaaattataaataaagggattttttgttaaaatttgtacttaaatgtgattttcaataataatttagttaaaggttttatatgaaccgattattaattagattttttattatatttttttagttgagatatttttctatcaaaaattaaattggaaaactgagaatcctctctcttatctctctagaattctttagagagagagtgatttcaatcttttttcgccatctttctttgccgtccggaaagttccggctttctgtataccatcggccgatttttttgtcgtgtttgttacgttttttgattattttttattctcagtggttttggtgtttaattacataattaagttgaaggttttaaaatggatgaggaaaaagtggagaggtattttcatcgaaatcccttgctaatttaataatctcgttgaagattagagaaagaaatactaaaagctggaagagaagaactttgcaggcacgtaactaaattaaattgcgaattagtataagaaactggtaaagggtaaatatgtaattaaacaccaaaaccattgagaaaagaaaaaatgaatcaaagccagaagtagaagaagaagaaccctttcgtcgtcaaggtctagctttctcaaatcctctctctctcgtttctccgattccgatatcaccgtctcctccaccggaaaatccataacgcgattaggtttttagcctagttccttaatctctggttattgattctttcaatttctgatcgatgacattgtccaagcgattggctctattgggagctcaatctgcgattactctcgctaaacctcgaggtctcggttcctctctcgggttacttgatcgtcgtccatttccgtatcgtcaattttctgagctcacgaaagctaatgggagacgtgcttttctcgttgatacattggctctggtaatttcattctctatgttagacctagatctagaaattggcatgaattttgtagtattaagaacatttggaatctctagtatctgaagttgctttagaagaaagcaaggaatgtttatagttttctttgggtttatttttgtgaaaggtgaggagtcttgaagctcaaggagttccatcgaaacaagctgaggcaataacttctgctattactgaggttttgaatgatagcttggaaaatgtctctgagtcttttgtgtcgaaagcggaaatgcagaaggtaatagtctcgattactgggaaactaatttgtgaattatgtgaaactcactttttcttacttgtgatttttgtatttgcagattgaaatgattcaagattcaaatttatcgaaatttaaatctgaagtcaaaagttctcaggtaacatctacattagtggtttagaaccttgtaaactagtttttttgtggtttgatgtgcaaaagttgttgatgttaaaaaaaacaatacaagttttgctgcgtttaataccagtttttagttacattgttgtttaggattactacagtaggctgctcattagtacatacatatccaggtgtgtggtctttgcgtttaaagttcttcacctttaccctctttggtattctatttttattctattatggatatggattaggttgtgtaactttgaaagtagcagatctgaagtacatgagaagctacgttttttatgtaggaagagggcctgtttagtttttttattcaaactctctctgtgcagctgtttatgagttggagtcttaggtacttgtagctagaaaaatcggtatattgattgcacagcgtactgtacatttttcatgttatgttgtgttaaatcatgtagcaccagcatctactgtaagtattttaggccaaatagcattgtctttacttccctctatgacacagtaaaaagatttatgattccaactcgtcttcattctttgtaaaggagcatcattttactgtattgcaacgtgagactgaaaaattgagaggcgatatagagaagatgcgaagtgagctaaggtttgtgaccatagttcgccttgtaatattcttttaacgaatctgaaaactaagacctaagacctctcacttgaaacaggtacgaaattgataaggtcacagcgggacaacgcttggatttgaatcttgaaagagggtaagaaaattttgaattttgcacagtactctcctcctataaccatttaccaacgtagtcatctgcaagtgaaggcgtgatatatgattctggttattttgttactcatagccgaatacgtgatgagctagctaatcagaataccgaaacaacaaacctcacaaacaagcttgacagggtatatagctattgtttcctttactcatgaacttcagtatacactgacacttaggaagataagaagacataatacatttttcttttgcaggaaattcatgcgttgagagctcaattagaagcttcaaaatacgaagtcatcaaatattgcataggtacacttgtgtcgatttcagcagtgggactcgccgtccttcgtatcatgatttaaagtacgatcccaacactcaacactgctctctgcttacaggcttaaaagccaaattgataacttgtcatttttatttgaatcccatcaatatgccatattatttttttctggcgatcagagaatattattgtttctgtgatctattttgccatcatcctttctaggtgtcagggtttgaaaatttgcaccgagaattatgttaatccaaggattattggtttcttccatttgcattattagttttctagctccttatatgatatgtcaatgactcaatgttacaaattgtcccaactgattttgtttctaagctcaaatattgtcacaacgtatttcattggatcctcctacgactggaatgctcataaggacataggtttggttatgtcttcgtttttttcaaatgagcttatgattataaaaactcaagattaggataattttctcaaaaaaatgcgtgtatatatatcattcttaagatacaagaaacattagttttgttaacagttaagatatagagtcggatttgattcttctaattgagtgttaacatgaagcctaagttgccattgaataaaatcacacatttccttcttcaacgccaagactctttcttttattttcttccaaatgaatcatcttcttgcagtgtatataatttgtgggatcaatgggtttcttaaaacccccttcccaagaaaagattactgaagattgaagaagatccaatagctggtggcccacttggacgtgaagattagcccaattttatttgtattaaccgactaatggtctttagtatacagtatatagctacgtttctcttaggtcttttgtgaattggttttgtctaggtcttacttaatctacaagttctgtttcttcgtctgatcggcaatcatgaatccaagtccaataacgattgatctcatcttggagatattgtcgagattgcctgcaaaatcagtccggaggtttcattgcgtgtcgaagcgatgggcatcaatttttggtagtccatatttcaaggagttgttcctgaccaggtcctcgactaagccgcgcctcttattcgccatcgcagagaaaggcaacaaagagaaagactgtgtgtggaggttcttctcgtcgccacagcttgagaatccatatgagaaatcctcatcgactcttgtagcaaccgctgaatttcatgtgagattctctccagacaatctactgatctgtcattattatgacctaaaatatttttcaattggttatgcctttggcttgatctatatctatggtaatcgaggccgggctagacctctaatatgtaaccccactacaggacggtatgccatcttacctaatcggtatacttacagaaaggcgtttagctttttcgggtttgacccaattgacaagcaatacaaggcattgtccatggtttatccatctggtcctggtcatagtagagttattacatttggagctggagatctgaagtggagaaggataaaatgttcattgcgacatgatattaagagtgaaggggtatgtatcaatggggttttgtattacttaggtgacacgtcggattggagtcgcgttaatggtaatcacgtaacgtctggttatatgatagtttgctttgatgttaggtctgaaaaattcacctttattgacgtaaaaaggttttgtcgattgataaactacaagggcaaattagctgtgatttattgggaggatgatgtcgacattcaagagctttattacaaaaagggtatagatgtcgaggaatatgtggagaataatgtcaacgctgatgccactaatgagttgtgtgtgtggattctagcggatgttgagaaacaggaatggtcgaaacatgcctacacttggaccgatgaaaagttcttccgtcgtttggtatccatcgctggagtgactgcttcgggtgaaatagtgttttcgatgcgcaagtgtaatcctaaacaaccgttttatgtgttttacttcaatcccgaaaggaacagtctccaacgtgttgaaattcaaggttttggtgaagccgttacgaaatcttgtgacgtttgcacctttgtaaaccacgtagaggatctcaatgtttacgatttaaaacaactcaagtcagtccatcctccattggtcgagccagaatattatgattcagattaagagtcagactgagaagggacaaggagaagaagactgacaagtgacaaggataaggagatagagacgagccaggtgaaagcaatgggcatgccattttatgctcttacttatgcgttttttttttaaatcaacattatctatgtttactgttttttttttctcttttgaacgagctttatatgtatccttcattttgtttggtctcaagaacaaggtgttgcagtttctcttagttctctgtcttaatctgagtatctattctttgaatttcagcatggtttcttctggatgagatctgtcctctgttctgtttcaatatcttgttgtgtttgtcggttgtgtgtgatgggactaattttcatgatgacactttggactaaatacttaaatgggatttgtacaaaatcgttcactcacttgaagaaaacattccttgaattctaccattcctggtttctattagtctcagtcttcatgtttaaagtatgcaacttcttgttagcttagttttgaaacttttggttctctgtaacaaagggtcttgtaagctgtctttgaaagagggaacattctcgttaacagtctttatgggtcttatgctttgttgcttctctaagttttttgtttgaacttgtgaatggcgaatagatgagatctgtcctctgttcttaacatcttattgattttgtcatttggtttaagaaatgggaccaataggcccaggaattaggtccattaaaagcccagtaataatggcgccaaaatcaagtgaagtccccgcctaattcatctcttctcactaaaaaagcgtcgaaacctctcactccgtctctcaatcaattctccgatcagccatggcttctgattcttctctcggcaacaccaacgacggtactatctctctccctctctctaaatctgaaactgcttcataattttgacgaatctcactacctcaggtcctccttctcccggagaaaacgtttcaagccctatcgaaaacacatactcttcccccgccgcacttcaccgtcgccggcgaggaagatcctctactcccacgcaattcgcaactcctccaccaccgccttcacgtctcgcatcatccaattccactcctccaacatctcgtccttccgccgccagatctaaaggaagaaatggacacggaggtggcggtggtggcggtggtggcggagacccagggacgccaatgtccactgacgagccactgccttcttccgatgacggtgaagaagacggaggcgacgatactactccgactttcgtttggggaactaacatcagtgtgcaagatgttaaatctgcgattgaaatgtttgttaagcatttcagagaagctagagagaatagtgatgatttgtttagagaagggaagtatatggtttcgataaggaaggtgattgagattgaaggagaatggattgatgttgatgcgtttgatgtgtttgattatgatcctgatttgtataacaagatggttcgttatcctttggaagttctcgctatcttcgatattgtgctgatggatattgtttccacgattaatcgtttgttcgagaaacatgttcaagttaggatttttaacctcaggacatctacttccatgagaaatctcaatccatctggttagtatgattcagtttttgttcttcttggtttcttagttctctctagtggtaatagcttagcttatgtttggatgtgttttgtttggttggttagatatcgagaagatgatctctttgaaaggtatgataattcggagtagctctatcattcctgaaataagggaagctgtgtttagatgccttgtttgtggttacttctctgaccccatcatcgttgatagaggtaatttggtcatttggatttatccagattttatgtatctgcatagtttctcataatgttgtttgattgatagggaaaataagtgagcctcctacttgcttgaaacaagagtgcatgaccaagaactccatgacactagtgcacaaccgatgcaggtaagttctagacatagtatatgtctgattcttataatttctgtaacttaccttctttattttgtgtatcaggtttgctgataagcagattgtgaggcttcaggaaacacctgatgagattccagaaggaggaacacctcacacagttagcttgttgctgcatgataagctagttgataatgggaagcctggtgatagaattgaggtaataaaagcagtaattctatcagggtagtacattcattcctatggttttcgttgacaatcaaaagcttgttttctggataggtcaccggaatttacagagcaatgactgtccgagtgggacctgctcacaggactgtgaaatctgtgtttaaggcatgtcatcttatttcttcctctgttagttatttccctttattgtaattacgttctgacattgtcatttatgttttcttatgaatgttgaggacagacctatatcgattgccttcacataaagaaagcaagtaagttaagaatgtctgctgaggatcctatggatgttgacaatagtctgcgtagagttgatgaagatgtcgagttagatgaggagaaggtatttcatctatttaactaaaatggttctacagttttgtatcttattcattcgtccctccattccaaccaatatttgtgttacttttcagctgaggaagtttcaggaactctctaaacaaccagatatatatgagaggcttagtagatcactagcaccaaacatctgggagttggatgatgttaaaaagggtcttctatgccaggtactgtaacgcttttgatactgacttatggtttaaacaaaattagttctttttactgagtcaaatttcaaatgtgaagctttttggagggaatgctttgaacttagcatctggtgctaattttcgtggtgacatcaacatcttacttgttggtgaccctggtacgagcaagtcccagctgctccagtacattcataagctttcaccccgtggcatttacacaagtgggcgagggagctcagctgttggtttaacagcttatgtagctaaagatcctgagacaggagaaactgtatgctaatattgttttcaatctttttattatcagctgtttttttttattctgtgtttcaaagttttcataaacctgacatgctaacatgaatgctacattgtttaggttttggagagtggagctcttgttcttagtgaccgaggtatctgctgtattgatgaatttgacaaaatgtctgacagtgcgaggagcatgctacacgaggtttgttcctctctctcttttttagcattgctcaaagtcgtagcttacagtttttgggtgccccctgtgaatgtggtctctagtcaataagattgcattactgatgaacattgtttctctgtcaggtgatggaacagcagactgtttcaatagcaaaggctggtattattgcatctctaaatgccagaacctctgtgttggcttgtgcaaatcctagtggctcacgttataatccccggctttctgttattgagaatattcaccttcctccaaccttgctatctaggtatgttgcaatccttcaacaatgtgacattatttttactaaaggctaatggtttcctctatttggtgttactaattataatctcattttgcttcttagattcgatttgatctacttgattcttgacaagcccgatgagcagactgaccgaaggcttgcaaagcatattgtggcccttcactttgagaacgctgaggtcttatattatatattttcccagtgtgtatgatatgttgacagacaattattttttgcctttatcttacttaattggtatcatttgtgtcaatatacagagtgctcaggaggaagctatagatattactacactgacaacttatgttagctatgcccgcaagaacattcatcctaaactgtcagatgaagctgcagaggagttgacccgaggatatgttgagctgagaaaagcagggaagtttgctggcagtagcaaaaaggtgtgccctcgaaacttcaatatcttttctatgtcgtaaccaaggctcataaaaaggctatgactagtctaacgctatgaaacgctctgaatttggcacaggtcataacagcaactcctaggcagattgaaagtttgatcagacttagtgaggccttggctcggatgcgcttctccgaatgggttagttaaacgctcatattatacattttcctttcatcgttctaaatcaactgaaatggtttttgtgataaaggttgaaaagcatgacgtggacgaggcatttcgacttctcagagttgcaatgcagcaatcagcaacggatcacgccacaggtagttttttcacagtaactttcagacccattattatcatcaggataaagataaacagtagcattcaataccaatctaacaataaacacctgtatttatgttggtgaagggaccattgacatggacctgataaatactggagtgtcagcaagtgaacgaatgaggcgggatacctttgcgtcgtcaattagagacatagctctggagaagatgcaaattggaggatcatcaatgcgcttatccgaggtattcatgcactactcctttctttttcccaattttgttatatgccaaaagcaagcaaatcagtttacaataagagaaaccgtttcttaagtacaatggaaatgttgttgttgcagttacttgaagaactgaagaagcatggaggcaacataaacaccgaaattcatcttcatgatgtgagtcatttataacactttgctacatatcaaaaggtttttggtctaaggacagagacataacaaagtatttgttgttgtgacgcattaaacaggttagaaaagcagtcgcgacgctagcgagtgaaggatttctggtagctgaaggtgatagaatcaagagagtataatcacagattcatgaggaaagcttaatattgctgtgattagagagtttgatgatggttttagtagcatattaatagtaggatacccagcaaatgatgtggctcggtccatcttctcactatttgctaatttgtaatgacttattttgttactagatatcactttggcactgacaaaaaaatggatcaaatatactcccaacaaagctaacttgcgaatgagatagaaatcaataaaatcgttccaactcgaccaaacataagacaatgtgtgtattctttagatcactaccaaaattcaaaaatatcttcatgcttatcaatttttatatatagcaaaaatagtcttccttcagtcttattctcgtaaactattattcacttgatgaagttatttgtatcttcatatgatataattaagaatttttaaaaagaacaaaaaacgaagaataatcatttgaaaaagttagagcattgcaattacaaactttatagcatgaaaaggtggatcgtacaaaagaagaaagttagataaaaagattgaaaattgggtccacatagagaacattattggatttcgatagagatatggtatggactaaaatgacaagtgatcatgcgttcaaaaaagtaaacgatacgattggtctctaactttcttcgtttcttattcgtaaggacgtggaactcgttactccttacctctcttagtgctccatctctctcatgtcacctagacttcgtataagtcaacttgattgtattttgacatggttaggcaaatgcttcgatttgttttccgatattgatatctgattaatccggaaacacatatagatcagaatttttgttgatctaaataaaacggagcggatcacaaataatacaaaaaatttagaatatatactctgatttattttttgaatcaccttttagaaaattgtcatcataagagttaatggtttttcaaaatgactatcatattaagaaaataaattaacctcgcaaataattggtcaaaatattattttcttttaggctactgcttctcaggggattaattatatcaggaatttgagacagactgtacaaaattgatcaagatacatagttgtctgacgagtgatccattttgccaaccttttaaatgatttttttttatagttatttttctcttatttaaatcaatatatatatatatatatatttatatttagcccgtttgtatcaaagaatgtctttttttttttttaagtctattttggctttttttttaagtctattttattaaatactaatatttcttttgtttttgcgaattttctggaccaatcatactgcacggtctatgtgggaatggaataaatcctttatcattgtaccaccataagcatatgcattggttgacgacctaagtctactgaggcatatcatcaattatctttacataaatatattgtgattggattattttaggtttttgtgaaaaaaaactatgaagtcactaagttttgttattttatctttcatctaaaaaaaatgcagaataatcctatgaaatctctaattatacataatataattcttagatatatactgtaaacgttttcatatcacatacatttgacttttaaaattttataggtaaatttgaactatttatcttgaaggtttcgatttgatattatatataaaatttttaaaaacttgacaatcgtgaaaaatggtaaattgcatataatttaggatttcataaaattatctgcatttttttggaagtgaaaggtaaagttgcaaaaaaatatcggtttcgaggtttttttttacacaaaaccctttattttaaaacatagaaaaaactgaaatgtactaagaaaaatagctatttataatttttggtcaataatcgtataaatttacaataatccatcgagtaaacatgatatatttagggtcctgctgcatatgattaaccaaagaataccaaaaataatcttctacgatctttaacatttccttttattttccatgcataagaactttttgtacctcttctcatcttttattttatgcttatgcaaattgagttaattttgcaaacgtatttttttgttccaaatattaccataatttgaatttttaaaacaaacacacaacaacaaaaaaaaaattgaaattccaagtgagaacatgtcatgccattgtcaaacatatcatataatgttttgttttttcttcttttttatttattatagttattattaaaatcccaatgttagtttttttttcggtcaaaaatcccatgttagtttgttattattaatatcatatattgttagtttgttctctttaccaatctaacatgttattatgtttaacaaacatagaaaatgatgttttgttatatattttcctatatacgtaacttctattaaaatcaaatggaattgaaagttattttgcattagattagttaattgaataaaaatagcatttatgcgtttaaaatagcatgacgtgttttcacttagaatcacatatctattttttttttttttttgcctacatatatatatcatggcattttattttaaacatatgaaatcaagtaatatttttagtacattggtaaataaaatataatagcatttattatatgttttatatagtagaatttcatctgatttaggctcacatatccattttaaaaatgttttgtaatcatctaaaaaattcaaactatggcatatgaagagtagactaatatagcaagttgaatcaatttctacgaagagatagaaaataaaatgagaaaagacacataaaatattaactgcatacacaattaaaacaaaaaaaaaaaacaagaaagagaggttaaagatggtagaaaattatttttgttcatgttgtttataaaatgatcattcacttcatatattccacataggtactatacattacattttcaactaattcacatattcattcataataatattatattaagagactaaatccaaagaaacttggtgggctattaattgactttaattttcttggcactccacaaaaccagaaaatgaaaataatccatggatcaaatgtttttgatttgattctttatttagagtgttcaaactggatctgttttctttatttcatgatttggttctttatttcatgagttagagtgctgttttctttatttggttctttatttagagtgttcaaggtggatctgttatttatttggtcttaatgttttttttctttctaaaacttaaaattgactgtgcaccactgattagtctgaatattacgccaccttaggtttttttttctcgatcataacaaaatgccaaaatcatgaagaaaaaaacaatttacagttgacaaaaaaaaagattaaaaatcaaaacagaagacaacaaaagaggaagcatagattcgtgtgtcctctggaccagataattaaaaataaatatccaaccgttcgttaacatattccatatcgacatttggccatttgggtcaaacaatacaaaaaccaaagttaaagaaatagaatttaatacctttccttttaaaattcccaaataaaaacttgattgaaacagtgttgacgacacggctccattaacgaatattccgtacatcaagcctcatacatttcccctgtctcttctcttataaggttttttctccctttgtttatcggaaaaaatctctctttcgaataaaaaaaaaatctcagaatccaaaaatgggtcgtgtccgaaaatcagatttcggttccattgttcttgttctgtgttgtgtcctaaatagcttactctgtaatggaggcatcaccagtagatatgtcagaaaattagaagcaaccgttgatatgcctcttgatagcgatgtttttcgtgttccttgtggctacaatgctcctcaacaggtacacaaatcttttcttttatgagttttttgtggtgggttctgtttttaattatgagttctttggtgggttacctccaagtgttaggttaggttggtgttttacagttttagttatctttctcaatttaatattgggtttcactttttgtttttttttaatcttgttctaaacaaaaagctatttattggattattcaagcttgttaattggtagttattaaagaatgtgaactttttcattcttaatttgtaaaaataatgtgataatagtgtgttttgattttggggcaaaaaggtgcatataacacaaggagatgtagaaggaaaggcagtgatagtatcatgggtgacacaagaagcaaaaggatctaacaaagtcatttactggaaagagaatagcaccaaaaagcacaaagctcatggcaaaaccaatacttacaagttctacaattatacttctggttttatccatcattgccctatcagaaacttagaggtccatcatcataatcattttttatttatgtatctcattaccatcatctttggtagtgttgttgttagctgatgttgtggtttttcttattacagtatgacaccaagtactattatgtgttaggtgtgggacaaacggagcgtaagttttggttcttcactcctcctgagatcggtcctgatgttccctacacttttggtctcattggtactgtcctgaaacatattgtcatggttttaacttttaacaaaaatgcattttactagcctctcccatggacttgatcttgtgttgcaaatttttgttttgcaggggatcttgggcagagttatgactcaaacataaccttaacacattatgagaataacccaacaaaagggcaagcggttttgttcgtcggcgatatctcatacgctgatacttatccggatcatgacaataggagatgggacagttggggaagatttgctgaaagaagcacagcttatcagccttggatttggactaccggaaaccatgaactcgattttgccccggagattgtaatgcttcttgcttcttcttctttgtttttttctgtaggcttaaaaatgctataagagcatctacttagactaaagattgagatggattgtttttatgtaatgtgtagggtgaaaacagaccgtttaagccgttcacgcataggtaccgaactccttaccgatcatcaggcagcaccgaaccattctggtactcgataaagagaggaccggcttacataatcgtgctagcttcatattcagcatatggcaaggcatctttaaaaatattaaacctttttgtgcaatattctcaaaccatgagtaagaggatctgaatattcttatctttcttggacaggaaaatacacaccacagtaccaatggctcgaagaggagttcccaaaggttaacagaacggaaactccgtggttgattgttctgatgcattcaccatggtacaacagctatgattaccattacatggaaggtgaaacaatgagggtaatgtatgaggcttggtttgtcaagtacaaagtagatgtagtttttgcaggtcatgtccacgcctacgaaagatcggtaagatcaataacttttgggtcacgatgtctctttaaactatagatactaagaaatctaagctattgtgaaaccaggaacgtgtatcaaacatagcttacaatgttgttaacggcatttgcactccagtcaaagatcaatcagctccagtctatatcaccattggtgatggaggcaatattgagggcttggctaccaagtaagctaacatttcttctcaatggaaccgattttttatattagattctatagattatgagtttaaatgtgtgatatggtttcttgtagaatgactgagcctcagcctaagtactctgcctttagagaagcaagcttcgggcatgctatattctcgataaagaacaggacgcatgctcactatggatggcataggaaccatgatggttatgctgtggagggtgacagaatgtggttttataacagattttggcatcctgttgatgattctccttcttgtaattcttgagaatctatgaggaataggatttgttgtatctctatgattgaacaaccatccaaataaatgaattgtttgagagttcttgtgccaaacagaaaaagttaaaacagagatcgaacagaaacttatttacaaaccgtttggtttcattgttctgaaatccaaaaattcagaaccgattgtgaataaccaaaccataccgaaccgaataaacctaaccgaaatcaaatcggattacaaaaggttacctatggtttagtaattttgtttttatgaaaccgataaacatgaaaaccggaaaacccaaatggaaccaatccagcatcatccaccacactcttcacattttctaagaggagtttcaaatatcgttggagttttcttacaagacatatagactatagactattcgtttgattatgtcttattaattatttttttattttttatttttagatttttcatcaaacaccattctcgttaagatgtcaggaagaggctctcctctacggagagccattcaggaaccgactgcatgagaaaaaatacaattgcggactcgagcttttttagctagacaatcagctcgaaagttaaaactacgaggaacaaagcgaatactaaaagacgagaataaacagactaaagatcgatatgagacaatctccgcagcgaaggatggccactcatcttgattatccaggatagagatcagatttgcgcaatccgaagcaaaggcaccagtcgtcataccaatagagatcagtgattccatcgcccataacaaggagtcaaattcagcatggagcggtgataaactccgacgctcactcttgagacccaggtgtaagacaacatcatgtctgacgaacacccaaccaaagccacttagagagtcttcagcgtgccaggacgcatcaaattgacactcaacgagctcagctgggggggcttccgcgaagctaggcggagggggagcatctacatgatcctcgtcaattagcatggcttgtttccaagcagcagcttcttggagggccaatgcgagagtttcaggagggggttccctgacgttttcaaatataaagcggtttctacttttccagatataccaaataatccatggaaagagagcaataacatcttcttctatatcgaattcccggccacgccaaagaaaaaaatcgaagttataaaagagagaatttctagggaaaagactccctgaggaaggaataggcgagagtgcccatatttgtcgagaaggtggacaatgaaagagtaaatggttaatcgactcctccgaagcaccgcaacgggggcaactcttatcggtacccatatgtctgtaagctagacgttgacaggtagaaagacaccctgaaatacattgccacgcgaaatgcttaagctttcgtgtagttttaagcttccatacttgtgcctgaagtgccgtaacacctggtccctgagaaggggggtcacaaataggacgagaaagatctctcgcggcccaatatccggacttaacagagtaattaccagatttagtatacggccagctatatccatcactcaagtaggtccgacttggtcaaattcctaatataagtggaatgtcaacggggtctatcaaggatgtaagacggtcgatcttccacgattgagtgttttgatcaatcaggtcgtttacataaagatggggatctcttgtatcaaggatgctcttagctggccttgcaggaattgaggggatccaaggatcttcccagacgcgagtcaacattccagaacctatggtccgacggaggcccaaaagaagaaggggtttcgccgccataatacttctccatccataagagggtctaaacgaagcaccaatatggagtggatcactaaaacggaaatatcttccacgtaagattctactgagaagagaattcggaaatcgaatcagccgccataattgtttagctaacagagctaagttaaactcttcaagtgttctaaagcctatccccccctccgaatggggtttacaaagggtatcccaagctatccaatgaataccgttactgttttcattggttttccaccaaacattggcaatggcattacttagcttggagcgaattgcttttgggagaaggaagcacgacatgacgtatgtcggaagggcctgagctacagactttataagtacttctttgtcgccttttgacaagaatttagccgtccaagtattcaagcgtttttgaagacgatctcttacaaaagagaagacttgaacttttgaaccatggatcttctctggtaagcccagatatgaacccataccgccatccttatggatcccaatagctactttaatgttgttacgaatagtattttccacatcatgtccaaacaaaatggaagacttagcagagtttaactgctgacccgaggcctccccgtatgtccgaagaattttaataatttcctgcccttggacaggatccgctctacagaagaaaagactgtcatccgcgaacaataggtgagaggttgaagggctcgcacgagagatttgtaggccttgaatccggccgtgccactccgcatctttgaggcttgctaccaaagcctctgtgcacaagatgaagaggaaaggggagattgggtctccttgacggatacctcttgatggtttaataaagcctctcggggaaccatttacaaggactttataagtgaccgaagagatacaaaaggttattaagtcaacccatttttgggaaaaacccattttcaacataagcgcttgaagaaaacaccattcaacccggtcataagctttgctcatatctgtcttaatagccataaacttttttctgcaagccgggttattccggagagcatgaaagttttcttgtgcaattagaatattatctgtaattaggcgacctgccacaaaggcagattgcgtctcggatatcaagtccggaagtagtttctttagccggaagctaagaacttttgagataactttgtagctcacattacacagactaatagggcgaaactccaccattttcctaggtcggtctaccttagggatcaagcaaatgtttgtctcattcaactgcttgtcaaaagcacctgaagaaagaaagttttggactattataactaaatcagggcccgtcaaatcccaaaacttttgatagaaaaaacttgtcattccatctggacctggagctttatctgggttgagagaaaaaagggcgcgtttgacttctgccggggaaatatcttttgtgagatttttgtttatttcttctgaaattatcactggcacatcccgaatggcggaatggaaatcttgtggatttgaggtggtgactaaatccttgaaataatccacttctagattttcaattcccacctcgttatcaatccacagaccgtcttgattcaataagccaataatcttgtttttcgctcttctctgcttagttatcgcatgaaaaaaatttgtgttattatcaccggacttgtaccacaattccctactcttttggcgccaaaaaatttcctcttctctatacgcatcacagagtttccatttcagggctaggaggtcctctgcagagatggcctcatcttcttgagctcgatcaatctgatcttgcaagtccacaatttttttctctgaattagttgaactagctttcttccaagtagaaatagattttctacaacttttcactttttgtgaaaaaaaatcaccatcatgggaagataggttccacccttcgtacacagattctttaaagcccgatttcccaaaccatcgtttatcaaaagaaaactgcttaaaattacgttggggactgttttgtattgaaccaaggagagggcggtgatctgatccccataatttaacatactccacattcgagtgggaaaaaatattatgccattcctcattggccatagccctatccaaccgagctttaatgactttccggacccgtcgtcccgtaactccacaactccgtcgtcccacccatgagaaaagattgtcatgggatggaatttcaatcatcccgcaattttcgatcatacatcggaaaggaaggaaagaagattcggaccaacttttgcctccctttttctcatggttcccggtgatttcattgaaatctcctatcatgaaccatggatctgaacgaataataccaatacgggtcaaccgttcccaaactagttcccgatattggacattcgggtcgccataaacaaaagtaatacaaacacggttaccatcaataatagtctcaatatcaataagctgatcattaagaaaaacaaccgtaaccggaaattcattagagtacaatagagctaatccaccactgttacctatagggtcaacagtttggagacaatcaaagcctagagatacttgcatattctgaagatacaaaagatcatttttagtttccgataaaaaaagaaaacccggagaatacatgcgacacatgtcctccacgctaagatcctcatgggttagtgtcggggggttccatggaccccaccgagccaccaatagaccccggagatttgactttggatgacgggaagatgcttgaacgaggagccgaagacggacgtttagcagctcttgacttggaagccccacctttgagcaagagacgcttactcggagaacgtcctttgacattttgtatcttttttgaagctagattcaccaaaaggcccaaagaggactggactttaccagaagtagtattacccttgcgagaatgggtttcggccctcttcttttttactcccttttttggcccaccgagagtagaaacaaaatctatttccaaagagagaagcccatctagggacagaagctgatctctgttctccacatcaccgccgttctcagtcgctccttcaagaactttggacggagtcggacgctgcgtggaagcgagggagatcgacgactgcgtctccaaacgttctagagaagaaacatgggactcaattctcagagtgttttttcctgccacatcttcttcccccgtggtgaacggaggttccagagcgtgataggcagcctcatcctcggccgtccagtctaggttaagcgcctccgagagaggattgaggttcttatcccattcggcttgaggggagccaccagagaggggaggagagtgggattgccggtcagggagagcagggacatcaacaactgggcttgcaaaggagacgacctgagaaaacttcgccgctaatatcgtgtccggtcctgcacctaaagcccgggcattggcttcatcttcttccaccttcatctcgtaccagctcagacgcttaccaggtggggaagggacttgcacaacatgatttacagaacttggggtagttgtgatcttcgatgaaggatctagatcgaaattaagagatttcttggcagaggggctagaccccggagtcgtgtctccgagagacatgggaggatcccccactttgccctttcctttttctgaagcagagtgcttcttagataggtttaggcggaaaggtctttccctgacataagccggggaagaggttctctgttttgctcttgagggagccaggagggggtccgagattgttatctgcgagtcagagaggtgaggtgaggatcgcagctcaccagggatggtggaaggtgggagcgaggaggagggaactacacgcgccaggtcctgatttcctttagatggcttttccacaatcttctcctgagagaaagagacaccataacgtcgcttacgaccttcagggggagacgagcgtcgtacagagccagaagcccggttaggcggtggagcccggtccgtaggcagacgtcgagaggaaggaggatgaggatggcgccgggagcgagagccaccaaagcgggaagaagacttggacaggggaggattgttcgccgccaaacgattgggtccgtaagacggattggactttcagatttgaggaccttcagggagagacacaacccgctcaccagggccgttacgaggaaccactgttcctccttgactgagagagagagactaggaacgaccatcaactgatccgtcgagatgactatgtctctgatcctctgccattagagccactcgctgattttcatcgaggaggggacactggtcaagttcgtgacagatccggcgacagtaggtacaccatcaaaagagcttttcataaaatagttttactttaactacttcaccatttgggagttgagcattcttattaaacctgaaagggacgtctgccttaacagagatttggagtcttccttttgaagagtcaactcgcctaactgctccaatggaagcaccaaaatttctcagcacttcctcctcccagaattcagtagggattccttcagttttgatccagaaggtcatcgtatcagggaaggaaatgccaatgtgggacttccatctttccagcgcaaaggaccacttactgaagtggcaaggtctcttattaaggaccttctgaagatcagtctcagattcaaagaagaattggaaccgggaatctccaagagaaactccccggaccctcccttcgacatcccatatatttgggagaaaagagagcaaagcttcagtactccgaccaccttgatgaaacattctaccaaccaagctaagttgaagacgacctaggagagccgaattgtcaacttgaggaaggatgacaacgtcatcatcttcttccggcacaaaggcatacgggagctgttttgggggagaatccctgtaccaacttggtctcattctcttagacatggaaatagaacgagagataagggagtcatgaggaagaggcttaagagatagagaacgaaagaacaccacactgctcaagcaggaaaagttcagtaaaagcttaattccttcggacaagaaacgagctgttcgtgaccacaacagagagaagcaaagactgaaaaaatttcgcttgtgataggagagaactgtctatcacagaaagttgatgcaagtatacatataagaagacgctaaaccctccattacaaggctcgaggactgcaaagttcatggaagggtaagaaaagtttctcaaaatagctaaaagaagaagtcaagatctactttttttgacaaacattgccaatttcagacacctcgagaagagtgcatgagagagtttttttagcatctgtcaccaaatttatgtcttattaattattattgtcctctatgtacatcttttttaaaccaacatccaattgttaatgatggttaagtctttcatttatcagacaacagaagaaagccaagtacaatacctttatgaactttaccttaatgataactagagggagacatgtccgttggacgggtttgttttttaataacttttgtaggcattattataattattttgttttcaataaatcgagtatatataaagagaatgtttattgttttttattcaaatttagtaaactcaagttttatcagttgactttataagtcaaactagattttaacccgcggtataccgcgggatgatttatttttaaaaagtaatatatattaaaacttgcaaatttatttttataaaatatttatattttacaatttataattgttattaagtaacgctataccacgaatccattagacaattattaaaaaactgaagttttaaccctattaaaacagcatattaataatattttaaaattttataaatattgattcaaatacatccaccatataacttaattccaaaataaaactcgttctgtaatttctttacccgtcccgtgattttttaattaaaggagtaattttaaaaatttaagaattatctattatatataaaagttttgcaaattgtatcattctctaatacatttatattttatagtttaattttatatatagtaacattatacataccacgtaacatttttggttttatataatcttttctaaattaggatgatttgatatatttaatattagtggtcttaaaaaataataaattaaaaatttaacccgtattgaaacggtggattaattagattttatttttttattaatgttgattcaaaaacccgtccctccaaatccgtcttgtcaaaaatccatttattttattaatattaattttatttatgatatgactctaaattataatctaaacattttagctaataacataggagtgcaccatatttatttaataggagaatgtactatatgacccgaatgcacttttacccaaatccaccaaaaaagtcttgcaaaaatactatagacccgaatgtaccattttttttttgtgctaatttttttgtgattaagatttaattgatttcgtatataaaatattaaattcttttacgaacttatttgtttataatttggtaacagatagatatttgaatattcggtatattttgcttcagtttaggaaatctttgatgacccgtctttaaatccaataagccctataattaagagatgaatattgtcgttaaatgattttggtaatcttaatgatgtcattaaatgattttatttttgattaaaattttctaatggcattttatgtaattaattataaaaattaaggttacatttaaaatgtacttcccaaataatatagtaggattatacccattaaattttttatgagttaatgggtataagttgacttaataaaaatgagtcagttaatgcaaagtttggtacccctctgttttatattagtttttgtttaagaagttaaattatgttttatattagttgtcgtttttggtttccaacacaaatgtttgacatatttttctaattttatccctatttttaaccttatttactgatgatatcaagtaaaacaatacatttattaggggtaaaacaaaaaaaaattgaataattttttaatactcgtgaaaaaccttaaacgacaattaattttaaatggagggatataattaccaatctaaatgacttaattgtgttttaaatgcagttaattttgtttcaatgtaagaatttttttagaaaggttaaaggttccataaatgtgtgaaacgttttgattgtatgagtgagttgaatgagttcattgtatagttaagatgattaaaattaaaaagattttcttaaaaaataaataaaacattctacatcattctaattatttagaggtgtttgcttgttggaagaaactctatatagcagtaacaaactatacttcagttagtttcttataatcatcaaagttacagaacatcaacatcagacatgttaccattgttctgccaagaaagtcaagtccctatggtttcaaaatgcatctagagaatttgttcggaatgcctttacaaaggtaatcttttttgattctaccttttaaatttgtaatgactattttactcttatttgaaaaaaaaataaggttatcaaaataaaataatgattattcccgccaaaaatattccaacgataattttttggccaaaaaatccgacaaaaaatttctcgccaaattgtttttttcaaaatatcattttccccaaaaaaaatagttttggtgggaaatagatttacaaggattttaaaaagagttttaagggacttacaagggtttcaaaggattttaaaacatttgtaattccttttcaaactcttttaaaactcattaagaactcttgtaaatctttaaaaaaaccttttataagtcttcacaagagttttaaaatggttcaaaaagatttataaatattttaatatttacaaatatattttttaagagttgaaaaataatttacaaatggttttaaagactttataatagttttagaaggatttacaactattaaaaaacttttgtaaatcattttaaaaccttttacaatggtttttaaaaggatttacaactatttaaaaacttttgtaaatcatttttaaaccttttacaaagatttttaaatatgtacaaggatttgaaaataatgacaaagactttataaggattttaagaggttttaaaataatttacaagtattttaaaaaaatttaaaaagactttgaaaggctttaaaaaatttacaaagatttttaagagtttaaaaaggatttataaggatttttagatacaaaagtttggtggaaaatcttttgacggatgaccatgcgagaaaatttcagtttcttattacatgttatcattagataaataataatttaatcatcttgttcataaaaagaggtttaaaaataggttatggaaaaagatatttttggaaaaaggtattaaaaagggtatttttacaaatacccatgcatctatctatatttacatttttgaagtacaaatatgaaataaatcattgaaatgagacttatttacaagggaatggcattttcataaatatttctatattaactaatatttaaaattattttcgaaaaaatattttataaaccatgacttccaaagatagtaacaaattgattgtttctaaatttgattaattactaattttctaaaacctttttatctaatttaaacattaatttatgattcttttttcacttatacattctcttatatttaatttattttgaatataagtaaaatatatataattaagaaaataatagatttttttcctccttatgacgtggttcagttttttttaaaaacaaacatagattactcaattgatgataaaaaatatgtgtacaatgtcccacattgctttaacaattagacaatgattgtcatttaccgagattgattgaccgagacaataattagacaattagacaatgtgtacaatgtcccacattgcttgaccgagcagagcgcggactatttacacttttataataatcaaactcaaattaaattataaatttatcgaatgataatttttacacgttttaggttccagtgtaacagtataagagcatctcaaactcacttctatttttgcttctatactatattttagagtaaattttactccaacgcacttctattctcacctctaaatagagatctctatttttatctctatatatagaagatctatattttttttactatatctagagtcaaactttattatttgtaaaatggtcctttaactttatttttcttttatatctgatttaaataaataaactaataatttggactgattttagaggttttagtttaaatatctattctaatatttgaggccattattattattatttttatttttgtttatatgtgtaattcaaaaagataaataactaatatataaatgtgtaatagactaatgcatttacttataatcaaatggatggcaaaaagatgacatcctaaaaagagaatttacataaaatagagggttttattgtaagtaactcgctatctttcggttatcttcggtttgtaatttttcatgatcttcttcgacttgtagatttaagttttgaattcgttcaccagaattcagaacttgatactgatcaattgaattttcactcatcaatttgcaacgatttgatctacggaggcttgacgaggtggattggagccagaggaagggcggatcatctcgaagtagaagatctcgattttggatcgctcggaaaactgatcaaatggaggagaaaaacggatcatcagaggtagagatcggagagaaagacgaaacgaagaagcaatcaaaggatcttgagttcttaagctgtatgatgcagccaaaaacagctgattcagatccacactacatcggaatccgccggattcttcttcatcggaaagctgattctggcgttatctctcgccgttatgtgagcatcgatttaagctttcaattacttgtttcttatagagcttgttgttgatttttgtgtttccattgaaggattggagatgcaatggaaaaggatatgttgcttatcgtaatttcattagcaaacctagaaaatgggagaatctgcgaacgcctagtctcttaagtagtccaggaaacaggttttagatccttattttacttgttttccagtatacaattctgtgtgtttttggttgcttatacaattctgacgtcaggttaatttactggttgatgcttcagtggtcgatggttaccttctccaagtcctctctcgcatcaatttgaagctgaaagctttacttctagtagagtaagtagaatttcatcacttctttatcaatggactttgttttgttctgcaatttaatttattcaggtgtttgttgttcctaggatttaaggagtgtgaatcaggtttcaagtcgtagagcgagttttagctcaagtttgagtgatggtgataattcatatcgtcgtggtggtgttgaacatgcttattcttttgttggaatgcattgcatcttcgatcaatgcaaatcttctggtaattttttatattattgtttatgtttcgtcgattcgctttgtggtttttgttctaagagtgagtatgtctaactttatgcagttactgttctcaagtttggtcatatgagttctgatatacttgcatatggagcatcagatggaagcttaacagtttgtagtctcttagaagagccttctgtcctcaagcagttgacaggtcactctaaagatgtcacaggttcgattgactggtactgttacttttgtcttttctgtatctcagtatctgctacactgaattgctcttgaataatctgagaatatgatgatacatggtacctactttctatgctttgttaggggtaagatttgagtggaaaatgtaaaagaattatctgtaatggatagagcataagtgtgtatgtatgtcattgggtttagatcctatgtctaatattaatacaaacttcttatcagattttgacttctcgtcaaacaatcaatacatcgcgtcatcatcacttgataagacaatacgagtatgggagttgtcaagaggcgtttgtattagagttatatatggaatctctccacagtattgtatccgtttccaccctgtaagtttgatgttcttcatcatcttttttttttttttttttgtcaaagatgttcttcatcatctatatatttctcccttgtaacaacttgcaactttttgttttgattgtgaaagtcgtctcatataagatactgagtgcggatggtttttgttgttttctcttgcttctccattgaagatatttcatttccatattttcaacaggttaataacaatttcctctctgctggcaatgcaaacaaggaactcacggtaacttcactactccttgtagctaagtacattagtgtattgcttttttcgtttgttttctaattgtttacttattttatgcctaacatctctctgcttgacaaagtaggtgttcaatttcagcactgggagaattattaaaaaactgttgtttgaggatgaggtgacatctatggaccatgatcacactggccaaataattttctgtggagatgggcaggtaacttttctatactgatgtaaaaagataaaaactagggagatggtctgttatggttatggttggctataccgattacctatgttgtggtcaagactgatcaatttttgcatttgttcggtatgctagaaaaaggcatttctacattgtttttacaaggtagttaataataattgcagggaactgtatattcagtaagcatggattcgcatacagggtcattatcccggtctcatcgtcatcgtacaaatcacaaatctcctgtcaccactgtgaagtacagaagcttctccctcctggcatcaggccctgttctgctcacatgtactcaggacggaaacttgagtttctttaggtttggcgacagaactacttcttttttttctttcttgtttttccttaagagatccttttttttttttttttttttgtcaaggtccttagagatccttataattgatttttctgctttgtgttggtgatgcagtgttgcccttcagataaaaggttatttgactttgcgttgctccctcaaattagccccgcgaatacacagaatccaagcatcgttttgcccgctattatcactagagaaaggagaatacataggtttgaatttcaatccttcatttacctatagttttggtaatagtagattcataggtctcttgagaagtgcaagtcattttctccgcgtttcttcttgtttgaaactacagttgctggaagcgaagactcgaatgtctacttctatgatctaaccaaaccgaagcacacatgtgtaaacaagctacaggttagacaataacttcttttctttttttttatctgaaacttttgtgtatggattttgaattataggaaacaggattcacgagttgtgagaaatggatgcttgcagggtcacaggtttccagtaatgtgtgttgcgtggaaccatggggagaacttgttggcttcgtctgatttctatggtgttgtcattgtatggaaaagagcaaagacaagctcataaggtttgtctataatattataaatgaatctaaatccgtcatttttgccacaaaggctttgggtttggcatcatctctgtatcgctaatctcaaaactgtgtcaatttagtttcccatctcttataaagatatagttctgtgacactcctatgcacagattcaatagcttaaatggttggaacagacacgtccttaatgagttaataactctttccatagataagttggtagacaatttgaagagatcaagttaattgtactcgcaatgttttttgttttgtcacattatcatgaaccagattaattatcagtaaaattaatgaagattacataaacaacattccattgtagtctagttggtcaagatactcagctctcacccaagagacccaggttcaacaagttccggcaagctggttcatctaattcttcaggggaccaaatggaatatgatacttggttctcttagagaaatgtggctctaggattatattgaattcaaattatgtaactgatgagcatttggtgcttatattagtgtggaagtggttggactagataatcatgctaataattaaacgtatttcaaccagcaaaaagaatccgagtgttttgtgtattaattcttttactaaaagcaatagaatctcaacttcaacgtaagtagggcactaataaaaacttaacatttacaattctcttatttcccaagcaaatatcttcggcgtcatgttcatattggattaataataataagaagaagggttggttggtcgtcgtatattatgaagacactcttccctatccactgactctatctgtccattgtccaggtctctctctctctttctccttctgccatctctgtcccaattcagacttctttctcttcgctacccatcatttcacgttcttcacttatccaccccaatttactatttttattttcttttcaagtttttattctcatattttgaagtgtaaatttaaataaaatgcttacctatgttttcccacaaaattaactcttgtgtatttcgtaattttttttttcatagaaaataactaaatcacttaattcacaaaaagtctattttggtctctccatgcaaaaactataacctttcagtgtgttggtaagaaaaggtggtaccaccattttctatcacactaagatatctcaccacacattttaatttgacttacctcttaccaccatttcgtaccaccttatactacaaatcagacttattataaaatgtcttggagttgggattttctcaatttgtttctgattcgtaatcgtaaagtcctccatgacaagatatggacctacacttagtgaaaagaaagtaaaagttagaaaatttgtagaaatacctaaaatctgtgggcacaaaaagacaaagctaagtggggaaaaaggccacttattcattatttatgagaaagagataagaatatgaagtgttttttttttgtttattccttgcaaaaatagttgtatgcaaatgcaactatatagtaaatagcatgtggaccatcacagatattattcgaaagaacaaaaaaaaatcaaatgttgaaacttgaaagtgaaatttaaagacaaagaagaagaaactgtaaaaagcttaccaaaaaagtgaaattattttattgaaaagaagttgaaaaaaaacatccgtgtgtaaactttgacacgtcgttacccaaattattccccactctaataaagatggactagtctacacaaaaattaatattatctttgattacaaatcggacatgaaatatttaaaaaattgcatagcaccaaaattagatatgaaaaacgttcattatatatttgtcttattctccaaatatgcttgataaacacattattatagaagaattacgaaaatatcttttactattgacaccaatcaggaatatatcaaatatttttagataagaatataaaaaacacagaaaatgattgtatggtggttatagcttcattcaattttattgcagcaaacaaacagaaaggccagagagacgaaagagagaggcattagggtttaggattaggttttagaaaagggtttagatctctaccaactggtttgttaagaacataatctccttaccacatttttactcttgaaaacattttgatctgtttttgttatcttcaccaaaagacttgactccaagaaacaagaagaagaatcaagaagcaagttcaagaaccagcttttaatgaaatctctacttcaaaaaggaaacttgctttaaggaggatggatcttttgttttcttgaatcttttgtgtgggtaaaacattttgtattatcaagattttgatttgaggagataaagagtttgttgttaagtttgtgttcttgggatcatcaagagttaaaacaaaaaaaaaaaaacatttcttttttccttcttcaatttgagatttagtgtctcctttaacacccacaaagccagcagatgctttcctggtaattctttaatctatcctttcttcttctttttaaattcttaaattcatgcagagagataattctcataattttcattggttcaatttcttaaaatttgcttaattaagattttattacataatgtgaagtataaaaagggtttagtgttgtttgtgtttgattctgaaacagatgactccttgtttgatctgatcataagaagaagaagactatggccacttattacaaaactggctcaagtgagatttattccagaccagaatttgtccctggaaacgcaatgaactacacaaattctttcacagagacatttcctagagattcaactaataatgtgtcaccttcaaaagagattcaagtgttgtcaagccttggtggagtttcacaaatggttgagattcaagattctggttcttggagagatcaagaagacaatgacaggaatcgcttcccggtgatgaggcgtcttggcctcagctcgcagattgagacatcgagaggcaataataacaatgagtatgcaacacaggttgtttcgggatttactcgaaccattcacaactcaaagtatctcaaagctgctcaagagcttcttgatgaaactgttaatgttaagaaagctctaaagcagtttcagccagagggagataagattaatgaagtgaaagagaagaatcttcagacgaatactgctgaaatccctcaagcagagaggcaagaattgcagagcaagttgtcgaaacttttatcgatattagacgaggtaatccgccttacaacatatcttctacacttgttaatgattctcgtggtaacataaatgttgtttgtttctttgttgtttgaaggtggatagaaattacaagcagtattaccatcagatgcagatagtcgtgtcgtctttcgatgtaatagccggatgtggagcagccaaaccatacacagcccttgcgcttcagaccatctcgaggcatttccgttgcttaagggatgcgatatccggacaaatcttggtgataaggaaaagtttaggaggggaacaggatggatcagatgggagaggagtggggataagcaggttaaggaatgttgatcaacaggtaaggcaacaaagagcgttgcagcggttaggtgtgatgcaacctcacacttggcggcctcaacgcggtttaccagattcttctgttttggttctccgtgcttggctatttgagcatttcctccacccgtaagtctctctactactcttgtgaattttttgattgaccacaagagactctgaccatttgtttcaaaaccttgagcttagttatccaaaggattcagacaagatcatgctcgctagacaaacggggttgagccgaggccaggtattgcactgttagcttttgtgccgtttctctcatttaatacttttctttctggtgtgttcatttttcattgtttcgtttgatgattgttgaaaggtatcgaactggttcataaatgcgcgtgtgcgtctctggaaaccgatggtggaggagatgtacaaggaggaattcacagatgcattgcaggagaatgatcccaaccagtcttctgaaaacacaccagaaatcaccgagattcaagagctgcaaactgagtctagttccaacaatgggcatgtacctggtgtggcaagcagtagcatgagacaaaacacagtggcccatggtggtgaccggttcatgatggtgactgacatgacaagaaatggtaatggtgggatgtctttaacgttggggattcagaattccgatgctcgtggcgatgttcctatgtccggtgggatagataactacaagaataccatctcgggaaccgatctacagtacttaaactctcgcaaccaccagcaccagattggctcttcacaattgttgcatgattttgtagcttgaggagaatagaaaggtgtagaaatggattcttttgtgaaagtaaacccaaaaaacgaaattgtagattaatgagaaaacatgaggagacaatctgagattagacacgatctgtttcatatttaaacatgaggagacctaattatatggttagaggtacatgagatcaaatgttttgacattaaaattacacttaaaatgctaacaatcattcagaaaattcaaaaggatctacccgaagttatcttattgacaggtttctaaaacctaagcatgtccaaaaagcggaagcacaagtttctgtctgcgtttacctgaaaaaagaagcattaaggaagttcaataacagagaaatgtgagttgaagagttatgtgtggatctgatctaaactgattttaccttttgtagagaactcttatgtcttctcttaaggcaggactttcgaggaacgtatcaccagcttcatccacatcgatcgtctctacctcaaagttttgatatccgcagtactcgttccactcgaaccacatctttgagatgacttcctttttgaaacaagtgttgtgatcctcttcctcaggtgatgacccagcaatcaatctatatgcatgcaccatcttcttttgtccgggtcgaaacgctcgcccaatagcttggcgggtcacagaagggtttaggggaacatccaatattagtatgcgagatgctccaacaagcgagataccttctccacatgcttttatcgaaccaaagaatattttggcgtctggcgaactgttaaacgtttccattgaccactcacgctgctcagaactggtattgcctgtaagaacaaaaacttctttccctagtttccatcccttagctaaagcagctagtctttcaagaaactttagtggaatgagatactggctgaaaaccaagagcttttcaccagctgagtcgcacaggtttatcaagttaaggaagaactttgctttgacgccttcattcaaatctagcttctctaccatttcgtccatagttgtatcagaaacatcatcagacttgtcagagaaaactttcagcttcgggtgaaggtaaattgcacttcccacagccgaaaccttaaattttctcttctcacgtcttaacttcttcacttcgttcaactgctttggagacagattaagaaccacagtgaaatcagcaagtccaggaagctcatctaggaaatctcctttatagtaatgaagcactttctttgtcatctcccgcaaatcttggattactttaattttcactgtgaaatcctcgctcttctgcagggtgtgctccacagtttcattgaacattgaagccatatctgaattacttccagtaagtctccccctgacatcgcatggagtataagccaagattctcttcacagcagatttggaggtatccaatttgaggaatttgggtcgaacaaggttcagaatgttgaaaacctcctttacatggttctgataaagcgttcctgagaggacaacttttcttggtgtttggacttgggcaagtgactgcaataaatttgtgtcctcattccttggagtgtgtccttcatccaaaatgaggatcgaaggtaccttgagcagtatctcctggcaagaaagtgagtcggttgtatcatcacacacaatagttgagaactgctggtacccaagaaataagatactcttcttctccatccactgtttcaaaatagacagctgctgtgcccggttctctgctttagcactatagaaatcaagcagtggtatgtcctcaacttgccatctcacgaactcttttttccaagtaggcagaataccttttgggagaacaaccaatggcttagcctgaggatactttgcaagaaagctctgcataaaactgatgatcatgaaggtttttccagagcctggagcatgagccatgatacagccaccaggatcgtcagccactaaattgctgcaaaggaactgaaatccctcaatttgatgaggcttcatttcggcagcatgcgttggatgagcagcaagtccacctatcatcaacccttcttcagaaaacttaagttcattatcagattcgccaaaccttttagttctagtttcagaggcatatgttcttgtgtttcgttttgcctacagtgaaagttacaagaaaaattagaagctccgccaaactctgacttgggaaacaatttcaagatcatatggatattacaggtttcataacaatttgataacaaaatttaaaaccctaggcataatggaggtaatgaaaatagaccacatgtatgaagaactcctaccctattgtattcagacaacaaaatttgtcgagtaagaaacatacttttccctgaaagcacaaattagcgtagtatcagaaaataggatacttactttagtgaattgcacatcaattatctctagtatacttttctcaataactccgcagacacggcaaacataacccatatcgtcctttagaataaatgagtgctcacaatcttccactacatctgccttttccttatgtgaagtctcccttgctacatcctgtacatttattggaatcagaaatgaataaagcaggaaaagaggcaaaaaataagatcaaatttaaggagctaagttcttaaatgagctttctactaaatatctcaaatgcaagaaatctaagaggtgcaacatcaagccctaggagcactatagtgacagaaaagagtacagaaccctcttcacgaaaatgataactcaatctgattaatgcatacgtagagtccataccaaccgatttgtcaaacagaaactctatcaaccaaaaagaaagggagaaaaacacaaataattaaacttgagtttcttcacaattgagtattacggcaagaggtaacataacacaagattgttttgttcatttcttgaacgactgaaatttcaattccatctgaagtaactgttcagacatatataccttggaacactctattgacaaggccatttcattccagatattaccaagatcttcatctgctgcttcagactcattatcactgtcatcctcctcaacgcccacgtagacacctttctcattaaccacaccattttctataggaaggactttgcctctacttgtttgtccctcctgacaaaattacaaataaacaaaaaaataaacctcttgtatggctagctagtttgtaaatacaggtgacattgatttgtaacctagcttgaaagaaaaacagaacttacaacaatggctttaatggcagaaggcatctccttgcccctccctaaatcgacctcctcgaaagagcattgcggtattaatggagtcacatccccttgattcttctgatgctgtacaagagtagactgaaactgatacataggcctctgcctctcattgtcttcatcatcagaatcaagaagcacaatctcagacgacgaaggaacaacacagagagctttcttctccacatcagtatcatcatcatcatcatcatccaaattaataacaccttccacaacctgttgattatccatcgtcttctcagcttcaaacacggtatacgctagcgacgggtataaccaaatagaacgcttaaccaaatccatcctcatatcagctatctcttccaactctttactaacactcccaaatttaccactatctaaagcttcaagcatgttactaactgcaaatgggttagagtaatcaataactttggctgaactcttgacccgctttgcttcaggtccatcatcaacttgattttgctttcttttatgcacattcttatagtaccctgtcatcacaatgtaaacaaaacccatctgtcacattactctccaaataaacaaaaacaagaaagacaacaactttggcttcagaacattgcaaaattactcataatttcttcaaatatttggatcaactaacacaaaatcgggtttgggaacgacatgcatataatgtagtgacactaaaatcagaagaaagacctaatttttttcacagagagattcgtataccgtttgaggaagcttgatcggtctggagaatgtccattaaaccagtaaaggttgaaaatttcgagctgaattttggagaagatgatgtaaattggattctttttggtttgcctcgctcgctcgtgcttcgaagctgagagactctgactcgggaatttgaagcgattttaattgcgacccagactatagtccggtccatttaaacttttatgagaaaaacaaacttttgcataaaagccctttgaattacttccaattccaattgacatctttaacttttggatttgcataaaacccctcaagaggtgctattggtgccacaggtctaataccatcagtgctgataagagaaatcaataatgagagtgtttaatgaacaaaattgagagtaactaacagtttcaattctaagaattaaaacgaaaaatatctcatgtaaattgtctctcttttaaaaactcgtttcaactcttttttttacttgcgccatcgatatatctttcgaaggttaaacacattaatgtcatattaccatatttttgttcataattcattaactgtaactaagagagaggtgataagagtatgtaattatctaaattagtaaagggtcatagacaaaatgaatttgtaagaaagatgtatataagcatataattatattattccactctcattattaatgtctacttttatcaaatttcagaatgctttaaagattctatatgcatctttcttacaattttattttgtatgtgacttacgtaaaggtcattgaccaaaaacaaacattttttttatgttttgacttgaataataatacaaaattggtacaaacattgttatacgctatgattcatagcaaaaataatttggacaacacatgccctaaatggttgtatatagacgatgtcgtcttggttaaactatgtaataacacaattacccatttgtggagatgaaaacgtcacatatatgaatcaaggactatggtttagatgcatccgacgactctagtatatatatatatatatatacaactcttgaatataaatttattttgattattatttgaattttgattttctaacatgagagtttctcatggtgtttttagtttctactacatcaatctttggtgaggcaaagtttgatttttgattttctatcgtgaactatctctttggccatactagtgtcacctcgattgtgttgtatcaaacaaatgggaaggctttcttaattggtaattgacatatatcaaattagacttcaagtaagtccctcaaattaagagttcattataatacttaaggatcagattcacaaagttcttttgttcacacggaaagttcttagtgttgaaatcaaactaaacagaaaaattgttaactaaaacaagaaaaacaataaaattcgatgtaaattcatatagattaaaaatcgtcatgcctaaggaatttctcagaaaatatcataataatagatctagaggttgattagaaattattagcgaaccgttatagaactcaaatcacaaattttttactgttagactatctctgtctaatagtaagaattcaaattctcatatatatatatatatatatatatatacatataaataatattgcatgcaacataaatatatatttgaaaaccaaaaacaaagacacatgattgtgatgccatggatgtatggcaaaatgccaaaatctatgcagcacaccaaatataagagtatagcatagctcaagctagcttcttacctttatttatattacatctccaaatttcgatggaactatatagtcactgaaactaattctacctatatatgtatatattatttaaggatggattagaaccaattctaatgtcatcaattgggtataagcttgaaaggaggtctctcaagtctaggtgacggactgttgttcccataatcctttgtgttcattcttagaagcctctcatgctcatgcatgcttctttccaccatctgagtcacattatcatttaaccaaattcagctccaaaattatttattgaaagcaaaaaagatttattatgtattcaaatttagaaaatgtatgcttatttatgcacaaagttacatgaaacacattccccttcatatgttagttagactaacctcttcgcgaagatttatttttttatgaacaaaaatcgatggtcggcctgcataacaaaagaagtttatttgttacatctataagaaaaataggttacttaattgtacatacagtataactaaatcatgatcatcattgtttagtagtttctttacacaacgacaaactacaatattgatcatttctttctaacaaggactaaagattatacaattgtgatcatttctttctaacaaggactaaagaatttcttgcgcacatgaagtatagagaaaagctgcaacaaaacagaagagagtgggtgagagaagtgaaacctgcaaaggagacagaaagagcagaagctgaaacaatcatgaagatgaaaccaagtttcttcaccgttaatggtgacatacccataacttaattatctctccttggaattcttgtttttctcttggagaaaaattgagttctcaaatggtaagggagaaacaagacgccaaattagagagtttattgataactataatatatttatttgtgtagcattgtaaatatgattagacacataattgcaacttgacgattaatgcaaattaatgtcgtattatgctcttttgagatatttttaatatttcatgaaaatgggggagaaagaaaaagttgaaaggagaccactttcccgttgttgctttgttggccaccataagtctaaagaagttagttgttttgattttaatactccactagattttaaccattggtacaccgcgaagacaattcattttctaaaattaatatatataaaaatatataaattattttatagtttaccattgttactaagtaacgtcctgccaaacccgtccacaaaaaaaaactgtttattttattaatattgatgttatttataatatgtttatgaatcattgtcaaaatattttagtcgttgcgggacgttgaacccacacattttttgccaattggttaatatatgttcattcttaaaatttcgaatcataaaatatgacgaaatttgttttgagattttttaaaactctatatattatataatgatgttaattatttttgatagattaaactttttataaattcaaatattaataatgttttatgaagtttaaatatacaaataataatatttaaaaaattaatattttttgccttttaggtaataatataataactctaaaagcaaaaatttagaagatttaaatctttaaataaatattttcatgtctaaataattaatgtgaagtttatgctaattttaagggattgatgtgaagtttgtttgaattaaatttgattgataatgtgattgacaatttaaattaaaaatttaatgtaaaattaattattttggaaaaaacttttaatgctaatggcattgggttgtaaataagtccaactgtaggatttatttgctaaaatggctgccaaaatgtatatatagatgactccattgtttcaatttatttgtagtttaacccaaaaagtattgttgcgcaaaataaaggttattttatttttatatgcaacaattaaatgtattagtaattttgaccaataatattttactacatgttttctaattttatgaattagttgtaattaataatgttttataataaaaatgtaaattaaatgaaatttttgtgatttttaatctgtgtgtacgtaataataaagtacaaataaattgaaatagagagtactaagtttctttatttatgtgttttgataaaagataaaaataattttaaagtttttttcgaaattttttgttggtcaatgctaggcaacgctggagttaaccagtcggtgtaccggaattgtatgtctatggtgttaaccacataacgttttacagttcatatatgtggtcatgcaatacataaacttcgtgtagttggagatataatagtatatttcgcatgtgagaccatgtatactggtataattcgtatagctagtcatctttttcctaaaattaattacgatttaagcctaatatctaagcaatatttaatgtaaaaaaacacttataggaggacagcttcaagattataggttgttatttggatagttcattttaagattgattgatctcatagagcaaacgaagttgttctataaatcaagaaaaacaaaaaatcttgaaatactagtgtggtaatttgtcgagggcattttgaagatcaagttagaatattggatattgtggctgtttgcgtagccaaaaaacgaaaagaacaaacaaagtggtttgagctataagccgacggaatatagatggtggatcgaagaacgaccctcaaggatattaacgcccttgtgatgagacaacaaacctaagtctaagtgaatccaaagatacacataaatttaatggaataccagcagtgagaagaaatccaagaaagacaagtccaaagttaaaaagaaaactctgatttttattgataaagatttgaatcaaatgagacaaatagctaagcttataaagagctcgaactttgctaggatcaatggtcacaaaacgtaaaagggaaataagatttgcggatttttaaataaaactagtcgattgattgtttaatgatcagggcacaaaaaaaaacaagaggcacgcttggggcatctatggaagatcttgggggtcttcttttacacgtttttatgtgtgtttgaacgtgttcttgagtcaaaggagaagcctcttagttctctagaatctctcatgtcttgctcctcaatgtcccacttgaaattaactagtggttagctagtatttaaatgtatctagatccgacttaggaaagttgagatttgaggacatgcatgagcctctaaatgctcgttcggctaatgttttgaacacctctttatgaaaggaaacaaaccggccatttgttcgagcatatattgatttgggggtaattaagtcttcttcttttggttcggtaaaggatggaatgatcggagtaaactcttgtccggtcagcttctattcgtgtctcgtattgatgagctcattaattctccaccttatacatcagtgatatttcaaattaaattccaatccactttgtccatttgtgcatgaatacttcatgccactgatcactttggacatccatttgtttccatcatttgggacatctatttttttttcttcaaacatattaatttcatttttttttttttgtcatctgagtaatttatgagataaccaaaagctctgataactaatttatttaatcgaataatttgccaaaacattgcatagaaaaatgacatgggcaacttttctaaagtaagtttcaacaaatcgttaaacgttacagtgttgatagtcaaccgaataacctaagaatcatatttagaagagaagtgtggtttcaatcattcataaggacaaaataactttaccaaattcacaactttaagaggagagtggtggggaatataaagagaattcttatgtgaattaaatagtttagttatagtttaacctttataaaaggtatggaatattaatatgaataactcgattattatatgtgttcagtttgactaatcttccaactttttcttaaagtacacctgctctaataattggtcaatccctatgaaaaccaagtttaacttatttactgcattacccacccgcacaaaatattgtctaatttttacatatgccactagatgctaaagtacgtcataaacgagtttaagattttttttctttcttttcacgtatttttttcttttctggaaaataaaaaatcgaaaacaatgacagtaaaaactagcaaaaaaattaaggtaaaatctgaatcgttactttattgaatgtgttataaaaaaatttgttctcggtatacacgtgaataatatataaaaatattttaaatacatcaaaaataatataaaactttaaaataaaatattacgatatatctgacataaaaaaagttatttaataacttagatgcaagttaaaataatagaaaaatagaataataggaaagtagcataagttttacaaaattaaaagaaataaatctgtgagaacatttatttctatattaaatatctaaatagaaaaataatatgacacaagggtataaaactgtcaaatacaagttttaatccattttgttctttgttcaatgaatttaaattcttcattataatgttttttttgaatagcagaagattctggaacaaaactcgtaatctcataggtctgaaaccacaacatgtaatattagttttattctgatcgtcactcgaaccggcgatctctaaactttgcctaagatctttaccggttgatataacgacacttggtaaattctttactattattagtgttcacactataaacaattgttttttgataattattatattattactattttattttttgctaaagaatttttattctttgatttagtaagctggtggggtaaaaagtatggttaatagccatataataccaccatttatcttttattattttgccttaccgccacctcttatactattagtctggtggatctgaaaaaaaaaacaacaacaagttttaatttctgtaagtttctttgatgatgaagctctcatatttcctttcaagctattgaagatttattcatcaaaccttatattatctttatttatttatttcgtaatatatttcttatatattgattatgggtttgatagattaaggtgatcattaattgattcatcatatgtttagggttagattcatcatggaggatgcggttaatacttggtttgatctttctaatcataatctaagtcatgaaatggctaggccaactttagatgagttttgcataccctaccaacgagaattgatgattaaggtgtttagtgattttaatggatttcttttcaatgtttgttaatctcccagttgcaaaatgaaatttagcttaattaggtgatcataaagttatcgtgatccgtatatagcttctcaccctttcttatttgatcatctagagtttattttatgtttttctttgtcttatttaatcttattgttcaatagtcctttgttcaataatttgaattatttacttctttgtttactttttgtatgagtttaatttttctttgtttgttcgttattgccttttgtagtgatattcaaagatttcttcttgagcagctctctttggcatcgttgatagatatgaatctgtcatatgcatgttatattgatctgttaacggaaccatcatttgatatgacagatcttaattactcacgctggacaagtttctcataatccaatataaaacagaagttacatcatgattttaaaataaacacacaactttcgctcacacaccctagaatgcatatccctctctatgtgtcaatccttcttttttttcttatatagcatcattaacaataggttcttaaaaagttttaaaagcctcttaaaatactatataaaatcaaatatgaataaaaaattagaaaaggattcttaaaaatgtaaaattagctcttaactaaaagatttttgatacactctctcttcttattaaaaacctcttaatatttaattattattttgtacataaaaaatgtcaagaattctactaagaacccaccaataaagatggttaggctcttactagtgcgtcgacatctcaaacaacacccgaaatccatctcttgtgcaatcaccttgaacctaaaactttaattatcaaaaacctcttcttatattactcactagctaaaaatttctcatcctagtttattctcagtcactcacaaactttgcatatcttcactcaaaagtaaatagtttcaagaacaattatgttgcatcaaactattttgttaaggacagttagagcaaccttaatggtaggctcttaattttgaatcttaactattttatgaattattttattgaaaaaattgtaactaagaacttttgtaatggtttgaagctcttaaaccttcttttatctcttagctaaggaactcttcttaactattcacatattctcctgattatattaggcctaagaatctaagatttatagtaagagacttgcaataagaatggtcttagaaattgacaatcccaccacaaaagaatattgcacgagaacacccaaaaataagcactcttttttttgttttttttgcactctaaattgcaagagaacacctaaaacaaacctctagtggcgaaatccacttcttgtttaacaacaaagttatatacaaaaccgtacggattggagagtttagttcctctaagatgcatttctattcctcatttgtaagagaaacactctcttgcttttcatttgatattttcgcgggagatgataccgttgtttgcgaatttagaacctgaagaactgaaaagaaatatataacaaaatgtttagaaatatgtagacaagaatgtagtattaactatagaggctctcttaatgatttgtctcaccattctcttcttcttatttttcttctcaatatatgcaagaataccctgttggttaaccatcgtttcatccaaagcctaagccggaaaaaagaagaagccaaaccaatcattactacatattcgagtgatttgatgattgaggtaatatagaccttacctttttggtctcagataactcatgctcaagcacttgaacccggttcagcgcagcctgaagtttatcatctttctctaaagcttcatctgctgattttgagtcaagggacttgtacttttcttcaagctcggccatacgtttgaccataattacgtactcagagctagagactggtggtgctgaaacttcatcttggtttggcttagacatttttgcttcctcgtagtaaactgagttggtcaataatgcaacatcagtaagcttccttggaacggctttagatagccggagcattgcaacaattcccatcacaaaagcaataacccctcccacaagaaagctatcatctttcttttgtggctctttccctacgtaacaatgtaggaggcgtaaacagattggaattttagagcaatacatatatctgcagacttgagaattagtgtgagtagatttttataccttttcttagggtttttaaatgaggtttcggtggcaaagacagagccatgaacttgtcaaccgcgtcaatgtgcttctcactcacattctcttcgatggttttcatcttgtttctctctagaggctacaaatttaatgcatataaaagaatgcggttggtacttgattagatatcatggtgtaaacataatcttagcttacttcaaagaccatcgacattgatgttccttcttctacaagcaagtagtcttcctctgaaattgtcgagaatctggcttcagggttcctagctatctgctttccatagaacacacttatatttggtaagtggctcagaaaaacttttaaattaaaaaggtgctttaagctccaaagttgaccttaagaagctcaggatcattccatgggcctttgtcagatcgcaaacagccacctttgtctgcacaagtacaaaggccgccaaagaaatatggcaactcgctaaaacaaaaaacgagattacgatgatttttgtataaaattagttataatacaaagcaagatatatcattgagttaaggactagaatcttacctagcgtctatggcttcgagcaatttgggttggtatttgttcccaagaacatgaatctttgatgtcgtttttggatcgaggaactttttaattggagcccacaagagccggaatccaggaccagcattgatgatgaacattctgttcaaagtctatgaagaataatttatttacaacgttgttacttgttactatacctacgagtaataagctttttgaggttaaactacctcagggtaattgtcattatcgatcttgagaaggcgctgaagcagctctctcgcggatttgttgaagttcttaagcccctagtaattgaaaaatgacacatcgttttaaacattttttcatatttatacattttcgaaagaagaattgaggtagaaaaatgtgacaaaccactccttggacatcaaaaatggttgtgctttggtcaatgtgcttcttggctgcggcagagcaagaagggaacttgatcttaaacatcttctcgaactctttcacatggtatttctcataccggtccattgtagtcgcttgtaacagcttgtttgcatcgatttgacctaatctctcaatgtaaaccggcctgccttctttgtccactccatggtaaccttgcggataatgtttgagtacttgatcgatctcttcaaactcgaaatccttcattattaaaaaaattataaaccaaacaaatcactcgtcaaagattgtgtatatataaatgatcagtctaagatgttccaagattcttggacaaaaagttaacctcaatgattgtatcgactccgaaatccatcctccattgaagcatgtcactccacatttgctttgctttctctttgtcaaattttctcgcccttaagaatctatgtagagattaaacataataaatcataatattacaatcgcaataatcatctacaacaagtaacatttagctgtaaactcatcatgaattatggatttatatgaaagtgtaaaacatttattgattcgcttgtaagagatgaacaatttttttttttaagatatgaagatttaatgaaatgttataatgttaagacaaccaaatttttggtcatctattaaaccagctcctcatcaaataaaatattcgtttggattggtataatttttccattagttgacttcatgatattttatttcataccacaacacatcatttgacctagtagggatcttaaagaaaaatataaaaacctgagcatcatgtgaagatcatcgtgtttggggggcaaaaggtcgtcaaggacgaggacttgacggaacgcttccacggacagataatcgtccccgttgatgtcgtctgtattggctacggacacaattttgctgctggtcctccgagtcttcttcttgaaagagttcttgaatctatttgatgcgcttatcgctttctgtttaagcgagctcatcttcactagcttccttccatcctctgaattctccatatctaaaccacacatgattggtttacattaacattttaggcaagaggaaaaattgtatcaatggctagttaaggtaaatgcattgacttataaccttgtttggtgtcagccatggtttagacttttgatgaaacacctaaaagatgattaagattgtttaagaaataagattgaggaaaagagaagcaaaaccagtgtttttttttccttaccttattggagatgagttcttgagaggaaggaagggtgaaagatggtaatggtgaggatcatctgaaactaattaagacatgtagaaaagtacttgaatgtcattttaacaagctattgataaggtccaaaggtggttttgttcttttttttgttttttacaattggtttgttcttaatatatggaaatggacatgtgtgtgatataatattgaaatatatcaaaatcgattcgtatctgtaccaataaatgctataattaatagaaaagagtatgacgccaatttggactaagtgcagcccaccactttacagatgaaaacatagtttacatgaccaaattatcatcttaatcactttacagatgaaaacatattttacatgaccaaattatcatcataagaaaacatattacacaatggttttacatgacgaaattatcatcagttcggtttggatcgatttcttttgattctggataattagtttaaaagattgaggatcaatggttttacatgaccaaattatcatcagttcggtttggatcggtttcttttgattctggataattagttcaaaagattgaagatctatttaggtattttagaattttggtttatattatgttcggtgccttttcggttcgtgtcaatttagatttgaactagacttcccaatttaactaaattttaatataataaccaaatatttcgattttaaaattaataaccgaattaaccaaaaactacaccgataatttaatcggttattttttgtaaaaatttcagtttctgaaatacttgagaaaccaaacttacctatcccgaaaaagcggaataccccataatcacatgcctagtctgtaatttctctccgaaaacttgtcatttacttaaatcattcaaaaatctactattattttgaaaagagggaatagtaacatataaatatgagaaagtccatattaattagtaagttcaacatacataattaaagaaatctatgttcaaaacaaaaaagattgaaataactattggtctatctaaaaccatggttcgcacttcgcagtagtggatagtgtccggatagtggtcttacctttaaaacccgacccttactttcgatcttctattttagtttgatagagacacgtccgtctactttaagcgttttacgaatcggcgtttccctcttttctcccccgcttatcttctcttcctgtccttttcaactccgtgactaaaaaaaaaaaaaaagtaacctttacctacttttcttctgggttttcgataatctcttttgggtatttgcaaacccctcaaagattcttcctttctcctttaaatcggtcagtactgatctcttctccatacccttttgctatttgtttcaaatttcgattctttgattgttttggatagtttaattcatatgaatctgactcttgtgtttgattttcacagtctctgctttggctttgtactagccatcgcaattcatcatcatctattgcaagtatctccaaggttttgatttccacaatggcaacaactactctcaatgacagtgtcaccactacacttgcttcagagcctcaaaggacttaccaagttgttgttgctgcaactaaagaaatgggtattggtaaagatgggaaattgccatggaatttgccaacagatctcaagttctttaaagacattactttgaccacttcagattcctctaagaaaaatgctgttgtgatgggtagaaagacttgggagtctattcccattaagtataggccgctttcgggtcggcttaacgttgttctaactcgttctggtgggtttgatatagccaacactgagaatgttgtcacttgtagtagtgtagattctgctcttgatttgttagctgcgccgccgtattgtttatctattgagagggtttttgttataggaggtggtgacatattgaggtaatggttgttgattttcatttattatcccttttggtgattcggaatcttgttgttggttggaactaagtgttggttggttgtatttgtgtagggaagcattgaataggcctagttgtgatgctatccatttaactgagattgatacaagtgttgactgtgatacgtttatacctgcgattgatacttctgtttatcagccttggtcttcatcgtttccagtaactgaaaatggacttcggttttgcttcacgacttttgtccgtgtaaagagttctgctgatgaatcttctgatgaaagcaatgggtcacagtctcttcaatttgatgggaagaagtttttgtttcttcctaagatggtttttgatcagcatgaggagtttctgtatttgaatatggttgaagatattatctctaatggcaatgtgaagaatgataggaccgggactggtacattatcaaaatttggttgccaggtgatataaatccgtttctttatgtattctgtttatctctagttggttaaatgatctcacatttccttggaacacagatgaaattcaatttacgcagaagttttccacttctgacaacaaaggtatgctcactttttccttaactttccacgtttactcgcaaaaggagaatgctttgtcttctgttgtatttagtggcagttgcatatctacactagctcatattcaaactcacgcaatctgtttgcttttttttggtagcgagttttctggagaggtgttgttgaggaacttctatggttcataagcggttcaaccaatgcaaaagtaaattaagccagagtgtctctgctatgctctaaaactatgcaaatgaattggttatatctatgatagactttatacatgggcaggtccttcaggaaaaaggtatccatatatgggatgggaatgcgtcaagagagtatctcgatgggtaatatttgtaacctgcattatctttttggttaaagaaatattgatcttgacgacctatttgctgatttatccaccgtattttcagtatcggcctgacagagagagaggaaggcgaccttggacctgtatacggatttcaatggcgacactttggtgctaagtcagtaacttttcaatgcatatgttggttttttcttctctgttccgatggatttgttttggtgaaacatctttctcttgttttacaggtacacagatatgcatgctgattatactggtcaaggatttgatcaacttgtagatgtaattgacaaaatcaagaacaatcctgatgatcggcgtattataatgtcagcttggaatccttctgatcttaagctgatggcacttcctccatgccatatgtttgcacaagtaatgccactttatcttctaattctgttgtttctcctacaatgagtttgattactttttttttttttttgcagttttatgtggcagaaggggaactctcatgtcaaatgtatcagcgttcagcagatatgggccttggtgtgccgtttaacattgcttcttactctcttcttacttgcatgctggctcatgtgtgtgatcttgttcctggtgattttatccatgttcttggggatgctcatgtatacaaaactcacgtgaggcctctgcaagagcaacttctgaatcttccaaaaccctttcctgtaagtatatcgccgacaatgatcatcgaggaatgcatattcacctatccttaccgtgtttttgtttgtcgtcatgggctcactactgcaggtaatgaagataaacccggagaagaaacaaatcgattcttttgtggcttctgactttgacctcacaggctatgatcctcacaagaagatagaaatgaaaatggcggtttagttctcatctcttactataggatatgaccaaaaggagactaccgacaaattgattgtgtaaaatttatgattgaatcagatgaatgaccatcaatgtatggactcatattacccttttgtgggtgataacttgtcataaacatgtgttggaatcctctagttccacatggttctagagcgatttaggattttatacttcttttatatattgtttcctatttcaactatcgaatgagaactttgatgattttggccaatttatgttctttttggttttaagtttgtctacaagatacataaataatctttctaatatactataactgttgtggtgttataattggtatacaactataactgtaatttcatatgcttgtgtttaaagtaattgattgatgacacaaacaaaaggtgtggataatgcagagtaactacactatacacttgtggccttatgtcggcaattgacgaatactacacaatattagacctgcgagctcggttaaccaactggttaaccggaccaagccagttacttctcggttttttcgtagaaactagggctgaacatatgggtaacccgttcggggttgggttaaatgggtaatagatttactatccaataagggaaaatgaaattttcggttccaatccggttcgggtacattcggattcgggttgatttgggtaatcaatttgagaaccggtaaatacccgaaaaaattggttaacaattatccattacagcgaaaaatacccgagtttcaaatgatttgtgacaaatcacaagaaaaaacagagtgaaaaaatgaacattaacatccaaattccaaacctaaatagcaaactgcaaacaacaatacaaatatgacaaatagaagttctcaaacaagagtaattgaagagtaaaccgcaagcaacaatccgaaaatgaaaaacataaaactcgaagtttaaaacataccaaaccggatatccataaacccataaacccgaatcgatttggtatgtttttggttttagaaaaaaggtcaaccgctcggttaggggaactgaactaactgaacatgattcaaaattctgccaaattgaacagattgctaaaccaatttcgaaccgaaaactgaaaactctctttgttccggacaaaaaccgaaggccttttatatgtgtctgaaagaaaagtttcttttgataataaatgagggttattagaatatgtctcacatcgagactttgataaattgtggagcaatatataagtagtaaacctccactcattgagctagcttttgggtgtgagttaggcccatactaatatggtatcagagcccaaggtttcaatttgtctcgattgtggaccacccgtgcatgtccaatcccacaaattttacgctttagatgtccaattctgagcgtgagaggggtgtattagaatatgtctcacatcgagactttgataaattgtggagcaatatataagtatgtgataaacctccactcattgagatagcttttgggtgtgagttaggttcatactaataaggatgttgccatactttaattggtatgaaactaaaaatgtaattctctatgcttgtgttagtagctgatgacacaaaagtttatacggatgaagtattctccaactttgtgatgtcacaaaaacaagagctactcgctaaaatcaggtaatgattctatgaagtgaataaatttcattataattttactacagacacaacgtgcagattttcaagtacctaactaaagtaaccaacttttttgtgatgtaagaattaagagcaataagcgatactctacggaagctacaccatacacttgtagcctctgtgattttctcttatcttctattttgtttctttctatatgtgtccacatttttctttcacaagttaaccttataaattccctccgagagttgattggtatcaacaagatcaagcaagaaataaactaagatatggccaaggaaatggtgacgcttgaacaaattgtaaaatgtctaacaaatttttttttgttcttttcttccgtgggtttaaggttcttatatgtgccaacgcgagaacaagggtgtaccatgtgataattgcaaagcgtactgtaggaaggcatacgtcgggcctaacgattatggtcgttgcgtgggactatatggattccgtacgtgcacctgttattatgaatgtagcaattggccatcttcatttttatcataaaaaaagttatctatgtttcatcacttcatgtttgtatgtgtttttgtgtacgtgtgtatgcatcagaatacaaaaaaagttgtatgcatcagaataaaaggagcttttttcgtatgacctgatcaatgctcttacaaaaaatttgtcattgcaatgaatgattcccaaataacatgaaaactagacgattaccgcaccttgtttggtagaatataatcagaaaactatacaaataatatatattaaatataataatagcgtttcgaaacatatattaatagatgttttgtcatattggaatccagaagaaaaaaaagactaatatttataatcataacagaaatcaaagcttttcgttgggtctcgaatggtcacaagtccacaagacaataaagattcaagatttgcgccgaacacgcccatgtagcctttgcattcattaaacgcagtactagttcttctggtttttaagtcaaacaaaaggactgagtcattgtcaatgatgaaacaatcatttgattcaatgaacacaatgcaattctcctttgcacctgggagcttatgtactgagcagcagagattcgtctgagctccaagaaagatcactcggtcgttcaagtcattaacttgaacccactttctctttcctctttcttcatcaagtctaaacactctgaaccatgtatatatatatattcatcataacgccgcccaacaggtgtgaaccgttgcactagcaacaactcctcgcctgactgcaccagactttctttagaagactgttgcgatcctccgactgaggggatctccgtaacttcgaaagaaagttcgacaacaaagacccgtccccttccacttgaatcaacagcataaaactttcctttgaatgcaaccaaatcttgatatgcatacttttcaggatgctccacaacttgagtccaactcatgttacggcttctatacatcaccaaattgcacattcttccagcaaaaagcaccgcaaaatctctgctatcttcactatccagtttaagaaattcaactctctcggtaatctccacccactctagtttatagggaaatccaaagcggtattcactgggtcgcttctcaatgtaggttatctgcatcgaagattatggggctaaattgaagacacaaggaaaataatgataataataacaggaccaactttgcggtcttatttattaattagcaaggttagagagaatttattagagataagattacatgctgctaatacgatgggtttgatatcagtttaaatcctatatatcttagttatgaatagtgtgacttgtatatatttatttacagaatcgtgattaataccacaaagaattccaaacattagctgatttacctcaaaatcagttagacaatgaaataagtaacaatctcaagcaccctactaactaaaaagtggtggttaaatgattatcaaaaagaaaagataaaagtttcaaaaactaatatgagcttttgaacaccaacctcgtagtattgtccaaatgggataattggtgaggtaagagagttgaacaacactttatttattcccattccatacttgataccattagatgacaagggcgacaacaataacttcggttccccatcatttcgttcacgcatctctgccaatagataatcatcaccaaacggagtccagaatttcacgagatatattggaatcttttttagtgtgcaatattcattcgttggtcggccgttgaacgaaaagccgacattgaacgatatatcatgagttttgatacctaagcagcgggaatgatctagtggaggtacaacagaccgccatgagctgcagacggaacggaagaggaaaatctcgaaagatgtctcaagatgacccatgattagttctagtaagtcattcggaagtaagggccaatctgccatcgttaaattccaccgtaaagatctgtatgtaaaactgaagaattaaaagttaaggatatataatgaagaaatatatatttatcacaataagatttgattttgctcccttttaaaaatatatagatttcacatttataacccaattaagagtatattattattttaaaacataactaaagtaaaatcttatatatagataaattgaagaaagagatttttactatgttaagattaagattaagggaaatgaagacgtctgtcatgataaatttttacttttctccatttcacaaatatttaaatttttacatttaattataagttataacccagtttggaatataataaaacataaagttaatatacaatttaaaaatatattttactacataaaattgaacaagaccctaccaaaaaaaaatcgaacaaaccttaccaaaataaaaataaaaatatttggcttatataggttttaggtatttcggatggttgattttattcgtcgcatacagatttcgtgtgtggtttctctgactgattccaggcaccaaagaaggacaaagtcccaccaccatcctctaaacccgccaaatccggtggcggaaagcagaaaaagaaggtcctttaccaaatcacaatcacttttttttttacttgatcagtaagtttctttgatttggtttctggtgggttttgttttatttacgtttctcatttcttgatttcaacagaagtggagcaaaggaaagcaaaaggagaaggtgaacaacatggttctgttcgatcaagcaacttacgacaagcttatgtctgaagctcctaagttcaaattgatcactccttcgattctctctgaccgtcttcgggtaaactaactaactctctacctccactcttttcactgaattagctctttataatgtgttgggataggttcaagattatcgagttattgaaagagaaattttattgtgctcaagaatttgatcatgtgtaaaatgttgtattggtttctgtcgtagatcaatgggtcgcttgctagaaaggcgataagagatttgatggtgaaaggcacgataaggatggtttctactcactcaagtcagcagattaacactagggctacttgcttgacttaatgttaaatgttactctttttcccttgaatcaagattttcgagagaacagatttacttaccactttgaattatgctatcatttttgtaaggccagtaacaaatcaaaatactgatgcggtaacgattaaaagggaatatttatgatgcaaacaaggtattcatacataaactgaaactattataagaatagtcagactgacatataaggtagaacctgtcaaaatatttgatcgtagcaagcctgctagctagttctgtttgatgttcttgactttacgttgtaatgataaacaagggaagatgaggatgatggttttgttttcctacctcaaatcccttgcattccaaaccatgagagagttggtctttctaagaccatatgggtttaaaccgctcagagccttccccatcaatgccatggctgcaatactcggatactgtttcttctcgaactccttgtgactctctggctcaaagctagcttcttgccctgttggttgatctgttgatgtagttttcttcttgcaccacctctggatccatggatgcagaagtgtaatgtcatctcctccttgtctcagatcattgctctgtgaaacgacgggttcttgatttctcggttggagattgttgattccggacttcaagatctcaaggaatagattattgttctctttttctcccagtgatgcttctttcatcttcatcatgctcttggtttcactggaatctgaggggcttgtcttcagacgcttgacccatctactgctggcttctacttctggttccaaccgcacacgtttgcaatctctggacagaaagtgttccacattcatactttgagtagccgagttgcttgtttctccctgatgtccatctactgaattctctctatccggaacaagaggtggttcttcattcatgtcaggtatttcggtccttggaatggctgagtagccttttattccttttccctgcggaattttcaacatctttcacaatcacaactttcaacattttgagtaaagatatgtagatatgtcgattgaacaataccttagttgatgacgaagaaatggagccggaaagatgtatagtctgaagtctatccatttctaaggtattagtctctgccgatgattcattttttctcggtccatcttcttgagtatcctttgagctttctagagactgcagccttactcctcctctattgtgggagtgatcttgattaggaaacagatcaagatatccaccaaaaatcttccctttcagtttcatggaaactgtagaccccttcaataactgatgactatcttctttaggcaagttaacagaatcaaccgttgcgtaaatcctcaccggtcttatcaactctagcaagttttgagtagtcttttcttgaattgggaagtcaagacggttactagaactgaagttctctccttgcggatacatccagggcattctattaaccatagctctcgagcttgaaccaacatcttcatggaaagacggtttagtagtagtagtagtagtagtctctctcttttgagaaaccttgaacataggaaacggcaagacctcgactccatgattctcatcttcaggtcttatcaactgcttagagcaattggtctcaccatcatgaaacttcacttcactacctgactgagtccaacgacctaaccaagctgattcatatggattgactgaagaattcttgctgattcctttgttacctttacccaaaaccataacatgttcagacatttgtacgtacctacagatcttctccagaggctttgattaaatcacctgagaagtaaatatcctttatctcaatcataattcaaaacaaacacaatactaaactagagctcatgagcatcaagcaagtggataattactatgatctcaaaattctcttcaccaaatttcacacaacctcagaattaaacctaaagaacacaaaaagtttcatcaaacaaatgtgaggaggatcacattcttattctttttttgataaactaggatcacattctttttcagtaaattctccaaaaaaaaaaaaaaaaaaaagaagctaattccacaaatttatacttacaattacaccagatatataaaatccagaaacaagtacaaatccatttttcttgtgtggaagaaatacaaatcgattcaatcgatgagcaaactgtaccaccagaaacaagagtcacacaaaagaaaaaaaaaagagatttgtgatggagattattaccagagacgaatacgtggaggtacactgtccaaagaaacgaagtacgaattttcttataattctctcaagtacttatttggatgagaaaaaaaaaaaaaaaaaaaaaaaaaacagaaccttcagaagaaaataagacagaagagatgggcttttgtcggaaagagcagaagatgtaaatctcaatatctattgtccaaagaaggtgttaaaaagaacctcgtatttcgtataggcatcgacgaattatagttatcttcgaattttttaataagttgaaaagttattttagttgaaaaatgacgtgttcatttttgtgccatgtctaatgcaaatgggcacaataatatcaagaacattaactgtacatatatctagatatttttaattttgccatgtgtgtctatcaggttataaaaatatcttcttcttgcccataaagtttaagagatatctttctttaatcaatgtgttttctatacgtcaacgtagatctttttttattagatcatgtctccaaagacggctatgtacttttagcattcaaatgcttgtaaacgaaaacaagagtcttcgtgcctatgactaggcaattgaatcgtggtaaaggttgataaattttttgatcagccaaaatctttagtaatgtcgaacaatttatctcaaacgaaacatatttaaaattatgttgtatgaagcagtttattgttcagtaattagaaaatgcaagtgtagaagagattgaatgagttttagaccaaaaaaaaaaaaaaaagaagagatgggatgagttatttttggccatttagataatgttatttgcgtaatcacgaattttgcggtattagtttatttgcgtcgtgcaaaatggctaagtaagcattaaattacatcaaatctttagagagagaaataacttgcaatagcaaatgatgaggaaactaacctatacaataaagtttatattagagttgatgtataatatataatatgacaattttatcctccctactatcaccattaaccaccaccacaacaaccatcaccaccacagtttcgctatcggcggaaccaccactaccgccgtcatcttcatcaccactaccgcagtcctccaactccaagccaccatcttcattggaaccactgccctcgccggagctaccagtgtcctcaccaccatcgccgtcctccaagccaccatcctcgcgagaaccactcgccggatccaccgcatgtcctcactagattcacactgttgccgaacttaccaccatcgttggagccaccatcgtcggagccgtcacctcctccattggtcatttaatttatcttttatgttagttaactgatacatatatagtgctatatttttaaatttttattaaaaaattgttaaattctgccaaaaaaaaagaaaaagagaaagaaaagtaaattataaaggaaaaaacaagaactctacaaaaagttttttttaataataatgattatgccaagatttgttagagaatctataatggtgaattcttagcaaagattcttagcaatatttttataattgatttgaaagttttgaagttaaaagtttggataaaagtttaaatgtttggcaatgtccaatcgtaagctcttaagttgaggtttttaaaaaatatataaacatttgatttttaaaaattttaataattattgcaattcataaaatttgaaacatacatgatatcaaagtttaaacatacatgacataaacatacataaaacgattagtagtacataattacagaattttgcaaatatttctcattctcccacttatatcacaacacgtgtctggctcttaagatgtatttagactcttatataagagtcatctcttaccaattatatgaattaaacattaaattttatacctatttctcttataactattctaagaaactactattgaagataatcttatataactactcactagtggttataattagtaaaggtgtcaaacgggcttagtccaaatagtactgtagtggggtgggtttagacattaatatttatgtccacgaaatagcaggccaagcaggttggcccatcacggattgcaaactgaagtgattgacttattgcggacagcaagttagcagattaatctggcaaagtaaaaccaattcatttaaacttctttttcacttaatgtttaaaaatatacttttgtagcacgatctaaacctattatccagcatgattttccatttacttatgttgagtatgatagagttagagaagtttaaagtattaagagtatttcggtaaacaataatttatcaggaaatacatttctaaacttaatttaatgtttaaaaatatacgaataattatattgatgttatatcacattagttatcaactaggcaagataagcaatcatactttagtaataaggaaaacaaatcatgatattaaacttatcgattattagagtattacattatgtataaataatactatattatattaacctggtattatttatacatatgtgatatgttgatttgctatacatattttgtacaagaataaaagtggcgcaagaataaaagtggatttgctatacataagttgtaaataaaaaaaagagcaagtaactaattactactttccaccgtcatggttaatagatatcgttaaaatgtatgggtgagtatgctataagattcaacccttgagaatttgattgcaagcgtcaataaatctttcatatacgtacgtcattactcattaacaaacagttgtcttgatttgctaaatctaaaacttacctccaagtctccaactatatatggagaaagtaaattgtttacctatgttctatatttctttattattcatgatcaaaagtctaaacaattcgatcggtcgatagttgcctcgaaatctagaacacattgaattaatttttcgtatccagattcatgtacttaaaactggtttatccagtaattttctaatacgttttctagttaacaaaattttttttttacttaaaggttagaaattttaattcataaattatttagctttctgtaatcctaactaaatggttatgaacctttggaaaatttaaaatttaagttattgtttaagttgttagcaaaatctaaatttgacatcgatttaaaaattaatataaaatttacaaattctcattcaatttaaaataagataagaaggttcattcacactgaaatttgaattttgtaattcttactattaaatcagttaaaatttaataaatagtttcaaatctaataacaaatcacttaaaagaataaaattatactttaattaatatttaaatttcattttaaaattagtgatccaataatacatatttttttccaatataacaaaaacatttactcacatattattaaaaacttttaaagggtgaagaaacggaccaaaacatttaaatttatcaactctaagatttatcaaaagaaattttcaccgtggacacctttctgactttttctttcacaaatagtcaaagtgggctggcccaaccaggttttagccattcggccaaaaatggacaaatttgccttggaacgagaagtgaaaggaggcagttcagtttcgtctctttatttttctggttactaaaatttaaatttaaatttaaaattaaatcaaaaacacgttattaactttctgacaaccaaaagaaatcaaaaactgtttgtcgaagacgaagaacaattccgacaaaacacaaactcggatcgaaagtgaaatttcgattgaggctctgtgcgagttctagtcgttgcttaagttgagaaaatttcgatcgagctcgtgataaaggataacaaaaagatgattttctggtttcttgaattattgttcatactcaaatggcggagatgaagaagagtagtcggcggcgaggagtttcggatgttaatgagttaataagcggcagcaaaattagggttgcagaggttgaagacgagtgcaaaattacaattatacccttcattaaaaaaaattgtgtacgtatatataatttacggtatacgtacacacacattactacatacattactaccgtgtacgtacacattactaccgtgtacgtaaatattactaccgtgtacgtatatattattaccgttacgcacatatgtttatatgatattactaatcgtgaattgtcttcaaaagataataaataaaatattatttaaaatagaaataaacatgttagattttgttttattgtaaaggcgacatacaaaatatttattgagtttttacattagaaacctttggttattttgattagatataatatcttttggggttttctccataaatctattcatatataataattaaataaaaatatatggtcaaagtatagttgtttctcatacttttgaaaaatgttatgtacgtacatgtataataatgtacgtacatctttgttggtgagttaaaattgttgagaataaacaagattttaaactaaacccttaaacatacacgataatattgagatacacgtacacgtatacgaccgctccaaacagttacatcataaaaatgtctaaatcacataaatctaatactatgtacgtacacaaaaatatttattggaacgtacatggtacaacattaaaatgagtttaaaaattctctaaccattgtctacgaaaaaattttaattttatttttttgacatccagattaagttattatgtaagttatatgtatgctgtatattttaatatagattatgcatatataatatttcaacgaatcgtactctcattcatgtaaaaccgatcttccaatagtaaattgcacaccattacaattcatttcacatctaccatgcctatatgtattcgtgtacgtaaaacattcatctttacataattcatcagatacataattagtagtgtacgtaaaacattcatctttaaattcgaaagcttgatcattttgtgcttcacattgaagaacttccttgctacagagaatatatattatacggaggatataacaaacatataggagaaaacattttaaaaaacaacttactgtttatccattatcttaaaaggaagcttccgcccacggtagtcttcggtcaagttgccaatctcaatgagcgcaccaatcacatctggtgtacgtaatgaaagataaaagtattacgtgtacgtacatatttacaaaaatgaatagacagtcaaatatactaaccgactaacactccagtagaaactgtcttctcgatgatgtagtcaaaaggagtaaaatcgtaatacggtattgcaggcaatcccgaaactttggtaacaatggtctgatccataaaacagatccggtagtcatgggacgttgcgtgtatcccctcgttgtggagacgaaccgagaaagtattgataactatccactcattttctcggatacggtcagagtaaaatgaagcaaggcgacgattaatggtagcctctatgcgggaacgcaatccctacaacaaatcatcatgattagtgacatgtaaggtatgtgaaactaaaaacgttataaacactggcgaaatagtactcgattatctgccaagatgagacccaggtagaactcatttattcccacgcatttttgaaacaccctgaccacaaaagcgcgtatactccatccggtgatcatgggacaaagttcggaaatggcatgatatccatcatccatgatgtcaacaacaaaaaccagaataaccgactttctgtcttatttgtgtgatgggtgtggacttttgtttgaatgaattaagggtgttattaccaggttcttaaatagattttaaaaagacgcgatgattggtcccaaatcgatgtaacggtttagtaaaaaatgtaaccgtcaactctgaataattagatgtactaagtgtacgtacaaatgaaaacgtttatcaaacatacgtacagacaataacgggattgacaaaaaattgaaggataatcaaatacgaggtccacaaacgtacgtacagaaggtaacgtacagacaaaataatatgtaatattacaacatagactgatcaaaagatttccaaaaacgtatgtagaacatcttcaaaccatgttgacacgtcggggatggagcagaggttggtgtactgtcaaccaaaacaccagcgggttctacatgaggtacatgtgtacccgtcgacgtacacgatgccaatagaccagtgaatttccctggaggttccacggtttgttgagtgtcattcacgacgccatcctcgacatgaccatttccatattgttccacaatcatgtcaccccatttattgtaatcgtaatcttcgccactaccttcactaccgtctactatagggtcgagggtatttccacggctttcaccatcggtgtcatcgtcatgtacatccatatcttcgtgctcttcattatcctcgtcctcatattcatcctcatcaccttcatctatgtcatcctcctcatctacatttatatcttcgtaaaaattatgagctgcatcaacatttgtaacctctgtctttgtatggcctcccttgccgatagggtaaaaagacacaaacaagttaacagaagaatcgccattacgaatcaacataaatgtatccaggctgatttgattctcaatatatactggagggcgattacttgctatcatatcagacatctttccgggcatccagtaacttattatagggttccattcactaaacttatagctggaaacatcacatattgtacttgccaaatccgtgtacgccgttgtgtctgtaatacatacacagcgaccgaaacttcctttttcagcttcaaattttcaaccttcttctttgtatatccactcaccaaccataattaatacaggtaactccatacctgcaacataaattattcaggtcagaacaacattaaatacaaaaaaatcagatctttttgaaggttttcatttatgtcaaagaaaacaaaaagaatctgtaacaaaacaatttatgtacttataaatttaacaaaacagatcatagagctttcatttatatctacaaatacaaaaagagtctccaacaaaacaatttatgaacccataaatttttaaaaacgtatcattactttcatatcacgttctcaagtgtaattaacatgaatttcttacctagaacacaaattgtctccccttcaatccttcaaactttgtaaaacagcaactgaaaacttcagattcttcaccgtaacacaatttcgaatttcgtttttttccaaaaattctaatctcaataatgtaaatatcttacaatataatctttattataataggtaatcatgagttttagtcttgtcaaaactttttagcattaaaaacttttgagcccaaccaattttaaaatttttttaatttcaatctcaagtgtcaaattcgccgaaacccagaaatcatttaatgcatttctcgtcgatgaacagtgtacgtacgaacccggttctcttggattccaacgacgcggtccgtacgtacaaaccgggttcagtttcgtcaagggcattttggtcagtttttggctgaatggctaagaaatgaaaggcccaacccacagtgtcaaaatctgaaatgaaaagtgggtcaacggctactgtgcgcaatttacctatttatcaatcgctcttctcgtcttcttcttcctttgtcggttcttcttccgatagatctgcttcgcttcctcacttccgttcaaggatcatcatctcaaatctccttctcgctcaaagaaaccctaactcttacgcaagtcagtttcttcctcttctctaatcctcactttccatttcttcgttacttaacatttcgtttcgttgcttgaagctcgtcttcacggtttgtttgatggataaccttcttgttgttcttttttctgttacagttttacgtatgcttcggattgtgaaattgctgcaatttcgtttccttttgttacgtagaaactagagagttctgatttcgagatctgatatttcgaggtcttgatttagtccaagcttttacgatgatgtgaaatgtcttatggtgatctcatttctgtgaaaatattgtgtagatggttgttgtatagataactggagagattcatgaatcatgtagattatcttgttgagttttttgcagattcttctggatattagtgtgttaatggagggagttggaggtgacgctgcttcaatggcatcatcacctgtacaacaacgagcgaatgaggcgtggaggctgtatcagtattacttagacaagactaagcctcacgcggttaataggtggatcgggactcttgtgattgttgtgatatactgtttgagggttttctatgttcaagggttctttatcgtttcttttgccttggggctttatgttctgaactagttgactgggtttttatcaccacttgttgatcctgagcttgatacgtctgatggtccaatgttacccaaaaaaggttcagatgagttcaagccattcatccgttggcttccagagtttaagttctggtaattttacagtacaagctctctttatgtgctaatatctgctaagctctaaagcctggttaaaaaaatgttatgccatggacaaatcaagccatatgtgagatatctagagagtgattttgagtgagaccagaattaagtagtgcctataagcttagggacagtgatgttatatctgtttttcgtgaatgaagacaagtgaaatacgtttagaagtgacgtcatcttgtttggtaattcttttgtgttagagtgtgagctataggttaatttatatgttggcaggtactttatgactaaggcgttctgcatagcgtttgtgatgacattcttttttttctttgacatccctctctttcggccggtactactcttcagtctcttctattggattgctctgtttgtgctgacaatgacgcgtcaaatagaacacatgattaagtacaaatacatccccttcaatctaggaaagcaagtaagttgtgcatgctaatgaactagtccaaacgtttagaaatcacaaaatgggtttgatgttgatatattgcgtattactcatttcccataacagaaatatggagggaagaaagcttctggcagcagcagctctcgcgcagactgaagcatatggagaagtagtaatgttaatatgggcatgtccaccccatttaaagtccgtcccatttaaaacccacctcatttaaactcatttaactttaagatctattagagttgtccatttaaacccatatacccatttagacccatttagatataaattctaaaagcaattttagtaacttggaatacaaggcaactatttaatcaacataaaaatatgtctaactttttataaaacaaactaaaatcaacacctaccattaaatttatctacgcaaatttaaaatccaaaagaggcattcagtcaattgtctaaaagaagaaaattcaacatttcattgtttcgactttcgtgaggttaattggaaaccatgaaggcgtgtgtcatggatgtatggattcgtgcaatcaatatcaactagggtttcagaatccaatgggagaaatatgattacatttcaatctttgtgacctcttttgatgaataccaccaatcagtggcaaaatgaagaaatgatcaaggaagtgacgcttcgtaccattgcggaatacaacttagataatgtcagtgtgttttgtggattctctacacttcgaaatttggtattgtgttttgattctatggttcttagttcatggaacaaacattgtgtttgttgagcacgtctccacgaatttcgcgttttactggttattggcacactggctcatattcgaggatagatatctgtcttccccttctccaaagtcgaaactccatcaaatagaaacattacagcgcacaagcttgtttcatattcctatttttagggtcaaacagacagaggaaagtgcactttattcctagtttcttttgatctttgtattctttatttatccgagctaacttctcaacttagcggtcctttcacatgacatttccgctttccttcatttgcaccggtgttatatttttgttacatatagaaatttaatagaatagtttaggtttgtaatcaaaatatactaatagtgatttgaaaagtgtaaaacagggatgaagaattgatattgaataagtaaacattaagagtcaatttaccttctcatgatgtgttttcaggctaagtatcaagaattttatccgagttacttgtatcacaaggttttctattgtgtgtgttggtaacttggtatgcagatataaaattgagctaggtttctttcaacagagcctgtataagaatattcattttattcaagtactagttagtaaactaagaaaaaagcatgtttaatcttaaaaacaaaaagaagcgaattaagctatttcttgtcttaaaaagaaatcaacatttcattgtttcgtgagggaatgatttactatttgctctccggttattctcaaacacacgaaatcaaccatccgaaatacctaaaaactatatgagccagatattttatataataattatgtgttgtaatattgtatgttatagttacgccatttgttaaattttagtgaaacttgttcaattttacttagtaaaatatatttttaaattgtatattaactttatgttttattatattccaaactataacttataattaaatgtaaaaaactaaatatttgtgaaatggagaaaagtaaactattatcatgacatatgtcttcatttcccttaaccttaatcttaacatagtaaaaatctccttctgtgaaatctatatattttttaaagggagcaatataaaatcttactgtgatatatatatatatatatatatatatatatatatatatatatatatatttcttcattattccttaacttatgattcttcaattttacgtttgaatctaatgatggcagattggtccttgcttccgaatgacttactagaactaatcgtgggtcatcttgagacatctttcgagattgtcctcttccgatccgtctgcagctcatggcggtctgttgtacctccacaagatcaatcccgctgcttaagtatcaaaactcatgatatatcattcaatgccgggttttcgttcagcggccaaccaacggatcatcctctgtttggaagcacactaacaaagatcccaatttatctagtgaaattctggactccgtttggtgatgattatttattggcagagatgcgtgaacgagagggtggggaaccgatgtttttgttgtcgcccttgtcatctaatcgtattatatatggaatgggaataaataaagtgttgttcaactctcttacctcaccaattatcccatttggacaatactacgaggttggtgttcaaaagctcatattattttttcaaatttttatcttttctttttgataaattttgccacttagatagtcatttaaccaccactttttagttattatggtgcacgagattgttacttatttcattgtctaactgattttgaggtaaatcagctaatgtttggaattctttgtggtattaatcacgatcctgtaaataaatatatacaagtcacacaattcataactaagatatataggatttaaactgatatcaaacccatcatattagcagcatgtaatcttatctctaataaattctccctgaccttgctaattaataaataagaccgcaaagttggttttgttattattattactattttccttgtgtcttcaatttagccccataatcttcgatgcagataacctactctgagaagcaacccattcgttaccgctatggattaccctgtcatttatgggataaattagagtgggtggagattaccgagagagttgaatttcttaaactggatagtgaagatagcagagattttgcggtgctttttgctggaagaatgtgcaatttggtgatgtatagaagccgtaacatgagttggactcaagttgtggagcatcctgaaaagtatgcatatcaagatttggttgcattcaaaggaaagttttatgctcttgattcaagtggaaggggacgggtctttgttgtcgaactttctttggaagttatggagatcccctcagtcagaggatcacaacagtcttctaaagaaaatctggtgctgtcaggcgaggagttgttgctagtgcaacggttcacccctgaagtgcggcattatgatgaatatctatatacatggttcagagtgtttagacttgatgaagaggagggaagagaaagtgggttcaagttaatgactctaacgaccgagtgatctttcttggagctcagacgaatctctgctgctcggtacataagctcccatgtgcaaaggagaattgcattgtgttcattgaatcaaataattgtttcatcattgacaatgactcagtccttttgtttgacttaaaaaccagaagaactagtactgcgtttaatgaatgcaaaggctacatgggcgtgttcggcgcaaatcttgaatctttgttgtcttgtggacttgtgaccattcctgacccaacgttaagctttgatttcggttatgattatgaatgttagtctttttattctggattccaatatgacagtttagatgtaacatttaaactatatgaaataaaccatccgaaatacctaaaaactatatgagccagatattttatttaataatttatgtgttgtaatatcgtatgttatagttaagacatttgttaaattttagtgaaacttgttcaattttatttagtaaaatttatttttaaattgtatattagctttatgttttataatatttccaactgggttctaattaaatataaaaatctaaatatttgtaaaatggagaaaaataaaaatttatcatgacatatgatcttcatttcccttaatcttaatcttaacataataaaactatctttctttaatttattatatatataggattttactttaattattttttaaaaaagattatacttttaattgagttataaatgtgaaatttatatatttttaaaatggagcaatacaaaaacttaacgtgatattcagttttacgtactcatctttacgtttgaatctaatgatggcagattggtccttgcttctgaatgacttactaaaactaatcgttggccattttgagacatcttttgagattgtcaacttgcgatccgtctgcagctcatggcggtccgttgtacctccattagataattttccgctgtttagatatcaaaacaaaggttataccgtccaatgtcggcttttcgttacacggccaatgtccgtttaaaagcagtgttaattgcacactaaaaaagatcccaatttatcaaactaaatataatagagtgaaattaaaaaaaaaaatcttagaatgtcaaactaaaatttaatgagtaagaaatgtgtcacgaaagtataatgccaaaagtcgtattatgaggcaaagttagaaaaaccttgtcatattatataagataaaataggattttacactaattatttttttaaaaatatattatacttttaagaaaatattatactcttaattgggttataactgtgaaatctatatattcttaaaagagagcaatataaaatcttactgtgatatatatacttcttcattatccttaacttttaattcttcagttttacgtacagatctttacatttgaatctaactatggcagattggtccttgcttccgaatgacttactagaactaatcgtgggtcatcttgagacatctttcgagattgtcctcttccgttccgtctgcaggtcatggcggtctgttgtacctccactagatcattcccgctgtttaggtatcaaaactcatgatatatcgttcaatgccggttttacgttcagcgatcaaccaacggatcaacctccgtttaaaagtagtgttgattgcacactaaaaaacatcccaatttatcttgtgaaattctggactccgtatggtgatgattatttaatagcagagatgcgtgaacgagagggtggggaaccgaagttattgttgtcgcccttgtcatctaatcgtattatatatggaatgggaataaataaagtgttgttcaactctcttacctcaccaattatcccatttggacaatactacgaggttggtgttcaaaagctcatattattttttcaaatttttatcttttctttttgataaattttgccacttagatagtcatttaacaaccactttttagttagcagggtgcacgagattgtagcttatttaatttcattgtctaactgattttgagatagatctactaatgtttagaattttttgtggtattaatcacgattctgtaaataaatatatacaagtcacactattcaggatctaaactaaagttgatgatatcaaacaaatcgtattagcagcatgtaatattatctttaataacttttccctaacctagctaataaataaataggaccgcaaagttagtcttgttattatttttattaacattattaagccgcataatcttcgatgcagataacctactttaagaagcaacccattcgttaccgctatggattaccctatcatttatggaatgaagtagagtgggtagagacttccgagagagttgaatttcttagactgcatagtgaagatagcagagattttgcggtgctttttgctggaagaatgtgcaatttggtgatgtatagaagccgtaacatgagttggactcaagttgtggagcatcctgaaacgtatgcatatcaagatttggttgcattcaaaggaaagttttatgctcttgattcaagtggaaggggacgggtctttgttgtcgaactttctttgagagttacggagatcccctcagtcaaaggatcgcaatattgttctaaagaaagtctggtgcagttaggcgaagagttgttgctagtgcaacggttcatacctgcagggcggcgttatgatgaatatatatatacatggttcaaagtgtttagacttgatgaagaaggagggaagagaaagtgggttcaagttaattacttgaacgaccgagtgatctttcttggagctcggacgaaactctgctgctcggtacataagctcccaggtgcaaatgagaattgcattgtgttccttgcttcaaatgatggttctatctttgacaatgattcagtccttttgtttgacctaaaaaccagaagaactaatactgcgtttaatgaatgcaaaggctacatgggggtgttcggcgcgaatcttaaatctttggtgtcttgtggacttgtgaccattccaaacccaacgacaagatttctgttatgattatgaatattagtcttttttattcctttacgagtattcctttctagataataatatactactaaatgtgtaagtgtgatgaaaaaagacaaaaaaaattgtaatctttctaatatcattgaagttaagtgtccgactaaggttcgggtaaaaataatttggttcggactcagttttatatagtttgtgtttttttttttatcatgcccccaaaaagttgattgtttgttacttttttcattttatagaactcatggaaatggctaacagccctaaatcggggagacaaaaaaaggaatgcaaagcttagagaaacgtaaagcaaaaaaaaagaaacaattcatggattcactcaggatcggaaatcgaccaaaatcaaccttcactacttccatgcgattttttcaacccaaactctaaatccattcctttatcaccccgaatccacataattttcaaataatccacatgtgaaatggaaactattagggtcattaatagagtatggtttagagttaaccatacatttgtttcagtaatgtaaaccggtataagataaaccgggttttgccacttactataaaagaaacactctgtactattgttacattaatgagaaatgcagagaaactttacctttcttctttctctcgtctctaacaaacttgtttctattagtcatatttgaacattagatttcttagatttacacacgtgtttgtaatcattttttaatgggtaagaattaaaattagatttttattttttggttaaggggtttatcagtgttttcatcttcttcttcacagcttcttcatatttttgaagagattttgaccaaactagatcaaaaccacattacgctgcggagtactatttaaaattgtattcaaaataattacaattaattaaaatttaagaatttgaccttttactttacttaggttatagtagtttttacttttgagatttatttcttatttgggtggttagattttgtaattataatattaatctaaatattctttgtagttatttttactttagtttagtactcagatttatcatattatagtaaattttacttcttgagatttatttcttatttgtgtggttggattttgtaattatattttaatctaaatattctttgtagttatttttactttatagtttagtactcagatttagcatattccatttatgtttagagttttagagcttctatgaaaaataaaactgagattgaaaatactaaaagtgaaacaattttgtttagacaatttagagttttagattagcattaatgtttctatttgttttttagaaaaagaaactaaataaatttattgcattaaaattggaaaagaaaaataatacgaaagaataaagtgccaaataaatgaatttattgcattaaattattgggttcgagttaatgacttagaggatcaagtcgtgtttcttggaattgactggaatctctgctattcctcaaaggagctttcaggtacgaaagggaactacattgtgttcgttgaacaaaaaatcgtctttgagagaatctttgtgtttgacttaggaaccagaaagactagtaaggcggttatgcagtggcacttatgatacaccaagtgaatttgaatgagatccctaatcatgtcttcaattttattatctttggtttggccctttttatttttattttgtttagaaataaactctttttggaattaaaataaagatattagattgctttgaagaaaaagaaatatatgtgcatgattggttgggttttaagtctgacttataaccttaatttttcttaaagcattgattacaaaccaatcgtgctgtagctttatttttaaacatacagccgaatttttttttttttttttttttaaggctgtagtagagaaattctcaaagccctattttcttggttgtataaattttaattcattaaataaatacaaaaaattaaattagtaatacaagacattttatttactatataaaaaacttttattatatttactaatccatttttataaatatttaaagttaaaaacttacagcaataattgtacagcaataaaagttacgggtacagctaacacaactacaacaaaatctatacaacaaaaattctacagttacagcccaaccaatcatccacatagtcttttcttcaaaagatcgttggagccacaacaagtttgtgcttgatatgctttgtacaaaattattttttcttcaaaatatccaactaattcaccttattaataaaagatgtttgtttcttcaaaagattttagatttcaacgagtaataaggttttgtttagaaattctcatactagttgtgtttttagtagggaacctaacatagtaatgatgatcatcatcataataataatcaccaacgaggtgataggacaaaaacaataattatggatctcgagaattgccagcaacgaatcagctgtcctattgctttggatatgtcgggattttatttgtaagattcacattgcttggatacaaatcaagtcctaatgacatgtgtttttgtccaatcttgggtcaatgttctggaagccagctagcaaatatacaacttgcggcggaccaagttcattaattctgattttggttcctaatttccttggcaattggaagtggacatatctaaacgaaccaaatcaataaatttgaggccaatcaaattgtctaacatgtgaatgtagtgtgcttttcaacttctttttttttctttctgaaaaaactaaatcacaaagtatatatatcaaacccgaatatatataaacaaaagagttaaaggcaacactgaaaaatttgaccagtagtttaaaaatgctcgaaggctaaagtgtcatcttatcaatactgtattcatcatttccatcacaaaggaaagcatgagtaattacatatctaggaaggagagcttttttgccaacatggtaacacgattaaacaagaaactcacgagatatattccgtgaagcaaaaaaaaaaaaaaaaaaaaacaaagccaaagaaaatcaaggaaaaacagacccaagcttgtgaacataaatttgaatcaccattggtaaaattgttaaagatataactaaacagacacaaactgtgtgtctaatgctttgtaaaggtcaacagaaacaactttctttatgcagcaggaacaagaatgctatcgaagggtcataaaatgcagaactggatttggatttgtgatatttgctcttttaagagcatctgtcatgaattcctgataggcgattgagagattgcaaagagaatttttattaggtttaaaagaaatatgtattcgggttagaactgattaattcgggtaaaatttcatatattgtatgcatgtctttacatgggtcgggtaaaatctcggcttggatcgaccgaaagtcgagagaatttttctagtttacccttaatttgtttttgtttttcttaactttttgtcaaaacataaaatgaagggcatgagctagaattttagtcttcttctaaatggcttaaatagctctaaaaaggcttaactagccaaaatgtccctccaattgaatgatatagatgtattttcttggtttctagattttttttttaaataatagtttttacaaagcatttgagaaatgtgagaatatcacattttggctagttaaaccttttaatgggtaatgggacccctctataatgtcgacccaatgccaatggacctctattaacatcaatgtcagtggaaaaattaaaaaaaatgacatgtagtatgcgaaatggaaacctaacccgttagagctatttgaggaaagcttcagttgaaattctttgagaggttttttccgtggtgttcaaaaactgatctagaatgaggaaatttcagctggtctccaatatagtacggcatggacacagagattcaaagccaaacagatgcaatgtctactccgtaatttaaaatgccaatacttttatttaaaagagagaactggtttgaggtgagtttggtgttttcaatgatattgtgtggcacccgcaaaaataatgaaagaaatgtagcatattatataagttttgccactattcatggcataatagttaataaaaactcaatgtcaatacaattatatatttgtgtaccctaaatatcaatgtacattccacttcaatgtactatgttttcacagtgtgcactctctacaataaaataaaactgaaggaaagtagtactctgatagctatatcaccatcacgaaaattatatatttgagtcgattgaaactatatgtaccctacaaaccagaaaatattgttgggaaaacaaggaaaattcttaagttcacccttacggttgaacccttgtagtcacttcttttagtttaaaccaatcattatgggatcaattatgaaaaactcctttttttctctatgcctttgtttcaaacagaccttctcaatgtgttaataggaataggcattttcattcagttaaaaagacatcattgtccttaatcacctaaaccagttcaatctacttcaattcgtcgaccgtgatgtcttctcttaccttgcgtttctcgccggcgtttacacggcggagggcttacatggctctgaaatcaataaagaggagacggaggaaagcttacacggctctggatttgtgatttccttagatgaacaacaccatctctgctaattattaatcctataattttatttcttctcgttggaaactccggccaagcgtttcatgtatctccgatccgattccgaaacttaaattaaaactgcagtttgaagcccaaacccaacatcctttgaaatgatttccccttttaatctcccatgttacaaaccgaagaccattacttttccgaaacttcaatgaaaagtgatttcccctttagtttaggattttgatgaatttgagattaattgttccgatttgtgtctatcacttagggtttcttaggcactatcacttagggtttagattcctttaaacaagactcgtttaatttgattcattagattttggattagattggtggaagaaaagtttgtgaattgttggaggcaaggaaaaaaatattgatgaatatgaaactattgatgttgatggagtgtggattcagtgttgataaagcaagtgcgtgaaaaagcaagaactctgtcacgctacggagaagacgatgaagtggtttttggtttgtcaacaacaaaattgagggcaaaaacgtcatctcaatagccataaagttcccatccttataaacccataatggatgtgccttctcactagttattgggcttaaatgtacccatttgaacaaaagccccaatcattatgtcataatgtttggagtgagatccttatttcttactgaactatatttttaggaaaaaaaatgaaaactttaaattttaaataatttttgtaaatataactgtttttatacattatcacattttcacaattatgtaaatatacatatattagtaatatatatattaccagccaatccgtggaaaaatccccactaaaccccgcagtccgccatggctttgcgaggcctgcttcttaacaagcctaaaattttatgtccatacccgcaccattgcggaccgggatgggcttgtcccctggacttaaacccgttatgactaaatagtagagaaccttacgtagtaatgttgatgatatgaaccaagatactttgtgtttggatcgtatcaaaatcgccaacttggagataaagacacccaaaacacacatttggatctcaagattgccagcaaataatcgcctgtcaggttacttttgtaagattccctttgcttggatacaaatcaagtcctaatgatatgtcatttgagatcgagatcaatctacagttgtcaaagagcttttacccttgcttttttatttattctcaaaatattactttgtttcattgtcaattttgatttgagatgattataataacgaaccaatctttaatatggataaagatgccatagaataaaacgcgagagtaataatcaagaagcgtcacattaagagtacaagagcttaaccagaaaagaagaaaaataaacaaggcagagtctagtaagactaggactaaccaaacaaatggtttttcattaaatcagaagtcgagcttaaccggatatcggtcgatgcagtgttcccacggactactaaccgaaggcttgacattgtttagagccacccaaactgcactgttacacttaaacccacttccaaaagcaatctgccaaacccggtttcctttcttcatcctacctttagcctctatgtaagccagttcataccaaatcgagctcgaagaagtgtttccaaatctgtgcagtgtcattctggatgcctcgacatgagtctgcgaaagctgcagattcttctcaagctcatcaatcacagctctaccaccagcatggatacagaaatgatcaaacgcaagcttgaaatccggaatatacggcttcagcttcgagttaaacagtttcttcgtaaccaaagtcatgaaaaacagaatctgctcacttataggaagaaccaaaggacctaaagtagtgatattcgccttaagagcttccccagctatagccataagatctttcgacaacgaaaccccggtcttcccattatcatcttgctcttggtaaacacagttgaaagccttctcaacagctcctttatgagtcctaacggtatgaacaagcttatacttagaccgtctacgatctttccccttgttcgacaacaaaatcgccgaaccaccaacacgaaacaaacaattcggaatcaacatagccttcttattcccaaaataccaattctgagtaatgttctcagtactaaccacaacagcataagtattcctatgaacttgcaacatatctttagctaaatcgatagagataacaccagcactacaccccattccaccaaggttaaaactcttaacattccctctaagcttatacttgttaacaatcatagctgacaacgaaggtgtaggattaaacaagctacaattcacaaccaacacaccaatatccctagggttaatcttggtattctcgaaaagcttatcaagagcaccaaacattacctgctcagattcctcacgagccgccatcatcgtaggcctcggagggatacaatgtaaagcttcagggagataagtctcttctcctaaaccagaacgttcaagaatcttcctctgaaactctaaagatgactcattgaaatcttcaatcaacttagaatgatccataaacttctgatacttaacctgaagactctccggaggaagataacaagagtaatcaacgagataaacagatctgggacgactcatgatgtaaacggtggagccaaagatagctaaagcagagagaaagatgaaagcaacgagattgtattggagatgaagccaaatctggtaaagatcgtctgttgttaatcgagagatctctgtgactaaaaccgccattaatggaaccaaacagagcttgaagagatgagtaatgaggtaatgataacctagcttgacgtatttcatgttgacgctttgtaagaaattaggaagctttcgtctttcgttgttctctgttcggatctgtacggatccgccattaacaggctcattagcagcttccatggcttccgagaaaaatggaataaaattgaaaactttatgagaatttgtgcatataaaagggaatgggtaagtgggtttgataggaatagaatcagtgaagtgacgccattgaagaacacgtaatgaagaaaacagttgatctgtcgaaaacttgtgtttttatgatttagagagaagaagaagaaaaaaccaaaagtgtttttgttttgttattatttggaatattattattttgtttatttgatctttttaattgtgtgattgtgtataaatagcagccaaaaaggtatacagttttaatttagggtaaaataaaaatgtgtgattttggggaggttacaatttaaggagataaagctggcatttggttaggaggtcaagtcgaatcaagtaggaaatgttaataaatttgccaacgaaatcttatgtggtatcaaaaggatttagcatatgtctgcatttactttaatgtgagtgttgttggtgtggaatagtcttctaaagactgcggttctataatggcccaatcatatttattttgttcatttgaatgtgtggtgtgctattaaactacatttttgtttgaaggaaagtagaagttttttatattatttttgaatgtgaaattgattgatcaagcaaatatgtatatagagtataggtaacaactgaaaaaagtaatgaaaatcaaagcagagctttatggatagctctgccattacaaagcaacagaaagaatcggataatgcaagtagaaattatttttagatatgagtcatatatgcgtctgaagtatgaacacataaaagataaatctcaataaatcaaccaaatatatattatttaaataatctcctattatttctttatataatcagaatatataaatccgtctccatggcttgttttgtatgaaaacaggtgatacttcaaaaaaggttaaatgcaacttgaataagaactgaaactccaataaaatttaaccaataatttaataacgctaaaatgccattttatcaaagttggaatctcctaaatcataatcgaaacaatgtatatgtcgacgatcacttaagtttcacctgcaccatacattgttcctcacttccattacaaaagaaaacatgagtaacgagtgttaacacgataaccaaccaattaacactttcaaattgaccaatacaattagataacatatttcatacagttaacatcatatgatgcgcacaaaaccagtcatgtatctccatattcatgctctcatgtacccatatgtgactttattcgcgattatccatacctcaagcattatgatcgacatgctctgtaaatatgtgattttggatgttacaattaaaggagagaaggctggcatttggttagggggtcaagtcgaagtaggaagcaagtagggaaatgttaataaatggtattaaaaagacttgacacactgaatttatgtgatttctggtggaatagtcttctaaggattgtatagtgtaggattaaaaataatcttttcgaaaatgtagctcatttatttcacaatttgtttttgattgtttttagattttttttcgaaaaaaaaagattgtttttagatatagaatataaatatccagaatattgaatgtatatttaaaattttacaagatttagaaaataaaaaagttaaaaatattgaaaatgattttgtttttattttgtaaaatataatatttgagttataatcaatgcgaagtaaagtgaaactactaattcgacaacaaagtaaattatatttttctaaaagcgatctcaaaatatttatagataaagataaagtaaatatttcaatttttggacttcagtcgcatcttatcggtgaggtctttgacgatgcatggtctattccatatattatgatgcatcactactatgacttgaaaggcagatgacaccaatcaagttatatatcgacatctttaatttggaagtacaagtatcaatttcgaacatggctgaaaaaacttagtccttattagaagaaattttttttatgaagaacattttcaagttttcggcataagtacaaacaatttgtaatgtgtcttgtaccggcaaaatttgaggttacatattcttctttaccatcatcatgtctttcaacaaagacaaatttttcactcgtgagattgtctatagtttagtagttaacacatagcctttgtctaatctacgatggggtagagacgaacctgatagttgtgttttcgatttaccatcttttcgcatgtagcattgtatcttataaccattgcttctgaactatcataaaactatcgttaattatcatatttctccatttatcgcttttaaccttgttatttcaaacactggttattctcccaaaaccttatactatatttgagtggtgaaccaaatgataaaaaaataacaaacttttgcattattaaaaaaaaaaaagagctaaaaatgattacgtataaaataattaataaccccttttttttacttggtccacctccaggctcaaatcctttttaattcaatttaattatcaaatgaattacgtatatctctaataaaagctttagtagtattcatgaatcagattagatcctacaatttttgaaacaaccttttaatatttcatcccaacggtcgaaaatatacagtagccgtcatttaaatcctcagatctatctttccaaaatttacaagtagccgttacaatttctatctcaaactctctccatcttcagggctttttcttgatcttcaaatttcttgtttcattgtttcctttaactaacaaaaagatctcagatttgttaccaaatcaaacaattccgaacacttttaatcactcatggcttctcctaccaacaaaaatccctccttttctcctccaatccctaacagaccaaaccctaaacctagaaactcagaagccggtgatccgttacgccggagttttggtggcaacccttttccggcgaattcaaaagtcaacatcccctcaggttagagtctttctcaatccctcaaagttttgatttttagattagggttttgctcagttcctcaaagttttgatttttagattagggtttaacttagtcttcgcggaatagtacattctcttggctaatcattgattattgtagattaagttcagattctttgatatgatttttgattatttgaggtgttgtgatgtttgtgtttctttagatttgactaggaggaactcttttggtggagataaagagaacgagaccaaacctgttcaactaactccaaaaggttccaagaacttcatgtcaccaacaatttcagcagtttctaaaatcaatgcgtcaccaaggaagagagtgttgtctgataaaaacgaaatgtctcgctccttctctgatgttaaaggtctaatcttggaggatgataacaaaagaaatcatcaccgagctaagtcatgtgtttcgttttcggatgtcttgcatactatttgtatcgatgatgagaagaagtttgtggaatcacatgacatgactgtgactgattttgatgagaaggaagtttatgagaacaaagggattacgtattctgatccgaggtttaggattagtcctcgtccttctgttccatatacatctcctgagtttgcagcttgtgaagttgatacattgttgcctccttatgatcccaagaagaattttctgtcgccgaggcctcagtttcttcattataagccgaatccaagaatcgagaagcgttttgatgagtgtaagcagcttgaggaacttttcatctctgaaagctcttctgatgacactgaattgtctgtagaagaatctgaggaacaagagaaggatggagctgaggaggtggtagtagaagaagaaaccgaagatgtggagcaatcagaagcagagagtgatgaagaaatggtttgtgagagcgttgaagaaacaacaagtcaagttccaaaacagtctggttccaggaaattcaagttccttggttggtttttggctctggctttggggtatttgttggtttcagcgaccttttctccactgatgaaatcaagtttcaacgagttccatatcccaaaagagatcacagagtttgcaaaagctaataacttggatcagttgagtgataagctctggactttgacagaatcatcacttgtgtacatggataagctgatctcacgtcttggacgaggaaatgaggaatatagtcagttacaatttcataacttgacatatactcttgaggatagtactgttttcaagccaacatgtgttgaaatcattcaagaaccattacaagagaatagcagaagtgaaaacagtcttgaagatggctctgttaatgaggaggagagtggagcagaagaaaactctgaagttgtgtgtcaatttgatgaactagctgaggtgaaaccgagcacggatatagaatcaaatgacggtgaaagaaacttgaaagctctttttgaagatggcttagagttgaacattgaagaactgagagagtctgagatgagtcctgaagaaaagctcgaaaccgaaaagaagttggaagaaactgaatctgaagctatctacataaaccagcctgatgttgaattcgctgccatcaatgtgcaccagcacatagagagtgagatacttgttgctgaaagtggatcagaagaaagttttggagaaattggtgatcttcttcatcttgaagtagggtcttataatgatttagccaaaggtgatgctgaaagtggatcagaagaaggttttggagaaattgcagcagaaactagtgatgatcttcatcttaaagtaaggtcttctaataaggcgtataatgattccaccaagttgatgatagtattgtcctccacggtgctggttctactcgcagtggcttctttcgtattcgctaagaagacaaaactcgtggctgctactaaaccagcccctgagagtaacatggagctaaacttgagtcatgtgccagaagagaatctggtgaaagagaagctcttttcactgaattttgaggaagaagttgatgacaaaatgagtaacagtttccaaaagaagagctcatgccacaaagaacctcaaagcaaaggaggcaagaagaataacaacaatagcagtagcagcaagttgaggagagaatcaatggcatcttcagcatcagaatactccattggctctttttcttacggaagtttcacaacatacgagaagatacccatcaaaagtgtgagtaccatcaatcaatgatcacgtaaagtacacgttttgcatcgttttagtactaacccattttatatattcacagggtagagaagaagaggagatgattacaccagtgagacgttcaagccggattaagaacaacaaaccttctggttctggtctatgataaagagatagacatttcatttcaatcattgcatcactatgcaatctttttagtttcctaagaattagaattagctttatgactccttaaaatcttctgatttgtaccaaactagttgtgattcaatccaaagtttgtttctttgtgtcagtctcagtcgtttaaagtaaaagaagaaacaaaagcatgagactttttttttttttttggtaacaaagcatgagactaaacatcacaagactcaatttctccagcttcctccttcagatcgcccctgaccaccgtaacctccgtctccataaccaccttcacgacgatcacctccataaccaccaccgtatccacctccaccgccacggttgtaaccaccttgatcacgtctacctctgtaaccaccacttccgtaaccaccaaccataccaccgcgagtaccactaccacgagcctgagcctagttaacagtaatgttacgaccatcaagttcttgaccattcattctatcgatcgcagtcctcatggaatcctcatctttaaaagtcacaaatctaaaccccttagacctcccggtctcacgatcaatgatgatctgatccaatccataaaccatataaagtcgagatttttatgatacaaagagagaaacagagcaacacaaaaacagagtcacactttaacggaccttggagtcgaaaacttcaccaaactcgttgaaacacctctctatagactgttcatcggtggcccaagctaaacctccgacgaagcatcgatactcgttgtctgcataagccacgtccaaagatttgaggaagatgatgacgacgacggttctatatagaagcgcgaaaccatggttacgttgattcggtgcttaacatgcattcagaaatatgattagaactgtgaccaaaacactctcttggacgcatgatttgtgccacgtcaccagaatcgaaataatcttgctctgatccgatggtttagatttgacggcttattttgtatgtgtggggtctcacgaagaggacatgtgttagttatatgatcttgaactggaaaacacagatacaaacaacatttgtactttcggacacgttggatttatttaatagcgatgcgggatatgtaacaaaaattaggtagtgatgtaaatttgttatccgacgaaagatgaatagttcattgctttttcttcccgaacaaatatcctcaattatgacttaactagctcgaggttagagaaaacttttctatggaaataacagtaattggaacgattaataaaatcatatacgcaactgtagcatatgaaaattaataaacagtttaagaaaatttcacatcacttgttcatatattttgagaaaacttttgagaaatttttagctcaagaaaaattcatctctattaatgtctacttaatcactattttctaaataaaccatagtgagactttgaactaacataatcattcatttttcaagtaaaattaaataaaaaaactaaatattttcattcgattggcattgtttaaattgaacattctacaatagagaatttgtttctatcaattttaaactaaacatatatcaaatttttggatcatatcaaaaaagctagaaaattcaatatcattgttttttaaaaagaatacttcaacatctttacaaaatcctataaccgataaatatttcatccaatattttgaaagaaagttgccaacatttcacatgtttttctagttgataattttctattgtactgtatatgattatatgttgtaataaattgtttaaaatgcaaatgattacagcggttgagacggacaaatactatgcagattaaaccgcttttaatttaccaatcataaattagaatctataataatatatactaagaaaactgccgtaaaccaatcataaaccatttttacatacaaataagattgatccacaacgatttattatctacttgaaaataaaacacacttatattatcgatgaatttatctattctgattgccgttaccattcgaaccaaaaaattcagagtatttagaaaattttagcaagaaaagaaaaagattcctttattcggccaagaatggtgaatataggacgtgagatatattactccttatatatccgaacattaaatttacaacaataataaaacaggaaagaaggaaagaaaaaatcccaaatagtaattgcggcaacagcttagctggcttatggcgggattaccgggaaagtcaaaccaaacattaaaacgacgtcactttaccccacactaggttttaatttaatctaatttcaaaattattaattaatcagatttgtaattaataataaattaatttcgaagtttcttgcaaagacgagagagagaggagtgtcacagtctacagttgttatctcaacaatctcgatcttcttcttcttcttctttctttctctctctaaagatttttttcactcaacaaatcactttttgttttgtctgattttaaggattagtgaaaaatttctactttttcttctcataaattaggatttagagagagagagagaaagagaaagagaggtgctttaatgtctgtgaaggtaggagctgtaattggatccagtaacagagcaaacccagttcgatatctgtctctttcttcctctctaaagatcgaaagacgttatttttattagggttgttgaattgggtattttgcttaaatcctgaaaaaaatagtctctgtctctctctgggtttgggtgatgagtgttgatgggtcattggattgagtttgataagcaatggttgatcaaagaagaagcgcattgggttttgtcttgttgttgttgtgtttggtactgttcttcgactgtgttgttgttggtcaaacacagagtcgattcagtgagaaactcattttgcttaatctcaggtcttctttagggttaagaggaacagattggccaattaaaggtgacccttgtgttgattggagaggtatacaatgtgagaatggtagtatcattgggatcaatatctctgggtttaggagaacaagaattggtaagctaaacccacaattctctgttgatcctcttcgtaatctaactcgtttgtcgtattttaacgcgtccgggttagcgttaccggggactatacctgagtggtttggtgttagtttgttggcattggaagtattggatcttagttcgtgttctgttaacggtgttgttccttttactcttggtaatctcactagtttaagaactttgaatctgtctcagaacagtcttactagtttagttcctagcagtttaggacagttgttgaatctatcacagcttgatctctctaggaactcattcactggtgttcttcctcaatcttttagctctctgaagaatctgttgactcttgatgtttcttccaattaccttactggacctatccctcctggtttaggagcgttatcaaagcttatccatctgaacttttcaagcaatagtttctcgtctccgattccttcagagcttggtgatcttgtcaatctggttgactttgatctcagcatcaattcattgtctggttcagttcctcaggagctaagaaagttaagtaagttgcagctaatggcgattggcgataaccttttgagtggtactttaccagtagatttgtttagtgctgagagccaactgcaaactttagttttgagggaaaatggtttctctggtagtctacctgatgtgtgctggtcgttgccaaaattgcggattcttgacattgctaagaacaacttcacaggactgctgccatattctagttatgattcagaccagatagctgaaatggttgatatctcttcgaacacattctatggagagctcacaccgattcttagacggttcaggataatggacctctctggtaattatttcgaaggtaagcttcctgattatgtgaccggggaaaatgtgtctgttacaagcaattgccttcgaaatgagaggagacagaagccgtcagcaatatgtgcagcattctataagtctagaggattagattttgatgatttcggacgtcctaatttgacacaaccgacatcgaaaaatgcttcttcagggataagccgcagaacagtaattatattggcagcagtgggtggtggagttgcttttattcttctttttgttatcttgccaattattctggttctatgcatgcgccatagacgcagagcggcacaaagaggaaataacgacaggccaaaacctgccggggaagcttcacaacaaccacctaaaggagcacaaacctttgatttgtcacgtcttggaaatgcattttcttatgagcagcttcttcaggcaacagaggaattcaatgatgctaatctgataaaacgtggtcattcggggaatctgtttcgtggtttcttggaaaatggtatacccgttgttataaaaaagatcgatgtgcgggaaggtaaaagtgaaggctatatatcagaactggagttgtttagtaaggctggacaccagaggctggttccctttttgggacactgcttggagaatgagagccaaaagttcttggtatacaagtttatgagacacggtgatttggctagctctttgttcaggaaatccgaaaacgaaggtgatggattgaagtctttggattggataacaaggttgaaaattgctcttggtgcagctgagggactctcttatttgcatcatgagtgttcaccgcctctagttcataggtactactctcctgctcagcttctcgtaatataatcttgatattttttaaagcattgacatagcaagactattggaagttgttttgttgattctgtttttagtatcatataacctttcatgttcataattagtaagatctattcaagaattgttagtgtatagtttcatagatggagaagcccaatgacatcacctgctcctaaattacttcttgttgatctatgctctattgcctgataagaagaaaagcgagagaactcatgtgtgtgtttgtgttcaatgttaaatagggatgtacaagcaagtagcatacttcttgatgataaatttgaggtacgtcttggaagcctaagcgaggcatatgctcaaggtgatgcttatcaaagcagaatttctcgtttacttcgattaccgcagtaagtgcttattacattaacaaactctctggtccttttctgttttactttgattccctaacatgactctgtatgttgtcttggcacctactaatgcttcgctgtctcttcttttcctattcttgcagatcgagtgaaccatcttcttcaggtatacacttaggagaataaaaatttcatcaggatataccatctccgattaaccgatagacatctgattggtttattcttttcaggtgtaacaaatgcaatatgttcgtatgatgtctactgctttggcaaagtgttacttgagctagtaacggggaagctcgggattagctcgccagacaacgcacttgcaaaagagtacatggaagaagctttgccatacatcagcacaaacgagaaagaactagtaaccaagatcttagacccgtcattaatggtggacgaagaccttctagaagaagtatgggcaatggctatcattgcaaagtcatgcctaaacccaaaaccaacaagaagaccattaatgagacacattgtgaacgcacttgagaacccactgaaagtagtaagagaagataccaactcgggttcaggctcttcccggttaagaacaaactcgtcgagagggtcttggaacgctgctatatttgggagctggaggcagagtgcgtcggatgtaacagctgttcaagcgggagcaacaacaagcggtggtggtggtggtggtggtggtaatggtttgagaaactcggggtcgcaaggaagtagcggaaggaacaataacaacaacgggaattcatcgtcgtcgagaagacggcaatctagtgagattgtaccggaacctgctgcttatggagtagtagaggataatttatgattcgtttcatcgattcttttgtgtcgataataacagaggcaaagagagtcctcaaaggtagcataatgttagatgggaggaggatttgttttttctttcttttgttttgtttttgggtttaggattggtgggagttagaaatgttagttcactctttgtttttgttttttggttcaaacgtggattttgtaaattgtaaaattcttggagattgggttttgttttcggtttctttcttattgaaagaccagaaaacaaaacaaaacaaaaaagttgggttacatttgtttcagttccaccattacttattattcttgtatctgatttcgtacgtgtgaattttgttgactatttcatttgcacgtggcaagcttttgatatgtatttggacaaaaagtgaaaggaaagatacttcttccttttgttggatctgatttcgtacgtgtgaatattgttgactagttcattcgcacgtgggaagcttttgattcatattgggacaaaaagtaaaaataaaggttctaccgagaattgaactcgggttactggattcagagtccaatgtcctaaccgctagaccatagaaccattatgtttagagacgtaaacttataatatatatacgtatgaaccaaaatgttgaagttgtaggatttttggtctgagttacctgtaattatatttaattatttcatacactgaacttaatttgaaaattacaacattacaaacaaaaattgaaattctaatgagttacttttgccaaatctatcatggttagaaacttagaatgattaaatagctaaactatatcccaatatataagatgttcttatgtattttatttttgtccattatattaaaacttaaaataaattttcatattttctaatcatttctgttatatgcaatatttgccacgattggttgaattgttttaaataaataaataatattttgtaaagaacataagtttcttaatatatgtgatttaactaaaacatcttataagaaattggacagcggaatattattttcttgggttatttttgccaattctcattgatttaataagttggttgttaattggctatttgacagattattccataccaaacaaaatttgaaagaaatctccaaaaatatgattaatactgtaaacaatggggaaacccatgcaaagaagtcagcaagtgggttgtagtaaaatcagcacatgtgattatgagctttgggattctgcataaacttctgttcactaaccaattaattatactatattactcccaacccttacactaacttattactcttttacatttcaaatctcacttcctccacattcctctgtcttcatggctctctccatcctcttccttctcctcttcattctcttctctatttcgccgtcaaatgcacagtcgtttatcggagtaaactacggcttactatccgacaacctcccgccaccttctcaaacggccaaactcctccaatctacctccatccagaaagtgaggctatacaatgcggattcctccatcatcacatccttggttggaaccggtattggtattgttatcggagtagcaaatggcgatctcccgtctatcgcctcggatctcaacattgcctctcagtggataaattccaacgtacttcctttctatcctgcctccaacatcattctcatcaatgtcggcaacgaggtgaatctttttctttatcaaattattcacacaagtttttctaaaattaattttcttgatattatttttgtaaactcttttcctccagattaggcaactaatcgcggaaaatgttatttaaattaaatgtatgcttgcttgacaaaataaatctctaaacctctcatcgttgatatgtaggtgttgttgtcaaatgatctgaatcttgtaaaccaacttctcccggctatgcaaaatgttcaaaaggctctcgaggcggtttcactaggtggaaaaatcaaggtgtctactgtccatgcaatgacagtactaggcaactccgaaccgccatcagctggttcgtttgctcctagttatcaggccggtttaaagggcattctacagtttcttagcgataccgggtcgccttttgccatcaacccgtacccgttctttgcatatcagagcgacccgagacccgaaacgctggcgttttgtcttttccagcctaaccctggacgggtagactcaaacactggaatcaagtacatgaacatgtttgatgctcaggtaattaactaaagttataatatataatctctcacgggttggtttctggactattagttaatgcgatactattataacgttataatttgaattttctctacaactaaacattttgttaaacttgcttttcatattgcaaaatatataggtcttggttttgaaattggtggaccgtttaatatctaattgatataactcacaatccagctcaaacattaatattttgatacaacgcatttgtttatttggtatcaatctcatagtatggttcatttgttataatttattgttgcaccgagatcttcaattctttattgtaattatataatgattgtaaatcatgtaagaagtctgttagttgaacgttggaaatataatttattatccaacataaaatattcggaacttgttgtttctctctacatttccactaactagaaagaaatcaaataatctcattatagtaaagatagaagaaacatttgtttcttgccacacacgttatactgatccaaatagggggttttccttaggttgatgcagtgcactcagctttgaaatcgataggattcgagaaagtggaagtgttggtggccgaaactggttggccatcaaccggtgacagcaacgaggtaggtccgagtgttgagaatgctaaagcttacaacggaaatctcattgctcacttaaggtccatggttgggactccgctcatgcccggaaaatccatcgacacttacattttcgctctctttgacgagaatctcaagcctggtccttcttttgagcaatcttttggccttttcaagcctgatctttccatggcctacgacattggactcactaaaactactagtagccaggtactacgataccataataatttcatttgttaaatatgtaaaaaaaatttatataaccgggggatcttggacagacatcaacactaatctcccacagcgtgtgaaaagcctgatattcttgctatttaaggcaaacggagttgaaactactacaccaccatgaattggttatttttcgagatacttaaccgtttctattgaatcttttttggatgatagtagacgtcacaatctccacagttgggaaaagtaacatcaatgggatggtgtgtgccaaaggaggatgcaactcaagagcagttgcaagatagtctagattgggtttgtgggcagggaattgattgtggcccaataatgccaggaggagtttgtttcgagcctaacaatgtcgcctctcatacagcctatgccatgaatctttatttccaaaaatctcctgaaaaccctacggattgcgatttctctaaaaccgccaggatcacttctgagaaccctagtaagttattttcctcttcatctttcatatcctacttgttatagaatcatgagttggtaagtatgcatttggtggaaacaaattttactaagagaaaccaattataaacttatatttgttttttgttttgtttttttagttctttttctgacctgaaattatatctaaatttaggtggaagttagatagctaggaatatgatacagactatttgatattagatttctaaagttttcatgttattcgtctacattaagaatgcgagttatagttgttacacatttccaacttctaaaacttgagtggattaataattaatttataagactacaaaaaaaaaaagagagtcgtcttacattttcctataatcacacacactaacatttcttttcattgttttggctttcttgtttataggttatagcagttgtgtctaccctagagcaggagatggaagcataacaggagaggtgactaaatatgtgacttcagacaaagcaacggagaagaatggatcagaatgcttctcttctctgtatttggctcgctttatcatctctatttatttcttctgtcttttcccctctttgcgaattatgtagcaattgcctcttagttcctttttcagatcatctatcctcttatttcactttttgggttttcaggtttaggcctcgagccccattcggatattttacatattcgagtcgagttcggtttgcttcggatccgaatccgaaactataagtaaaaaacaatcaaaaaatatttgaaagtaactaaactatccgaaaactaggttaaaatctaccataaatccctaaaaatattcgaaaatatatgaattagctggaggtccactagttcgggttcggttcatatattacccaaacccgaaataccatatcaccaagatccattagggtatttctcaataaaagttcggatcaggatcagattttttggttcgagttttaggtttttgccaggccgatccagaaccttatcacggtttagtttcaggtttggggttttggtttaatgatataattagttcgacttctaagtgtatgtacggacagatttacgtagctttatatttttatttaatatattttccatattgttaaatatttttgtttataattttagtaaaattttataaagaattatttccttgattatccttatattatgaatgttaatatttagaatttttttaattcttattctgtttccatatttttatttaagatattttccatattttaaatatttcatttataattttagtaaagtattacaaataaaactttggaatttgatgaaaaatattttgaaagtgttgatattttttaacctttagtatgtctccatatattgattttttccattttacaataataaaaaatatataaaattattaaatctaaaaaatgtcaactaatctaatggcaagaaatgttaactaatggcaagaaccaaacagcttcaacttttctatagtatagataaattcaacaagaatctatctactaatagacaatttagaaggaaaaaatggaaaattgttaattttatgatatattcaaaatattgatatatggtaaattattaaaaatatttcagataatggaaatggtatgaaagttgtaaaatggtggattatatatatatatatatatacattatgtatttacaaattacaaacaagaaccacaacaaagtcatttgagacatccaaaccatgaaatcttcacatatagctttaatatgcatagtcatgttctctctcttcgctctacatgagagtacgtataggtttttctctctaaatatttacacttaatgtataatatatacaaatgatctctcttttttcccattagtcaaatttttgtgtattttaaatcaatgtgtaggtagaatggagggtggagctatacatagatcgatgctcaatattacaataccaccgtgtatcaaaaccttttgcaaggtactaacatttgaaaagcattgttggtgttgtttcggaccgagagctaagaaaaaactttgttggaatgaacaaaaatatcctaacgccaaagagctatgctacgctgggtgtataatagaataataatatatgtctcttattcaattttcaggcttctctaaagtattttaattatctataaattttaacttatgttgtctatggtgtgatccacatgtgtatcacatcatagtttccatttaacgtttgcaattacaactttcaatttacatacagttccgatagataaacatattaaattatgacaaattttggaaagtcatctctcatattccaactagaacaaatacataaaatatattttattcaaatgatataatatgtcatgggaagatgttcaagttaaagaacaattagtggatcataattccactaattacctaatccctgaatatattggttatcgatgttacatcgctggattacagagacctaaagggagacatatccgctttgaatggtaaccacttaacactttaaaacagtgtatacagttttgatagttaccaatcacaaaagctttaccaaaagtattacataagattttactctcagtatttttgtatagttttttgtataatttttggttttcaatcagacccatcgtttttgagtttagcctgatatttttttcaggacaacgtggatgtatctatcataagggccaagaatgtacgaagaagaacggaagaagcatatctccagtacaggcctagttgaaagcacttatgtgggttatgccatatattattaagcactggtaaatgacaatatagctgtttcaactgattgcaccgagttagtgtagaaatctagaaaatgactacactggcgggttagccaacattttcacgcatttaatttagattagttcacaatgatgaatgatttgtttttcttctatttcttacattttccaaaaataaattctaaatcagatattctaccacatagtattcttgagcaccggcaaatgatacaataaaaactatactcattttttaaaatatatagcataatatattctaaactattagaatacaattatataagttagataaaaaatatcttaaaagtaccattacctaataaatttattatcatgcaatatgttatttcgataggaatccataaacatatgagaaacaaatttcacaagatcttataatatatataaaaatcatgtttctaaattcccaagaatttatatatggtagtgtaataagggcctagtaataatagtattcttcttgttacaaacatgatctcttcaaaactgaagcggattctctaatttcttagtatatctaaaggagatccaaattgacaagaaagaattctctttatttttagtttttcgtagtgcgaatataaaagcggatctttagcataaaaagtttgtaccgaaccgcatcatgtcacttatgtaaacaatatcctttaggaatgatttgtttgggcatcattacttaagcggatgacaaaaaaaaattgtttgcaaaactcaaaacctctctcaaacattttaaaggactacttggtttccttttttaatcagatcacaaagtccgaatctttaacatttctcttacagaaatttgattccttcttcgtcaaagcagttacttcagtcgctgtagaacatgtttgacagattgcaattgttctacttctatggtcggattatggactatcgtgagacttgtatgatctatgctctaaacaaaacacattaacatttaagtaagctaagatattcttccatgaaaaaacctaagattttttcttggaaagtcaatgaacctgaagacaaatatttttccgttttttttttcaatttttttttctttcctaaatcgaacatataagaaattttagggtggggataaaaatgaaggaattttagggtaaggaatttgcattcatttgaataattgtgtgtttattatcaacgtgttttttttgcaattgcttacgtaaattgttaaaacaaattcgctgggatttattttgcttttagtattttctttttccactacctatcttatataataaagtaaagttttataaaaacacagagtttaaggatacagatttgatcatctattatattagattttgaaattcaaaaagtttaaagttattaaaatacagatattattggatggggaaaataataaaaatacagatttgatttaatcatctattatattgcattttacaaagttaaaagattaaatgtaacaaaatacagatattgttagaaggggaaaataataagaaaacagatttgatcatttattaaattagattttgctaatttttaacaaataaagtaaacattgtattgttggaaaatagtgatgtatttgaagtaaataaattgtgcattaacataaaactaagttgtttaatttttttttttatagaaaatgatgaatttggagagaaggaaagtccttaggtgacacgtatcaacttctggtgaagtgagttataaggagaaccctactttattctataagattgctaggtttttctagggcttttgttaattaggttatctaggtgtcttaatatttaagtcttaacaaatctccttcttcttcgttcgatcggccatcatgaattc

SEQ ID NO: 235 - DNA, 56284 bp, Arabidopsis thaliana
ctctaacaacattcaatccctcaacaacttgaccaaacacaacatgtttcccatcgagccacgaagtcttctcagtacaaataaaaaactgagatccattcgtgttcgcaccagcgttagccatagacaaaatacctggtcctgtatgtttcttgataaagttctcgtctttgaacttcgatccatagatagattcacctccggtaccattcccggctgtgaaatcacctccttgacacatgaatttcggaatcactcggtgaaagcttgatcctttgtagtgtaatggcttaccttgtttaccgattcctctctctccggtacagagtgctctgaaattctcggcggtttctggtgttgtgtcggcgtaaagctccatcacgatacgaccggcggatttgccaccgacggtcatgtcgaagtagactttagggtttgttgccatttctttttttctctgagattgattggagaagaagattaggttctgtgattgtgtgaaagagattagggttttggtagtgttttataaagagaaggaaatgatttttgtgaccgttgattttgacacgtggaggaagattgaaagggttcgtgttaactgtggttagtgttgaatctaactagggttaatagttgcgtggatccgaggcagagagagaatattgtgttttttttttctctacctttttactggataagatattaagtagtcgtttcattgatttatttacgggccaggaatattaagcccaatgtcgtaaaaagaagcccattggtttggagataaataagagttccgataatgtacatgtacttagcccaaaccactcttaaataattgtagagactgagaggattagcttcatagagcatcataatagtctaatgacacaactctcatattttaaaccttggattatacgatataatttccaaatacaaaatttcaacctatattgttaatctaatgattattcaacttttctttactatatacatgaactttcgaaagagaattatcattttaaacaaaagaaaataatcttgacaaattacaaaagttaaagaaaattgtttccttgcaacatctatagctagagagagtaaagaaagcattacagattctgtgaagttatctctaccaacaactgcaacgttactatcgttcgtgtgttttcggtttcttatctcaagccccctaacaaagcgtgtgagatctacttcttcttctttgacttactcgaagattgagtgtacgaagtaccctgcattacacaatacattgagagcaatgtatcaataccaaaatgttcaatacattaaaagttaaaacccattatggagaaagttattaggtcttgtgcaacgaatacctcaagccattcatcatgcgaagcatctttagttgcggttccaacttcaacttttggtgctctctttgttttctgcgcaaagcattttcacagtaaccattctcaaagttagtaccatggaatgaaagtgcgataagatagcgaaataggatgtaccttggtcatatgcttcaaaacattttggatatagatggcgagaaaagcgataacaaagattaaaagaccactaaggaagactgactccattctgaagagaggaccatcttcaacaacttcaatagttccattataaaagatgctttggtatggcttaccatctatctcatagatgatggtgccaacaaaatcaaaagcacccgcctgcacgagcaaatggttacctcggattctattctatattttaatgtcatcttggagactagaagaactatatgattaacaaacatacctgcaggaacttgctgacagcaaaagcatatggcaaggtagcttgagcggaagttggcacagacgcgttgctgaaactctacatttagatgattcgacaaaatgaccaaataataagtagcaaacttaaagagcaaaggccagaaaaggaaaagaggagaaaactctatattcagcaaaagccattgtaagattctatatctagaaatgaaatggaatatagctagagccaaagcaagtatctggtatcaaaacataaatgataaagattaaaggctagagagagactttcttgcatttagatacagggatgtaacaagttcaggtattgttactaaaccatgaatgacctaacaaagagtgcatagtgtggagtaacatgagatgagacaaaacaggcaatgaaaagaacctaacaaagggaaaaactaatatggaaagacaagtgagatcacacaagcaataaatgtgagaagaagcaaaagatgattaattaccagagcagtgagattctgaacagcattttgatcaaaaggaagatgtaaactgcctttaacagcaacaatatctacattggattgacctattcatataacccaaccacaaagttagaaactttatagctaactttgcaagtaatcatttgatagaaaaatcactttcattaccatcatttttcattccaacaagcagctcagtctcaactccagcttttattactacagaaaatcagacaaaccaaattgagaagaagcctaatttcagaaattagattaaaaacagagtaaaaatctgtactttttgcactgttcttggggaaaacgcaaagggtttcaattccaggagctgaggtaagttccaaaccaaaaacttcctctgcatcactctcttcttcaccaacatcagaaacttcgaagccagaatcttccgaatccgattggcacaaagcaactaaaaacaaacaaaacccatcacaatgaattcaaacaaagatcatgtgaacaaaaacagagtagaatcagcaaatgaatgaacaagtagaagagaaaggtgttacctttgagaaaaggtgagacaagtagaaggaaagcgaagaagagaagtctaaaacttgtcctcatgatggttttgagattggtttagttgaattgatcttcgtgggttgaagtaaaagggcgaagaaagcaagaagacagaggtgcttttgtcttttgacgtgtttatgctttcttcaccgacgttgacgaagaacgacatatgaatgtgagtgtgtgtgcagatcggattttgtaaacgacgtcgttttccgacttaccaatttagaaacaccttgcccataggtgttataacattttagtacaaagtgtcataattatggccgaggaacataacctataacccctatatttttggacaattggggacagaaatatggcaaaaccagaatattctatgagcagctgcgtttagattctgttccttggccgtaaggaatctacacatgcatgatgttgactttttcattttctcacaacagcctttaggcagtttgcctccgtgaccgttaactagaaaaggttggacgcaagctagaagatccagattgcaaaatggtagctctttttttgcaccaacgactttgatcggagaaggaaatgatgctaagatcatcatgatgatggctatgagtatccatggactgatcttcattgctaatgtattagtaactcgaaattacaatcaaaataagatgagtttactttgtagaaattaataatctttgttttcttcattttttagatgtctttaaatagaaaattgagaaacaaaacaatatgggaagtcggagagatggaaggatggttgtcctattgttagctctgtttatgtggagttttattcattaaggagctcgtcacgtgtcgtcagctgctccactatctcctagatataggaccccatgttcggtcccgaactataccatatgaaagtataaactagtatagacttggatgaccaaagttgagtcaattataatacatggtgaagtatgtatactagaaagcaaattctacaaaactcaaatagacaggaataataacttaaatccattcacaaaatatctgcttgaagtagaactttgaaccatcttgaatggaaagtagaatagaattgaggcagccacgggatatccaccaatggtttgatccacagaatctaaggttcgaagcttgaatggtcggatggatgaaggtagtgatggggatggaagttttgaatgaatccacactcaccataaaatttaacaaatagattgctactttagttgtgttatacaactgtacggcttctcacaacatcgtatatatgtacgaatgtattttagaatactgcctttgaggaaaagtgaggcaaggagaaggaaagcaaagaaaaaatgtatgatccttgtcgtcatgatggttttcagattggtcttaaattgatagtggtgggttgagggcgaagaacgcaagaagacaaaggtggttttgtctttttgacgtgtttaatgcttttggtgttgacgaaacgacttcgttttcacttgtcaatttagaaacagatattactagcagagatcgataactcgacttttaaggtaccctggaaaatgctaaaaagtcacaggatcaagtgatatctggaacacgtaaaatgtcacaggatcatgtttctgtgtgttagttacaaaggtggataaagtattaataataattttcgcttaaatggttatatgtttcttaaatggttgtgtattgaagctcaacttgtgtctctcgagcttcaatcaatcatgtcgtagatatagtcgaggaacataacttatgtataaaataaattaagaaaaaaccataacctatatctctagatttttggacaattagggacggaaattttgcaaaaccagaatattctatgagcagctgcgttcaggtcacgttccttggccattaggaatctacacatacatgatgttgactttttcattttctcacaacagccattaggcagtttgcttccgtgaccacgaactttaaaaggtaggacgcaaggtagaagctccacattgcaaaatggtagatcttttttggcaccgacgactttgatcgtggctggaaatgatgtcaagattatgatggtggcgatgaatatcaatggaatggtcttcatgatctgatgaattagtaacttgaaattacaatcaaaacaagatgagtttactttgtagaaatagtcttcattttcttcttaattatattgtctctaaatagagaattgaaaaaaacaagaaaatatggaagtcggaaagaagagaggatggttatcctaatgttagctctctttaattatgtggtgttggattcattaaggacctcgtcaatcgtgacgtgttgtcagttgcccatctatcttctagatataggatccgaattactaagatatgaaaatgaaagtataaactagtatggacttggatgaccagaggtgagtcaatatatacatagtgaagtatatcacaactagagagaaaattctacaacaaaatgcaaaatctcaaatagcccatgtaattaggtctaagcaagtagattcctatgagacaagtccataatattagcccatgtaattaggtctaagcaagtagattcatatgaatggccttgtaagaaacaccaatggtgttaacgtagagaaattccatttggagaaactctcattctttccccttttatgaaatcaatctaaaagtcaatctaaaacaaaaacaaaaaaaaacaaaaaatcaatctaaaagtcaatttgatattggtgttctaaacgaagctttcctttacttattttgcactaaataaagctccattaagctatttcaacttcttatgttatatatccatcttaacaaagcttgaatatatcttgttttgattctactcactatctctgtaatggaccacaaatctcttctctcctcttgttctcctacataagtcgtaacatgtccctttggaactaagcctaaatttggtgttgacgaatattgtgacttccggtttggaaacgtaaatatatcgcattaaacccatcttgagtaactttatcagattgaggaggcagaagtttatagcgaagtggcttgaaataaaacaaatacaagaggggtttttatttatgataatgctcctgagttcaaaagaagataccttttcaaattaacgagagttacattatgatcaaaaggtgtgatacgtatacattttcaagatgggcaaatcttgaaatgcaaaataaaataaaataaatttctaaagaacaataatgtaataagcccaaaacttgtgggctgtttggatcattctgttatccatatgtgatctggctaacatggcttagcacatattttataaacaccacatactaaagatgtgtgtatatataaataatgtgactttaatcagaccaagtgggacttaagtcttaacgatgacctactttatagtgatagtttatactttataccatactttgagaaatgaaccaacacatacgatgatctgtcctttccaaaactaggggccgtacactggtacgcatgaagcgaaaggtaattgttagatggatttattttgataagttgcagcttatataatagaaagaattatagggttcatttttgatattgctcttatagttacgtttaatatctgtttttaaataaattaatctagtaatttactaattaatatcataaatgcgaatgaaaatatagctttctttatgcgtttgcattttatacttttacaaaattatattatatgtcaatttgcgtttagtttgcgtttattgtggagtgaatatgaatgagtgcaccactatttatcgttgatgactatatttggcaacgtttagaacaaagtaatccggaggactaaattataactactactaaaaatagaattacacagaaagaaatgtttatgttgcagctattttggaggcaatgattaaagtgacataggcactcttttacttattgaggctctataaatcatgatcaattatgaattaaccactttttctctatgccattgtggattccagcatttttctagttttttatagatttaggtacttataacttaatacatcgaccgttttaccctttaatttaatggattattgactttactcgttatgttttttttttccttctcgtttcgtttatcaccgaacgattgcggagatgtcgtcaaagtcaatcgctctcccataaaattcgattatttcgctggctcttcaatgacatgaaacctactgctgaactcaccattgatgctcaattgcttctccatctcctcaaccaaaattttgattcagatccagcgtcgttgatcttcttctttgacgaagcatgcgattatcatccataccttttctgaattttaatttctcgatgtaaatcagaattctatcatctctcgttttatttttaaagagaaagaaggaaaatcattaaaatcttaatagatttgattattttaaaagcgtttatgtatccatttagggtgtagctttcttccattaaaaacagttatttgattctattgggttgattagaacaaggttgttggtgtagagatgtttgtgaggtcattgaagaagaagaagatgacattgattcaactctaggggtaattttgtcaattcagttcatagaaaatgcctaactctattagcccattgtaaaaatgctaaatttcaaatttttgggccaaaaagcacctattgctcccctataaaacaagatatctttatccttctttcactttatccattatgctatatagcaagtaacaagaggcttttgtaaatatgagcatattttaacccaaaaactagaataaaagcataattcacttgggcttataagcctgggtactttttagtccgtgaaatgacaattttactctcgaatttgttgatgataatccagttattcttctccgtcgtgagaccaaaaaccttcaccgtctccaccgactccaatcctctccgtcgtgataatcgatttttttttattaacactgactcaacactcaattaaaatcattactttcaactccatgaatattgtttccttctcctccgatgactaacacaatgtttctatgaccaacctttttcgatgaatccaatggcattaattaaacaagttttgatgaaagaaatctaaaccctaagggatgatgtttagggaacccaagggctctaattttagatacggatcgaatcatctaaactgtaaaggataatatctaaagaactcagaataatcatgtatacaataactaaaaagcaaaccgattgtgaatcatgagcaaatcctaagtattttcatcaaaatcgcatatgattcacatatgagaaaaagagggcaaattagttttttagagaaaaagatagtacccatccttataaacactcaggaatatgtctaagttcataatagaccatactttatcgtggtttttccataattgatcccaagtaacaactcatctataatttatatgaaggggacatattgcatttatcttccctaaaagagtttcttatgtcaagaaaaaaaacatttgacaaatttgtcttaaaataatcaagggcaattctttcttataatatgcaagctattaactttaaacatacgttttctatttattttacaaaaattgctatccctttttatatgtttgtggcagtatttaagaaagtgtgctaggcggccgtctaggcgtcgcctagacgatatgcgcctttgtaccgtttccactttcttaaaatcggttttattaggcactcgagtaaatttttgcggactatgcggattttaaatggattagacggtcattagacggatttaggcgggtttggcggatctaaatgtgtcttaatattttaaaaatgtttttaaaatagatatttaaagttgtgtttaaagacacctatatttttcattattttattttattttagtctaaaatgttaaatttaaatatagtttcaaagttttgataatttttagcttttcataatagattgtcaacatttaatgtattactatataaatatatattattttgttataaaaccgtttaaaccgcctaaaatgcctaaatcccgactaaatgttttaggcgctaggcggagggtcaccgcccgcttagcgcctaccgttttcttgagtacttgtttgtggttgaattagtacgtattatctctcgagtacttaataattttaaatttcatcaagtcgatttcatataaagtagagactagagagcatatactctaaatgaagatctgttggtaatttatttgcaggaatgactgatcaaagtagtaaataatttgagttattccttcaacttttcaatagcgaccatacatcccagattcgagtaacttctatttttaactcttcaagttatctctaaaagaaaattatgtttaaatcacattagatatgtgtatatttaagtgggctataattgagtaataagtgcaacagaagacatggatggttaaagaaatatctggtccaaaagatgaaacagaaggaacagagtgtgacatcatgaacgtgcaccgtaactatatatgtcacaaaccatgggcgtacagttacacaaccaatagataaggttgatcaagtaattaggcatatgccatttgtagaaagctaaagagtgtaggatcgatatgcatattgaagtgaagagtaacatggcgttcatgtgctcacagctaattaacctcaagcacacttaatgtcatcatcctacaaaactaccaaaataagaccaacatctttttgtttagccaagcactttccgcctaaagcaccaatgcgagcaaggcaacaaatgcgatgacgagaggtgaacaagcgccgatgtttgtgcccacgacttccccacgaaggagaagccgcgggcaaaagtgtaaaccaaactcaacaattccttcaaattaggtacgaaacacaggccccggaactcatcatcgagcgtaacatcgcccgtgaattaactgagaaggataggtggtaggtagttcgatgcgcgagcatggagcctacgaacactagctattcgatcaccactcatacgccgaacgttcaattaactcaaaatcatcaatcgttccaactaatctaccgaagtactcggctaagaagaaagaagacggacgaatccgagccaaagccgtacaagcgcgagataccttcgggacagcctaggcggatccatgctttccaacgaagcacgcccatccaacctaggcgagacaagggttcacatttcgttcatcacccttggccggctttcgaacagccggactcccatcaaaagatggttgccaagaacatcttcgttacggtttgctaattctcggaataacatcaacaaaactaggaaggtttaaaaaacccacggtagtatgaagtgataactttctcggcccttagggaatctccaacccatccctatttttgtccctaaactctatttttgcctctatttcactccaatccatctctattcttatctctatctctattttttctctatatatagagataaaaaatagggatctctattttttccccttttttccttctaacaaatagagatctctattttgagaaaccattagagtaaaaatagaaatctctattttttcttctatatttacaagaaaaaatagagacaaccattggaaatggtttaacaaatagagaactctatttttgaggaaccattggagtaaaagtagagatctctatttttccctctaatattgaggaaaaaatagagacaaccattggagatggtcttagtttagtcttctatccattttctatccattttctatgcataattaaattcgaattttcctaactctctcatttttcgatgaccaagtgataggccggttgaactaccaaatttacaagagaaaaattaagtgcattgatttaaattgctcaatagatttgtaaggaattatttacataaaataaaataaaataaatgacataatggaatcatgtcctcttgtgttccaatattcacgtttcttcgatccattttctgtcatttggctgatttttctttcgtaatttatataacgaaaaaataagccaaaattaattttattgtgaccaagaaaatataagacgtgttaaaaaaaaattgtagcaaatttggagaacatgtatgctaagatctgccttccgaccagctccagacttgtgtctgtctttgcattaagggttttgaaagccatttggttcatataagacaatattttcgatttcatgaattcatttttatttaagcttttatttttttggtttggttcaattgtcctgctattatatatttttctttcatttttatgttgtattatacccgttgtttagtacggttcaattttcttcttttgttttttctttaaattactacactatagtaattgatcacttaaaaactattgattacttaatatatctttgaaaatacatttgactagttgtttgtattagagtttagtttttatttttggtaaaattttatttaaattttttttagcaacaacatgttattgacaaatttccaaaggttttagtaatctttttaactcaagaaaaaaaatattttattgaaaaataacaaattattcaagaagcatcattatggacgcattaaaaggtatttttaatcatttttaaagtgaattttattattaaaaatatatgttttatatgccaggtttttagatatatatattgagatcactatttggagaatggataacaggtgggtgccatgtacccctaagttaatgccctttttaagctctcattgagatcactatttaagaaaggtttcaactatttgcttggtgcccgttttaatttctcattgattttttaggttttatgcgaattataagaagcgttgacaaaaaaaaagaaacaaattataagaagtaaaaatatttcaaataacttatttgagccaatgatatttgtatctcttataatttagaaagctagtgtcattagaagaggcatgttggtgaaggagcgaaaaaaaaatagagaaaacgaaagaaaggaaaacatattaaaattcaagtaagacttatatgaaggtttaggttagacttttgaggttatgatttcaattttgcgattatatatgagtttcgatgtagattaaaacggcgatttaaatttgagatgttagaacttaagtttagattcccaaactagggttaaactataataaaccattgagatgaggaatatgaacaatgccgttgtatgttaacacacaaatgtttataattgtaagaacttgtaaaacttcccaaaacttattaaagtttgttaaaaattttgatatatagttgaaaatttatttatatcaccaagattcacattccaaagttttttttttaaaaataaaacttttctgaaggctattggttgtatcaagagaaatcattgtgaacatattacataccaatcgaaaatataacgtatgaaaaatacaataatataaatcatttttttctctggaaatgaataaataaaagtgttagttattaattagaatatgtgaacagataatttgcaaatgaaagtatcaaataagcgatctgcctaattcttctgaatattatataaaaaaagtatatatagaaaaaaaaagaatataactacaataagttgagctataagagacataggtgtctctcctaaacacatggggccatagctcccaagaaaaatgcagataaattttttgaaaaacaaatacatacttgttttagatatgacaatcgtctacctttaaaccgttcatcagatggctttttgaccaaatcagctcctttgattatggaaattgcggtctatttctggggagatcttcttttccattttaaaaagcggtatcttttattaaaagcaagttttataacactcgaatatttaataaaagagcccacaaggccacaagcactcttttttctataaccaaatatgtaaaacattacgatttttgttctacgtgatgtcctcacatgcagtactaaaaacgaatgggtcacttatttgttcacgttaaatcttaaaacaacgagtatacacgatcgcagtttttttttatttgacagcactaagatagatgtataatgggctgaattttagggaatcacactgaaacctaaccttggaaaaagatgaacagagttttgagaaacaataacaaaataaagagaaaataagaaacggaagagagcacatgggtggtgtgtgcagaaggaaattaaaatagtaactgaaaaataagaattttgtttgagagtgtcacaagctcttcctgaccacaagtcctgcccttctttgtactcttcagtacattgatgtttccaaagtccgtgattgacgcactttaacaacacctctgctgtgcaggtagagagacacgaattgacacatcttgaagtgttctttcaaatatgccaattaacattaaaagaaaaacttaacttaaaatattttggagatagatatttgtaaataataaaaatttgaaagtgatacaataaggacatgaaaatatacgtaatttttaagtcaacaataatctaaggattttcttaaaagatgttgagtcattgttccataactcgaatatcatttgggggagatgattgacgtgggcaactaatattgaactcctagaaacagcagtttatggggatgcgaagaagacttcaggtctttttttttgtgaaaatctattgcagtttacctatctatattatatttgggtttatcttttggagctcaaaaattatcaccatcactttccctaactcaatggaccaatggttatgacttcatatagtgtgtaactgaccaacttattgtgggtgtgagttttgtgataatgagaattaattagcatgcagttagccacacaaaaatactgtgtttgacatgtccggtcttattccacttcaattttttttttctttccaaaaccattaattaaagatcaggccatactaaaacataaatagatccgagtcacagattttgaatccacttataacatccctaaagtagtgtatacatatgttttaaatccacatagcaattatgggttatcttgttacaaaccaggtggagatccaagggaccataatgtcataactcataagaggaccaacaaaaaatggttataacttctaatgacttttgccattgtggcttccacacatatatctcactttttcacttagacacatagacattacacaacacatgcatgcctttataaatatttacacctcctccttcaatatccacccaactctctctctctctctctctccaacaaccagaagattctctcaaaccaccaaaaaacaaaaatgtccattctcaagaaatctacaaaactggctcaaacagcaatgcttaggcagattctgaagagatgttcaagcttggggaagaagaatggaggaggaggatatgaagaagttgatctcccacttgatgtacccaagggacacttccctgtctacgtaggacacaacagaagcagatacatagttcctatctctttcttgaccaatcttgacttccaatgtctccttagaagagctgaggaagagtttggttttgatcatgacatgggtctcaccattccttgtgatgaactcttctttcaagatctgacttccatgatccgatgagatctcaacagtttgaataatcaaactgagaagacgaggaagaagaagacgtaagctaaaggagattgagatcgagatggttaaagatgaattagtattttaagtagcttctctttttttttttcttaaacatcctctctctttcctttagtttaacgactcttcaatgtctttcctatattttctctgtttttttttgttctatttttaagctcttattgggtgttttttacgggcaaataaaatttgactcggctaacaaaagaaaacccacaagatgaaatttatttgggttaagatctggcaagaaagcttgtaatatttccctcacagatatttcgtctgttattgtttctgtgatagagtttaattttgatatatgttgattaatatttagtgaaaaattcttataaagcatatttaatttagctttaaaaattcataaaaaaaaattcgaagaaagagagaactcttggttttaagcgtgcttgaactttagattatagttcttacccaaaaaagaaaaaaaggaaatgaaactgttttattatttattttgtttagcataaaatacacaaatgttttttggagttaaaaaaatagacgttggtcaatatagttcacaatatactatcttactgaataatcagccgtttctctctagtctctatacataacactttagtagaaccaagatcatgtgaaaccgaaagctaattaccaaacctttgggtagagtagatacataatatatattgaattggatatatacattaaattaaacatgggttggtcaagtagttcgatcactgaaggaaccttcaatatttttctttcgattttcttaaaaactgatttcatgatcactaaacatagaaataccgaagtggtttactatgaataccaacaacaacaaaaaaaagtcactaaaacatttgaatttactgtctaaacagaagaacgattttgattttaccacttcgtttgttttgccaactcacgggtttgttctgtagttcgtgtggtagctgttcttaattcatttgttaatgtttttcttgtcttgtctccccccatggatttgtcaacgtgcatgatgataagtttattgtaacaaaatcttctcatttgaaaagatatattgcctttgtgttacataaactatactatatgaaggaaaaatgaaactatattaaaggatatattaacataaacataaagcaaaaaaaaaaaaagtcatggtgatgaagaggaattaaataagaagatttaaatatttccatattagtaatagttacaaactaaatattggtatcatcatcacatgagtctcaccaaaatagaacacattatatcttacaaaagctcccattcagaatcttctgatacaactggcacatttgactgcgagcttttggagtctatagatgttgtagcatgttccttgttgtctaccagatcacaacccatgtctgcatctccgaaccatatagcaagctgctcatattccttttctcttcttcttttcgattttatagcatccattatctttctcttgaatgatctgagttgcttagtcctgtcacgcattgcatatagcaaattatcgtcaaaatctgaggggtcttctcgaaatgtcatgtcatacaaatcaatggtatacattggaccaacatcgaagtcttcaatgaagaactcatcttgattaactttcatagagttacttctaaaggatctagtgtttgccactttgtcttgaacaggtgaagcttgagtctatgttattggagttctaaagctttccagggtcaggtgagtagattgagaagatattggatctctgtgggaacgggaagtggttgatgtttgatcacaatcactgtactcttcaagcttctcatcaatcaacacagagtctgataacttctccttaaaaccatccccctccatttgttcctccctgagtttctctggttcatcctttggaatctctactcataatagctcacacaacaacgacaaatactaccgaggaagtcgacttgacaaagaacgaaccagaagaaaatgaagaggagtggttgtgtccatacctttttcaaaaacacatttagttgtatccatcaacttattatacgtacggagtaatattctataccattaataaatctttacaaactaattaaaaagggtaataaaaagaaagctctggactgcatcttttccgaatcgacagaaccggttatagaaaacaaaatccccggtttcataatttgcaaatgggccagtttgttaaaatagtatgttattgcaaaacataattataattaatagtttgtataacataacataatttagtgaaagaaacatattgttacgtaataatcactggcagttatatcacacatttataaaaatattaactaaaaagatttattgcattttttttttactacaactattttaattaaagaaaaagcaaaggaaatattttgacaaaaagataaaagaaataagcaaaacataagcaaaatttcatttgtttttaatatattagacataaatctatttattttatataattaattggatgatcatgagttaattaacgtgtaaaattgtttgtttccaaaactttcaatttgtatagcaaacactttgacaaatagaaaattctatattagtacaccgtaatacacattcaataaattttaatcaacgaatgcatgaattctcctaaacctatttatcaatgaattaatttgtttatcagtgtttcacacagatcatgatatgaaaccaattcttccctagtttctaattacatccgactcgtaacacgagttatcaaaattgagttgcaatacatgttagaatttgatgtaacttgcagtaaaaattatgtggtataactgcagattgaagtagtgaatttgctgtagaaatatgagttaacatttttcataaaatgtttgactggtaacatttatgatgtattagtagcagtatatattattaattttttaataataataagcttatatttataaatttaataaataaaaaaagtttaaataaaatgatactatcttaaataaatttaaaaattattttgtaacataataaaaaaatgtgcttatatttgataatgagctttacgtacctatatatacataattttgtgaatgattccacaaatatataaaaattaaaatccataaatttaactagtagttataataaaaacattttattttgaaaagtcaaatagaaataaaaattaaggaaaataattgaccaagttgttggcttactagttaggattgcttagcatcattattagaattggaaacaaataaaaagttttaaaaaaaaaagaaaaaacaaaatcagtcgtgggtaggaagaaaaaaaatgaataactcaactctaactcatgagattttccatgatgttgaataatgttttgagttaacaaattaacaaaggaaataattcaaaattgtaaatcaaacataacacattctaacgcaaacttaacttcaaaaagaaaaatttagttcatgattggtaacatttttgaattatttatgagttatgtacataactcaactcaactcaattataactcatgttaccaatcaaagcattaatatacatttagacaaaactaatgcactatatatttacattgacaaagaactaacaactacataaataatcccacaattatatagttagtactatatagagagagttgaagtaaggaagcaacaaagaaaagagaggcttgactatttgtttttgctgctagctgtttttgagaaaagttacacaaaagctgaaagctaccttagtaacaattcagttcacagtattttttgcacacggtttaaaacattagcttatttggatggacaaacatctgattacaaactcatctttttgatgttactttagctattttgagtttccatgtagatgatcacgtaatgaggttagtttgaatgtctttgtcagctgtaaaagcatccagctcaagaaccttgtaatgcaaatttacttgcatataaaactcagagggtggaggtgatacagagagcaatttagttttgattaacattcagcaaaaaaagaaaaaaaaaagttttttttaggtatatgatgttttagcagatatcttttgatgaggaatgccgaatgagacttctaatatgggccaaaataaaagtaggcccaatagtccaatgccacacacatttcaaacatttatccggttgaaacataaacaacttcccagtattacacaaaacccttgaaagcaaaataaaatattctcaggaggcggtcacagtcacaaaagtcaaaacccttggccagtttttgttctatcgctttcacacagacacaaaaactgttttaagtcccaaaaatcagaccagaacaacaaaaaacctacgaaccctttttgtcttccatggcggccacaacaagcttctcctcttccctctctttaatcactaaaccaaacaattcttcttacaccaatcaacctctccctctcttccccaaacccttccttaaacctccccatctctctctccttccttctcccctctcctctcctcctccttcactcatccatggagtctcctcctacttctcctctccttcaccatccgaagacaattctcataccccttttgattaccacaacgacgaagacgacgaaaagcctcgagaagagtgcggtgtcgttggaatctatggagatccagaagcttcacggctctgttacttagctctccacgcacttcaacatcgtggtcaagaaggtgcaggtattgtaacagttagtcccgagaaagttcttcaaaccattacaggtgttggtttagtctctgaggttttcaacgaatcaaaacttgatcaattacctggtgaatttgctattggtcatgttcgttactcaacagctggagcttctatgctcaagaacgttcagcctttcgtcgccggttatcgattcggttctatcggtgttgcccacaatggtaatttagtaaattacaaaactttgagagctatgcttgaagagaacggttctatcttcaatactagctctgatactgaggttgtgcttcatttgattgctatttctaaagctagacctttttttatgaggattattgatgcttgtgagaaacttcaaggtgcttattcaatggtgtttgttactgaggataagcttgttgctgttcgtgatccttatgggtttagaccgttagttatgggtaggagaagtaatggagctgttgttttcgcttcggagacttgtgctcttgatttgattgaagctacttatgagagagaggtttatcctggtgaggttttggttgtggataaggatggtgtcaagtctcagtgtttgatgcccaagtttgagcctaagcaatgtattttcgaacatatctacttctcgttgcctaactcgattgtgtttggtcggtccgtgtatgaatctaggcatgtttttggtgagattttggctaccgagtcgcctgttgagtgcgatgttgtcatcgctgtgcctgactctggtgttgtggctgctctcgggtacgctgcgaaatccggtgtgccgtttcaacaggggttgattaggtctcattacgtagggaggacgttcattgagccgtcacagaagattagagactttggtgtgaagcttaagttgtctcctgttcgtggtgttttagaagggaagagagttgttgtggtggatgattcgattgttagaggcacaacttcgtctaagattgtgcgtttattgagagaagctggtgcaaaagaggttcatatgaggattgctagtcctcctatagtagcttcttgttactatggtgttgatacgcctagctcagaggagttgatatccaatagattgagtgttgaggagattaacgagttcatcgggagtgactctcttgcgtttctatcgttcgatacgttgaagaaacacttggggaaagactctaagagcttctgctatgcgtgcttcacgggtgactatcccgtgaagccaacagaagttaaggtgaaacgaggaggaggggatttcattgatgacggtctcgttggtagcttcgaaaacatcgaagcaggttgggttcgataatgagagagagactaatggtggtgaaaaacatctttacttgcattccaacgtttatgctttgttttctatttgacattattgtcatatttatatctttgttttgtttaaatcttgaaatttttttgattaaaatctcacatgtcattttatgaatccaatcttatttgtagacgtctctcattctcttgttcttctctaaaaataaaaaaggttattttgtgatttgaatattgtatttgtagacatcactatgtcatttaatgaggaaagtttttagtcaaggtgaaacaaaacctcacattcggattgtcgtgttgatgatatttttgctatctcttggtgtttgtatttaggtgtttttccttatccttctggaacttgatagtaccaaatctcttagtgaattatcttatataaaccaataaaaatcatataacaggatattttaagcttcccattaaaaatcttggtgtagattgttcttgttgcttctgatcacttgtattcttatcattgttaacttaatatcaacattttttttttttgcatttcaagattaaaaaaaagttgttaaatcgattgaaataaatgatgtatatttggatatattagaaaaatataattgtttattttatataaaagatatttaaatgtatgcttgattgtaacacttgagaatatctagcatgcatacatatatgatcatgttattgtaattgttattatgatgattcataatatctagcatagtagcatgcatatgcatacgttatatagttatattaattttcttcactcttattttcaggggaagagatagctgttgtactttttctcaacaacagttcagaagagtcatacatagtattaactgtttttgtaattactgctaatgcacacatattcttttccattgcttcctcactcactaaagtatcatctgcttctatttccttattcaaataaagataatatttgtttgtttccttgatattcttctctatttggtctatctttctttgtgatccagcaagcaccgccaacatatcatcactttctgatctgttagatagttgtctatctttcttaataacttctgcgaattcatagaggttttttcttgtttgatttaccttcgctataacatcctcacttattagttcataagaagccattttttatttgagagataaggtaagtgaagaatatggttgcacttgctagagaggtgatgggtgatggtggtaactcaaggtagaagattaaacatatatatagtgtgggaatgacttatgagcgaagtatttttaaaataaaaactagatctcttagataagctttagaatttagcccaaaaaaagaaaaaagaaatctcttaactaaaatttagctaagcattataatctatactagattttaacccgcggtacaccgcggagacaatttatttttttaaattaatatatataaaattttgcaaattatatctatctataaaacatttttattttatagtttacaattgttattaagtaacatccttccaaacccgttccgccaaacccgtactgtgtaaaaaacgcggtaccctgctaatttaaatttataattaaaataaatattttacgggattgcaattgtgttttagtttgtcaaacaaaattttgttttaaatagttctcgaaatctagtttaaattttggagaaataagatttagtgaattgataaaaaatgtatttagttgcgttttgctcattttaagggattgcaattgtcttttgggttgtcaaacattttttgttttaaatagttaccgaaatctagttcaaattttggaaaaatctgcgtgatatatgggattgtaatatatttggaatgtttttcgtttgttaatcaatttattgctgaaaaacacaataattaaaagccagtggcaaccattgtaaataagttccaactccaggatttatttcacaaaatggctgcaaaaatgtgtatatttatatatacatttttgcagtcattttagcaaataaatcctcaagttgaaacttatttacaagggatgtcattgccatcaattattatcaattaattaatattcctaatttgtagcatttccttatctaatattcctgatgtgaattataaatcttttaataaaaatattattcaaacaaaaaataaaaaataatttttaattttacagaacaggattagatgataagacgggtttagaatatttataatatatgaactttaaaacaattaaataacaatttgaaataaaaactttaaatttatttgaattatatatcatttaagttaaagtattattaaaacaaaaataacaaaataatttttaatttcgctgaactgggttagatggtatgacgagtttgggtcgataggtaatacgagacagtatagcatgggtgaatctattagaaatgtttaatttcactgaacgatattagatgatatgacggcttgggatcgataataatacgagaccgtataccacaggtgaaatcatatatatatatatataaattaaaatatcattatattaataaaacaaatataattaaaatttgaattgtttagttataatctaaattttaacttaataaactgtttgttattctttctatatttttaaacagtaaaaattaaacatagtaattgtatactaaataatatatatatataagagttgtacatttagaaaataaaaataataattaatatttatttaatctactaaacaaattaattttttatttttttaaaaagatatagccccgcggtataccgcgggttaaaatctagtagatatacatttttgcagccattttagcaaataaatcctagagttcgacttatttacaatccaatgccattagcattaaatcttttttccaaaataattaattttactttaaatttttaatttaaattgtcaatcacattatcaatcaaatttaatccaaacaaacttcacatgaatcccttaaaattagcattaacgtattttattaacaatattttaaaacaaagttttttgtttaaataaatattgttcttactaaacgttttttgtttaaataaacaaatcatgtatttgaacttatttacaatgtcatgctactgacattaataatttaggcataaaaatatttatttaaagatttaaatcttctaaatttttgcttttagagttattatatcattacctaaaaggcaaaaaatattaaatttttaaatattattatttgtatatttaaacttcataaaacattattaatatttgaatttataaaaagtttaatctatcaaaaataattaacatcattatataatatatagagtttaaaaaaaatctcaaaaaaaatttcgtcatattttgtgatttgaaattttaagaatgaacatatattaaccaattggcgaaaaatgtgtgggttcaacgtcccgcaacgactaaaatattttgacaatgattcataaacatattataaataagatcaatattaataaaataaatagttttttttgtggacgggtttggcaggacgttacttagtaacaatggtaaactataaaataatttacaaatttttatatatattaatttaaaaaaatgaattgtcaccgcggtgtaccgcggattaaaatctagtttagattttaaatctttttttttttttgtcatccgaaaattaattaggactcaaacaagccaatcctgaggaatgttgtttacaaatgtaatatgaagcggttgggtacgaacttttcgtgccaaaaaatccgctttaacattagtactacgagagattaaagatagagaaaagtttgtgaactcattcttgtcgctctgtaactcctccaaatacgatgagaaagccggccattcagttgaggaagacaccatctccaccagatctgaacagtctgtaagaaaaactacatcttggttgtcggcaccaatcatacacttcatcgcccagaggagagcttccacctcgggatgtaaaggagatagacttcttctgagattggcagctcccaaagttgatgtctctccagttgatgatgtacaataccatcctaagcctgaaaacttgtcggtatctttccaagatccatctacaaaacaacgatatccagaataattgttgtctaaagaaaaatgccgcactcgattacgatcttccaaattgaaagaaccaaaattttcgttgtgaagctcaagttgagcggacttccacaagtctgactctttttccgccaaatgtaagatctctagaggatctttatccacattatcaaagattttttcatttcgtgctttccaaatataccaaattatccatggaaatgaagatgaatcaaattccaaaggtatgcgccaaaataaatgatccaaatttgcatatatagatgcataaggaaattttcctgggaccgtaggtatctgtgaaagtgcgcaaatctgacgagcaggatggcataagaaaagcgtgtggttaatggtttcttctagagcaccacatctgctacatcctatctcacagcttattccgcgttttcgtagattgtccgttactggtacacatcccgctaaaatttgccacaagaagtgacgtaacttgggcggacactgtactttccatgagaatgcttttaagactttgatgtctgggccaaaaaaagaaaagttagcatccaaagtttttaacctcgccgtatgatatccagatttaactgtatattttccagattttgtgaaatgccaacctaggatatcttccttagttgacgcacccaagtgcaaagcacttattaacgagacatcttccggatcaaaaagctcttgtaaaagatcaatattccagaaatttgtccgtgagtctataagacttttcaccttcaaagaaggatcaaaagcgtaaccattttttaatgctggtctcgggaattgagttggaatccacggatccttccaaactgagatggattctccagaaccgactcttttaataagtcctttattaagcagagatctagctgagcaaatactcctccaaccataggatggagagtatgattttatattatccaaagggttggttttccgaaaataacgtcctttaaaaaccctcgcaaagagtgaatctggaaccgtgattaaacgccataattgtttagctagaagagccgaattaaaatcgtcaacattacgaaaacccaaacccccttccgatttactataacacaccttatcccatgccatccaatgcatacctctagattcaccatttgaactccaccagaattttgcgatcgcactcgtgagcttcgatgtgattgttttcggtagtctatagcaagacataacataagttggtaatgccgtagctaccgatttaatcatcacctcttttcctcctttcgataaaaacttagctgaccatccatttatcctattttgtaatctatctctaacaaaagagaagatttttgttttagatccacctagactttctggtaaaccaagataggagcccataccaccaagattagtgattcccaatgttgcttttatttctgccttaagtgaatcatcgaccttatgaccaaactgtatcgaagactttgtaaaatttatttgttgtcctgaaaccgtttcataatgctttaaaatttccaagattactccacactgctctttgctagctttggaaaagaataaactatcatctgcaaataacagatgagataccgaggggcttgccgtagctactttcataccagtaatcaatttttattgttcagctttccgaatattcgcaataagcacctccgtacatagaataaataggtaaggagacagtggatctccttgtcttaaacctctccccggtattatcaagcctctaggttgtccattaataagaacccgatattgaactgttgttatacaccacattatccatgaaatccacttttcgcagaaacccatttttcttaataattcctcaataaatttccattccacccgatcgtaagctttgctcatatcagttttaatggccataaattttcctttacaagatgtgttagttctaagcccatgaaacatctcctgagctataagaatattatccgagattaggcgcccttccacaaaagcagattgtgtttccgaaataaggtttggcaaaaccgtttttaatctttgacaaaggatttttgaaataactttataaccaacattacaaagactaataggccgtaattcggtcattccagtcggtcattccgtttttggaataagacaaatatttgtcgtatttaaccgtttatcaaacactccatcttcaagaaatgagtttaccaaaaacaccagatcctctttaacggtgtcccatgctttttgaaaaaacaaagcagtcataccgtctgggcctggtgctttttccggatgcatcataaatagagccgttctaacctcaatttctgtcgcgggttttgttagaaatacgtttatctgatccgttattgaaatctgaatttctgccaaagaatcctccatcacttgaggatctgtcgttgtgaacaaattctcaaaataagacaccgctatcttttgaatatctttttcctctgcagaccaaactccattttcatcatggaggccggttattcggttcctagcacgtctctgctttgttagagcgtgaaagtatttcgaattttgatcaccttctttcatccacagactccgactcttttgataccaatataactcttcatcccgatacgcctcttttaaccgcatgtttaaatccgttatttcttccggtgttctgagatcatcactctgagctacagctaactctgacttcaaatcctctattgtttttcgtccataaggggataatttcttccgccattgggaaatagaccgtctacaactcgtcaatttgtccacaaaattactctcccttaatccattttctaaattccacccatctgcaattgcctctaataaaccttctttaccaatccatcttttgtcaaacctaaaactttgttttccgcgtggtatcttatccgttaaagttgcaatgaccggtgaatgatcagaggccatcattgttaaatattcaacgaaagaattgcaaaaaatctcatgccaatcctcattagctaaagcccgatccaaacgacaccggatcggtttcttatcctgccatcctcgccatgataaccagtcacctaaatatggaaattccaatagaccgcaatcgttgatcattgtattaaaagggatgaaagaagacggatgtcttaaatttccacctcttttctcatgatttccggttagctcattagattttaaatctcttaactaaaatttagataagctttagaatttagaattttagaaaagatattttcccataaaatttaaatgacctaatataatgtggttgagtcaccagcatttatttttacatatgaaatatatgtagcttttaataatatttattctttttcttaatatttaatttgatcatatacacttctttttaatttgcagacaataactttttttaggtcttcactttttctttttaatggaatttattatttcctcattatactttcttttacatcaactagatatcattatacattagcttggataaaaagataaaattcttttaatttttattatatttatgcttaagcttttctagttttgctatgttctttttgtctcttgttagatataaaatgttaggcatacaaaagggatacgagagtattaatattgaatttgaagaaattagtatttaatgaaaagaaaattattttgcggtttcttgaggcacgtgttgttagaatatgcggaatgagagtgtagaaagtattttggattaagagaatgaagaacaatagtatttagaatgaaagagatgataaacacacacacacacacacaacaactctcttctcttctaaattctctgatcttctgtgatggctcaatgaatgtcctccctacataatgagacagcccatgttgaaatggtacactggattttgcaccgtacccaagagcagccacaacgccagaatctggtacatcgatcataaaatccattctttcaacaagatgttccaaatatgataaagaagacctccctaaactttgggtttccttaagaggggaaaaaaatataaaagttaaacatgcccaccaggaatttggaacagtgaccttgtgaaatattaatggagcatgtagccaataagccaaccttttcatttgtggatattgtaacatcaaattattgtaaccttatgtgaaaaaaacaaaagaaatggactacatgtccaacaagatttgaacacgcctttgtgtaattttctttagatataaacaataagccgtgttaccactagaccacgagttcactccttagagcatcttcaatgatatgaactattcttttgagtgtctcaaaaccaaaatatttaatattttaatatcaaaaataaattgactatttaaaaggagacacatgaaagaaagtgtctttaaataagtgttaaagggtcttcaatatccatagaaggacacacatctctccttgattctttcaattattttattattattatttttattcattttatatttaaagactccctatttttatgaccaatgaggatggtcttagaggattcgagtccgagtttaaagggatattaaaccccacgtgttcccactagaatttttttttggggttaaatcgcactagactatgacaacataatcctaaattcttgtaaaaatagtttatatatagataaaaatatgtaagattaaaatttaacaccgccaaatgttgattctgtaatgctcgttaacggttgttaagttgcgattttgattctaccaatagttcatattcatattcatatatagaaattttttttacccacatatgccatacacaaaatgcaatttcgatgctagttttaatgtgcaagatctaaaggctactggaggttggattcttagaaaccataatgggacaccggaacatggggctcaatgatactagaccatacaagcacaccgctagaagcagaaacaaaggcgttactgacagcacttcaacaaacttggatttgaggctatacacatgtcacaatggaaagagattgtcaaactttgatacaactacttactaactctacttcacattgttcgttagcgaatctactcacagatattcagctttggacagcaaaattcagtagcattcaatttaaattcatcaagagggagggtaataaaatagcacatgatttggcgaaatttggttgcattttatcttgtttttattctgattctggaattcttcctaattggcttcagaaacatcctcgtaacaactctatttaatcaatgaatttgttttgacgtaaaaaagaaaaaaaaaaaaattttaaaacttggtcatacatttgatctcgaaacctaatggacttaaaaaaattgttatgatttatcgtaaaatcttcctagaacgcacttaaatcatgagatttgaaattttgtacgtttactctactcaaatccactaaaaatctcttacagtcattaaaaatgcaatccttaaaatatttttaataatataatatttttaagtaaattttcaaataatcatttacattaatacaaatctttacgtccatctctcatattgacacagttgcagcactctcattattgaagttgacaaatacaaagcccctcgatcgtcaatgacttaaaactacacaataattaaaatagaaaactttagttcatcctagagacacaaaagataaacaaatacagcagattgttgaacaatggcttaccatctacgacttcacaaaagtgagtttaaatataaatataaatataattattaaaacataacagcttgatggaaatttgggtcagtgaccttctcttgcgcaatttttggcgtgtgtagctgcgatgatgatgtcatctgttaaaaaccggcattggtagctacaacatacatctgttgcaatatgcgaacattatgtttcgcagacgagccttttgattatacgtcattcttagcctccatctttgaattttgaggtagagaaataaagaagagagagttgatgttcataacattatgtttcgcagacgagccttttgattatacgtcattcttagcctccatctttgaattttgaggtagagaaataaagaagagagagttgatgtttttggttttttaaagatttcggaatttcactttgctagagaaaaccgtgatgttgcattaaaaacataactatatatatatatatatatatatatatatatatcttaaaaacataactaaactaatagcattgaacttcattctaaattccatacattttggaataaagttctcataaactatatcaacactaaatctcaactcgtttttgatgccccaacacacttattttttccaattaacaaaaataagaaaaaactaagcaacataaacatgatatagtataaacaacaataaaaagaaagataatagaagttctagaacaagtttgagatatcaaaacaaaaatggatgattgtcatataaaaattggtaattatttaaaatattaataaatgatgaatccttaggaaaatattttacctactaaatattagtttttatgtatcttataaatataactatgtgaataacgcgttaaaatccatattagtgtatttactatttaggtttgagaaaaaaaagatgtcaaaatgaggtcagcttctcaaaactgaaatcctactatattatttgggaagtacattttaaatgtaaccttaatttttgtaattaattacatgacattgccattatcaaattttaatcaaaaacaaatcttttaatgacgtcattaaggttaccaaaatcatttaacgacaatattcatgtcttaattatagggcttagtcgatctaaaaacgggtcatcaaagatttcttaaactgaagcaaaatataccgaatattcaaatatctatctataaccaaattttaaacaaataagttcgtaaaataatttaatattttttctacaaaatcaattaaattttaatcacataaaaattagcacaaaaaaagtattcaacaattaaaaaattatcaaatctttgtgttgtataaattttgatactatattcgaataaagagtaatataccttttcaatttgtactctttaactaatttaagctaactaatatatttgctaatattatacctatcaaaaccgactatcgtttcttatctctatagcatttttacaagatttttgtggtggatttgggtaaaagtgcattcgggtcatatggtacattctcctattaaataaatatggtgcattcctatgttattagctaaaatgtttagattataattcagagtcatatcataaataaaattaatattaataaaataaatggctttttggcaagacggatttggagggacgggtttttgaatcaacattaataaaaaagtaaaataaaattaatccaccgtttcaatacgggttaaatcttgattttttctttttaagaccactaatattaaacatatcaaatcaccttaatttagaaaaggttatataaaaccaaaaatgttatgtggtatgtataatgttactatatataaaattaaactataaaatataaatgtactagagaatgatacaatttgcaaaacttttatatataataaataattcttaaatttttaaaactattacttaaaaaaaaatatcacggaacgggtaaagaaattacaaaacgggttttattttagaattgggttatatggtggatgtatttgaatcaatatttataaaattttaaaatattatttatatgttgttttaataaaggttaaaacttcagttttttaacaattgtctcatagattcgtggtatatctttacttaataacaattataaactgtacaatataaatattttataaaaataaaatttacgaattttaatatatattacctttaaaaactaaattgtcccgcggtatagagcgggttaaaatctagtcttactttattatacatgacacacacattttctaagcaaggtcaactgatatcccattaacaagccttcccctttttcaacaaattaaagttgaccttggtccttttttagaagcaaagtggatcatcataatcttacgattccgtttaaggtaagaataataacttacgtatgtcaattaggtgattgttttttttttttttataaagttatataaaactgttacaagatagtacgacggtgatcatacagatcaacaaagcggaaaaagtaacaaagcacaccaaagatttcaaagcatgaaaactagagaggaaaaagaaaacgatttgaaaccaatttcgactaaatgggtttaaccaaacccacctcgtcgaccacgatttcctctacctcgtcttcgtcttcctcttcttccacgaccaatatttattgccttgttcggcaattgcaacggtctgtcttggaaatgttttcctgaaaatgttgactttagattcattggtgattggtgttttaggtaatgtgaacgtaaacttgtttcattttcttacattactacaatcgaaggatcgtcacgggtttccattatcttttggtgatactctatgtagtcccagttatatgctgccctcctggtggacatgcagatatggtccttacaaaaaaaagtgaaatcctcaaacgcatctctaagcagaaacaaaattaaagacagggccaagaagctatgcgacaagtctaagatcttggtcagttcaatagtcaagactccgttaccaagtgatcaacccttgtccgtggtgacaattgtaaaccatacaatataaatatttcaacgaatgatataatttgcaaactttaatatataataaataataatttaaatttaaaaatcactatttttataaaacaaatcatgggacagattaagaaattacgggacatattatatcgcaacgagattatgtggctgacgggtttaaatcaatatttctaaaattttaaaataatattataacatgccgttttactacgggttaaattctcaatttattaacaattgtccgtggacttgtggtataccgttatttaataacaattagaaactataaaacataaatattgtataacaatatataatttgcaaacttatatatataatatactaactaaaaataaatcatcatgcagtatattacgaattaaaatctagtttcaaaagtaaggaaacatctacgtaacataaataatagaactgtaagcacaacaagcacctagatgtcatttagtagacaaggtttatgatatctaggtgctcttgtttatagaagaaaaaaaaaagcacctagatgtcacaaaccttgtctactaaatgatgtatcgcccaacaacttcgttatgaacagatccttcggccactcttgtgtttcatgatctcctacgaaatctaaaatttacaagaccattctgaagacgaaatagtattagcacctacgcaatagtaaagaatacaaatcaataagacaatttctaagaatgattacaaaataaaagaatgtttatattataaacaacttaataaagaagaaaacgttaaccatactattagaaagaaatagtaaagaaaacaaattaaaactagccaaacaaaatctacctttttttatggatcaccatataacaagaaccactaattatatatttcaagttataaatctttacttgatatagaaattttaaccatcaagaaaacaaaacgtatttgctttgtaaaagtatcacaacaatgtcttcatcacaattttttatactttgcatcatcctcatttcttcatttcctcttcatgaatgtatgcctatatattgttttctttttgatcatcatcaccttaacataatcatatctttcataatcggtattctcaaatgatcgtgttacttctttttatataggtgaaaatggaaaaagtgttgaagcgagcaatgcagctaaaacactttgcatgtcagtgaattgcgataataaagacagaaatctcacttgtgcttgttgtttggccaaatccaagaataggtgttatagtagcaaatcagaatgtgttgctgactgcaaagattgaaaggcataacttaataacaagctccactaaggaattaagaaacttgattagcgtttatataatactactctctctagttatggtttccataatatgaataatacaggcttatttaaagtccatgactaatacagtttattcttattgtaattgtattaagtgaatttcaaattatacttgttttatttttttctttttcgttttcattttgttatactagtcatttgttctagaatatgttgcggtcaacgagttttcaagaaataaagaaagaaatctgactacaaaagtcaaaggctactcaaatcgtcattttttattcgttacgattctgataacatatatgctagtaatacaagacctttagaaatgtcgttttaacatttaatttgcatagggaaaaaaaaataaaaatagacctttagaaatgtgaatagtatagtttttttcaaaaataattctcaattattacatacagtaggagatagttaagacaccctcagtgaggttcaccagttgtgtatgctcttcggctaggctaactaaaaagtacacatttcttactgggcttgtgaacaatttttttgtatggctcataaatttattttgtttgggcttgtagtaagttacccgatggaaaaatgctacacatcatacatgtggtggttgcaaaaaaaataatgttaaaagagtattttgtcacctaatttagcgttaacgtttttgttcttatcgctaattacataattaacaaattaacattgacttataattccagattatcacaaatcacaagcatgactcaaaacaacaacacttgacttcacaactggtttttccctcgcacgagaattgaagaaaatagtaagaattctttacttctccgtcgcttactcaatcaaagtttcttcaaatttgcatatctgattttgcttgcgtctgtttccggcaactcgttatacgtttcttctccgatttgggttctcttattcaaattgattaaacgtgatttcagagaagaagaaacactaaacaaaaaagtatggtggaattggagattgtgtggttggttagaggcgcttggatcactgtttggatcgtctctatacttcctttggtgattgcttcgatacccacttcaaagctcaactcttttcgtgaactcgttttgagtttcgctggtagaggcaagattcttcacccttcttctcaggtattcttctaaagtttgtaacttttgcctaatttctgtcaacttttaagtttggatatctggttgatgtgaaaaaggtttgaactttgttcttataatgatcaattagttgatgtcagttttagtttgaatctctggtttcaatttcagaaatgttctgtttttgatttgagattgtaaagtctgtgaatttgcccatctggttgaagtggaaaaagggtttgtatttgttcatataatcagatgtttttccagcttttttgctaatttcttgactcttgaatcgtgttttatatcatcgttctgttgttaatccagattgaaaacgagaaagcataccacttttagtttgaatctccggtttcagtgttacacttgttttctcagatgtgtaattctctctatatgcagaagtttacaattcctcagaaatgctttgcacacttttatgttattggagtggtgtggacaactctcctgcttgctgcaacttggatgtatgcttgcaaaatggcgcctttatcttctgaggagttccagttatccgacattgcaagccgtttagccggaggttcagatgttttctccgttcataaatctaatatgactcctgtcgagcatcggtttaaagtgtggcgagcggtgtttctacttcttctgatggagatccatgtcttgagacggcttatagagtcattctatgttttcaaatatagcccttctgctcggatgcacattctcggttatttcgcaggattgttgtaagtcccttaagaaactccttatattatcatagtttgattgtctttttgtttgtcgttaatttgtgtttttatagtttctatgtaacagctcctttgtcactctgctccaatatagctccagaggtagcaggattcgtaggaaatcaagtggctgagttcattgctaatgggaaaagccatacttcagcacctgaatttaacttgttatcatctataagtcctttgatgaagcttggatcactccagtggattggtggagccatttttctttggggatggatacatcagcgccgctgtcacgccattcttgtaagtttaacaaatagtttttgctcgttgtttctgtcttttgatcatgtggaatacaaaacgttattgcagggatcgctccgggaaaatccgagccaagcgaaagagtacattattccgtatggagattggtttgggatggtgtcttctccacatttcttggcagaaattgtaataaaccctccttagtagatatcttaacgttcttctatttttcttaactcttctttaatgatatgatgctgtgaaatttaggttttgtatgcgggtttactgattgcgagtggaggaacagatataaccatctggttactctttggttttgtggtatggttcactctctcatttgcaagatccactaatgaaatgcttcttttttctggattctgagaaatagtacttatgttttttctttttgggtgtttgtttttcttttgtaggctgctaatctgacatacgcggctggagaaacgcaccgttggtatctccggaagtttgagaattatccggctaatcggcatgccattttcccttatgtctactaaatggttaagagatacaatggttgtcttctgtaaatgctgaattctgaacatcgaagatttgtggtgctttgttatgttttaatttagctatgcttctcagttctcatcttctttatactggtgcttttttcgtttcaagaatgtattttacacaaacaaagagtgtgactttggcatttagctgtcttttacagtggcatgagttcgactcgtttacttggccagttgataatacctcctaagtttttttgttttttttgggttcaattttccttgtattcccgaaatgttgttaatataactatttgactacgatttggaatgaaaaatgttggttttagtaaactaactacgtaccattactaaatccaagacttccgaaaattatcttaccttgcttcttatgaaatcaatcttggcttcttttttttcatcgatacactttactaagcataactagcataatagacttaaataactaatcggtgaagagcaagtcttctccaacaaacttagtagataactaaggaaactaaaacataatctaaataatagagcaacaagttactcctacaatctaggagatttattttcaaaagactaattcaaaaccaaacaagaacaaacttattctcacaagtgtattaagagtcatataacctaaggaaaacaaccttaaagatacttggaggatatgggaactcaagatggccaaaaaccgtcaccagttctgatttatatagactttacttcaagggtttgataagggaggaaacaagagggtttgtggcaggatttggtgttgcaatttgcggccaagaggacaatctcttgtttcaagtgaaaagttcacttcatgactccgcaattacagttttggaggctgaacttatggcattgaagctaggactaactgaagccgtgagtttggggatcactcatatctcaatctactgcgatcattttcagatttttgaactggtaaattgttcttgaaatatttacacatttctttaggttttgattagttttgcatgccaaacttgttttttaaaataaatttaacattttaaccaaaacaaaaatttatgatgacgagaaaaatctcctaattgagtaggttttgtccttatcatctttttaggttatgtggagatcagtgcctgataaagatagcattgcaatgataatgtatgatgtgcaacgcataagacaacaattgacatcaagcacacctcttctggtgactggaaatcaaactaataagttagcttatgaacttgcactagaaacactagtttcagaaatcagcataagtatcgaagagaaagctctaacatgtgacaaaaattaaacgtggaaagtacgtaagctgcaggtatcatctctaatcacattctctagactctagctactatacattaattttaatttatcgtcgtggaatgttgattatgtttacgcctaatgttgtaatttcatggttgatggatatatatagatgtgggtattccttttgctatatgtgtggagtcgaatggaaacaacggctaggagctggtggttgcattcatagcaaagcagagatttattttatcattatttgttttgcagtcttgtttggagtgaacttttgtttctttttgattgttactttaatcaattgggttgtgaatttattcaagtgatttacccagagacttgtaaacgggacataaaaagaaataaaacctttcatttctatgtcttatgattgcatgagtagcccaaacatctatggtctagtggtaggagaagatttagggaatagtgaaacttgtagatccgagttcgatcctccctgaaaacaaaaatcatatttgttttgagaagtctctcagttaggccttgggtcaattggtttacctggtagttagaaatgcagccggtctgactatcccctttcattagtcggaaaacatttcaaattcagaacagacagtatggtagtccttcggtgagaagtccactctaaaatatttcggtgcgtttctgccgaggctgaccagattagccggtagggtttatcaaaaaaaaagaaaaaatgattgcatgagtacttctcaattcttcacgttgtcacaacaacttgttacatgcgactaaacaaattatattgaatccatatacagatttgccaaatactatttctatttggtcccaattagtgatgtttatatggatttaatagcccatttagttatatgggtctgttgttaaaaaatagcccatgtagacccgtttatggaaaaagataaatgggctttaatttcgacccggcccaaaattacaacgtgttcaacaacaactctattatacaaacagactacgtcgttctcttccactcatctgaaaacaaaatccaattctctctctctccctccagattcaaacgatccgatccaaaactttgagatccgagaagatgtctacgttcagcggcgatgaaactgctccgttcttcggcttccttggcgccgccgccgctctcgtcttctcctgtacgccatttccttctcctctcactcgattctcttccaattcgtatcattccctttgatctgatccagatgattgcttctagagactttttatgagaatcgttggcctactaattgatcgatgtattagtgttcttagatcagaatctggattttaggtattgatttgtgattgtgattgggtcgggcgtaaaatgagatgttgttactggattttggttttaggtatgggagctgcttatggaacagcaaagagtggtgttggtgtggcttcaatgggagtgatgagacctgagttggttatgaagtctattgtccctgtggttatggctggtgttttgggtatttatggacttattattgctgttatcattagtaccggcatcaatcctaaggctaagtcttactacctatttgacggatacgctcacctttcgtctggtcttgcttgtggtcttgctggactctcagctggtatggctattggaattgttggtgatgcgggtgttaggtttgttcctcacagagaatgtttgaatggaaaacgttaacgtcatctgtatcttgacttgtttttggttttgcgattctctcagggcaaatgctcagcagcctaagctatttgttgggatgattcttatccttatctttgcggaagcgctcgctctatacggcctaattgtaggcatcattttatcttctcgagctggtcagtccagagcagaatgagagcacaaacaaatgttaaaatttccaggtacttccttatcgatcaacttataagtgcggtatgtagtatcgggagccgatattttgtggattcttggtttgggaagcagatgttgccacctcgctttccttggttggtggttacttgagtgtaggatgttatttggttggtacggtaataaaaaaaagagcttggcatttgttttgtattcttgtattgtctgcatctgtcttgatgaacttgataatattttgtttgtaaagaagtttgcttctgataccatctttgaatgttatgagattaatgctagcttttctactgaacaaaacattatattttcggagggtgttaagcaaagtaatgaaaatattaatcgttcctagggttcctcctaagccaattatctccgaaatcctttactgcagctagatcttcttatggaatctaatcgttcttgtttttatagcatcgcatcgaatcttcttcgtcttggaatggaatcctttcttgttttcgtctgtttggtgagatttgctatcgattgtaactcgtgtattgtgttgtacaagtaattcatcgctggcgtttagttaatcgaatctcatatctaactatgttctaaccttgattgggagagttgcttgcctgaaacaacagaagatcttagtcaattcatttctttcttaagcacttagcttggaaggcagcttagtcggatccaagttagggtaaaggcagttccactccaattcaaaatggagggaggacttgaagtagtcctagattaccacttcaacaacatgatgagtatcctccaattatgggaatctgataccttcttatctctcttaccccataatgaatccgaatcaaaggaaccccacaacacttttggaaagaagaaaccgtttcaagtatctaacaaacgttaaagccatggttagaggaaacgtgtatgaaatggtttcacttttctacttaaaaacaatgaagacaaagagtgtcgtatatcaaagaaaaaatgtttcaacatacaatcttcaatctatatagtatttttgcaaggattttgtgcggacggggcaaaatacattcgggtctatttggtacccgcctatttagtaattttgttctttataactttgttgggttcggttcaaataaaactcgtacctaaacccgtttttaaaactcttacaacggatatttcgataattaacaattagatatttagaagatttggttaagatttaaaattatgaatctccgataatctttgtttaattttttaactattttaaatcatcgtataatatattaagttttttaaaaaatctcaagcttttttcttctacatattttgtgattcgaaattttaaaaacggacattacccaattgacgaaaataggtgggttaacgtcctctagatcgtttaaaatattatagacaatgattcaaaatcatatcataaaaatatcaacattaataaaagaaagatttgacgggacagatttttgaatcaacattaataacaattaaaatatcattaatttcttgcttcaatacggcttaaatccttaaaaaaaatttttacaccttcaatattagatatatcaaataagtctgatttaaaaaagattgtataaaaccaaaaaatgttatgtggtataatgttacttataataacaattgtaaaccatacaatataaatatctcagagaatgatacaatttacaaactttaatctatgataaatgataatttaaatttaaaaatcactattttaaaaaaaagaaatcatgggacagattaagaagttacggaacatgttatatcggaaggggattatgtggcggacgggtttaaatcaatatttataaaatttaaaacaatattaacatatcgttttaataccggttaaatcctcaatttattaacaattgtccgtaacttgtggtataccattatttaataaaaattataactgtaaaacataaatattttataaacatatacaatttacaaacttttatatatacaaatcatcccacggtatgctatatattaaaatctagtttcaaaagtaagtaaggaaacgttaaccatactattagcacgtaatagtaaagaaaacaaattaaaactagtcaaacaaaatctacctttttttatggatcaccatataacaaaaaccactaattatatatttcaagatatataaagccttacttgatatagaaattttaaccatcaagaaaacaaaacgtatttgcttcgtaaaaaatatcacaacaatgtcttcatcacggtttttaatcctttgtatcatcctgatttctttctttcctcttcatgaatgtatgcatatatattttattttacttttaatcatcatcacctctacagtcacataatcatattttcataatctgtatttttccaaatgattgtgttacttctttttgtataggtgaaaatggaaaaagtgttgaatcgaacaaggcaatgaaaccagtttgcatgccagtgaattgcaacaataaagacaaaaaactcacttgtgcttgttgtatcggggccaaccctaggaataggtgctacaatagcagatcacaatgtacggctgactgcaaactttgaaggcatagctagttacctccactaaggaattaaaaaacttgatcagcgtttacgtatgtttttcatgttgtcatactgttcatcttttaattttttcagagtatgttgcggtctacgagttttcaagaataaaacagtttatgcttatgtaattgtgttagtcattatcttttcggatttcatcgagatatcctttgagtttttcaaagaaaaaactaatattttaataaatattagttttataactaaatttttaattataaaataaaatttacctaatagttgatatacacgtatttttatgggtttttcagagtttttcgcttgagagattctctccactctctttcatatttttttattatattttattttttatattggacagtttttcaatgagaaaccgttgatagagatggtcttagttcttctatcctttgatctaagagttcgtatgcatttgttatttctacttcagtttaccatattgtttttcagaggaaccttatcataactccattcaattcattatcacaagttgatcatttacgttgcaatacacaagataagttatttcctagcaaccgtattggtgtatatatcttccaagacccaatcataatcagtcttctaagatatatatagaacatattcatacaattttggtcaccatgattcaccagaatttggttcaaaatgaaaaccggtaaataatcggtaaactttgcatgtgtcatactaattctaaattctaatgggaaaaatgtcatttaatcctccaactttcaaaaaatggtcattttatacatcaacttcatatgcggccgtttaaaacatgaactaaacgttgactaatttttaaaacatgatcattagttgagcaggccaaaacagacatgccgttatcagtcattaacgaaacttctaacgtccgttatcatccgttaactttattagtcaagtttcaaattgtggccattttaaacatcaacttcatatgtggccatttaaaacatgaactaaacgttgactgccatttaagacatgaaaaattcattgaccaggccaaaatagacatgtctttatcagtagaacctagaaacccgttattacccgttaatgactgttaatctgtccaaaacgacgtcgtttgagaataatcgaaagaacataaaaaaaatcccatatgaaatctccatatcaaaaagttttaagcagaacccaagaacatagtttgatatagagataatcgcagtgccagtaattggaagcaaataaaggtgttttcgtttatatatttgttttaaattttaaaaggaatcatggaagcaaattaaagacccattataagattgttcatcttgtttgggcggttgtagaaatagatttggagagttgggattttcatttagaaaacaatcctgattttcttttgattattctcaaaacaaaatcgttttagggatactaatagagtcgttaacaagtgataaggaatgttataagttcttttaatgaatgataacaacatgtttattttggcctggtcaatgaatttttcatgtcttaattggcagtcaacgtttagttcatgttttaaatggccacatatgaagttgatatttaaaatggccacaatttgaaacttgactaataaagtcgttaacggatgataacggacgttaaaagttccgttaatgactgataacggcatgtctgttttggcctggttaacgaatgatcatgttttaaaaattagtcaacgtttagttcatgttttaaacggccgcatacgaagttgatgtataaaatggccattttttgaaaattggaggattaattgacattttttccaaattctaatacaccacctataaatttctgttgaggtggcatcgaacttccactggttatgtttaatactcattaccaatgaaatccaaaagtaacaaaccatcatcaaatgcttaatattcaaggtttttttttttctcctcaatttgcacccacaaatactaatgtcaccttttcatatctaaagactaaaggccaattttgcacttcttcgtttttttttctccaaacctccatatataaacttttactactttcataaaaataaaataaacgactcaaatatcttttgagatctttatctatatgagtcaggctaccttctataataaattctaaaaaaacattgatatctcaataaaaaaaatcatttatatgtaaatctcatagttaatgttatagtagcatatgcaaatcaatattgtaaatcttaatataattaataattatatataaactaatattatatatatatgtatgtatgaaacatgttaatttaggaatttagtagagctgaaaaaaagaaaattaatatttgttagtttgatggcttgttataaatatagtatccaccttttaaaatatttttagcgatatatatatttgttatccataatgttttatatgttcacaattaggaatttgggttgaatagttgaaaacatgaaataagattccggtggctatgaagtatgaataatcattatttggtcaaacataaatttcttttttcaaacgaagaaaaaaatgtcaaagaaaaaacaaatacaggttatcctattatattatttgggaagtacattttaaatgtaaccttaatttttgtaagtaattacataggtatgccattagaaataaaattttaaagagtaaattattttatctctttgaggattaaaaagtcaaatactaatttaattaattaaatttaattaaaaaacgaaatacattattaattttcaaaaataataaccaatcaaaatcaacataaaagatttgatatctaaattttaattaatttaatttaattagaaaaacgaaatacattattaattcccaaaaaagtaaccaattaaaatcaacaaattagatttgatatctaaattataatattaattttttcttaattactatagttcacttctcatctttatatgattctatttttgccgaaaaataatatcatcattatagaaaaataattagagttttttcgcatatgccataatttaaatttttaaaaacgaatataaattgttcaatacatgaaaaaatattataacgggtgaaaaatagatttaagaaaactttctactgagtaacatgtcataatttgaaatatttatattcaattttatacatattatattgaaaatttataatcttatatactacaataagtaataacatattagatgtgattcaatttttaatacaagctgaaaaatcctagaattgacgggtttagatcgatattaatacaagatggtatactacaggtgaaactcttaaattaaaaatcaagctacaagtgtataatcttaaacactaaacaatatagataatatcaacaaaatatatacaactcacagtttactatacatttaaaatcaaataaaataatatcatatacttttaaatcatctttacaataaaagtttttagttgaactaaaatataagcctacctgcggtatactgcaagttaatatctagattaaaaggcttattgaatctaaagacaagtcatcaaagatttcctaaactgaagcaaaatatactgaatattcaaatatctatctgttacaatggttcagacccatattataaaaggaccaaaatgattctaattacgaatgagcaggaagcttgatttatcaggcgtccaaaattaaaatagttatctgattttactcggattttttattttaaagaattgaaactttaaaatgtttcaagaaatcattctaaaaaatattcaattattttttatttaataaaaatataggcggttaatatctaattattattatttaagtaaaatattaaaaaggtagagaatcacaaaatagggcccaagcccaaaatccaacctcatccgaatctcaccttctctcccaccagccaccactctcccctatataacgaaccttcctccttcatgcatttctcaccatctctctcttctttcacgtctctcttccctgaaactttcccgagaaaattctcaatcctctattttctcgagaaaattctcattctcattttctttcagggaaaagttttgttgttgaatacagatttggaaacttcatttgtttttttccgtttttaaccaaaatttttaaaaaagctttcttctgaacgttaatcgtggagagtttcgggtcgggtcgggtcgtaaaaggcgggtttcacggtggtgatagattcacctcctgcttccttctgagggggttagccccgaggctcttcgcctcggcgggtttcaaattcccccaaatctaacaaactcacagattcattttctccattttttttgtttgttgaaaatttgaatccacaaattttgaattcatttgtaaccgttcgttgaagaagaagaagatgcctgctctagcttttgttgatactcccatcgataccttttccagtatctttacaccgtcgtctgtttccaccgccgttgttgacggttcctgccattggtctccgtccctctcctcctctctttaccgtatcgacggatggggagctccgtatttcgcagcgaattcctccgggaacatctctgttcgtcctcatggctcaaacactttacctcaccaagacatcgatctgatgaaagttgtgaagaaagttacagatccgagtggtttaggattacagcttccgcttattgttcgtttccctgatgttctgaagaatcgtcttgagtgtcttcaatccgcgtttgattacgcgattcagagtcaaggatatgattctcattaccaaggtgtgtatcctgtgaaatgtaatcaagatcggtttatcatcgaagatattgtcgaattcggatccggttttcgattcggtttagaagctggttccaagcctgagattcttcttgctatgagttgtttgtgtaaaggtaatcctgaagcttttcttgtgtgtaatggttttaaagactctgagtatatctcattggctttgtttgggaggaaacttgaattgaatactgttattgttcttgagcaagaagaagagcttgatttggttattgatttgagccagaagatgaatgttaggcctgttattgggttaagagctaagcttagaactaaacattctggtcattttggttctacttctggtgagaaggggaagtttggtttgactacggttcagattcttcgtgtggtgaggaagctgagtcaagttggtatgcttgattgtctccagcttctgcattttcacattggttcacagattccgtccacggctttgctttccgacggtgtggctgaggctgcgcagctttactgtgagcttgtccgtcttggtgctcatatgaaggtgattgatattggtggtgggttggggattgattacgacgggtctaaatcgggggagtcggatctctctgttgcttatagtctcgaggagtatgctgcagctgttgtggcttcggttaggtttgtttgtgatcagaagtctgtgaagcatccggtgatttgcagcgagagcggtcgagccattgtgtctcatcactcggtgttgatctttgaagctgtctcagctggtcaacaacatgagacccctactgatcatcagtttatgcttgaagggtactctgaggaagttcgaggtgattacgagaatctttatggtgctgctatgcgtggtgatcgtgaaagctgcttgctttatgttgatcagctgaagcagagatgtgttgaagggttcaaagaaggttccttgggcattgaacagttagctggtgttgatggattatgcgagtgggtgattaaggcgattggtgcatcggatccggttcttacttaccatgtcaatctatcggttttcacttcgattcctgatttctgggggattgatcagctgtttcctattgttccaatccataaacttgaccaaaggcctgccgcgagagggatcttatcggatttgacgtgtgacagcgacggaaagatcaacaagttcataggcggagaatcgagcttgccattgcacgagatggacaacaatggctgcagcggtgggcggtactatttgggaatgttcctaggtggagcttatgaggaagctctcggtggagtccacaatctgttcggtggaccaagcgtggttcgcgtattgcagagcgatggacctcacggattcgcagtgacccgtgctgtgatgggccaatcctctgcagatgtcctcagagcaatgcagcatgagcctgagctcatgtttcagactcttaaacaccgagccgaggagccgaggaacaacaacaacaaagcttgtggtgataaggggaacgacaaactagtagtcgcatcgtgtcttgctaagtcattcaacaacatgccttatctttccatggaaacgtcaacaaacgctctcaccgcagcggtcaataaccttggcgtttactactgcgatgaagctgcagctggtggcggcggcaagggcaaagatgagaattggtcttatttcggttgattgagagagacttgacaacatcctctgtctttgatcttcaccgtacgattgattacgatcctagttcttatttgtctttaagttcagttttaaagttttaagttattttcttgtaataagacaaactcttagcaaaatttaataatattatcatttatcatcattcactaaattaacaatgagcaatctgttaaaccatgtcaatgagctgttataagtctttttccgaatataggctaaatgcatttgtaaatccctttggactattgaagagcttctggaataaaaaacaatgagtattctatgcaaagagtcaaagacaatttgggtaatgcaaattgaaggtaacgacgttggatcaagaatataagtgaaggatgtggttgttagccgtagaatatgacaccacaattcacaaacacacacacgtgacacatagaatcctgattttgtggctcttttccatctgagttttggggaggacaattttggaccgagcgtaaaaaaagaggcatatttggaactaaatctttaaaggttcggattttatggttaaattacggaccacgtttccatgtgcacatctatttggggataatgtttagggtaatattagaaactaactatagaattgaaaaaaattgaataactaatcattgtcagtttttctataaataaataattatatgatggtataagaaagtacaaaactatccttgcaagttgaactaaaagtaagtttatgcagatatatttgatgttttttagtaaatcgcatgaaacatgttaaaataacacgatatttataaaaagtgacattttttataacgtacatttttaaataaatagcatgttatataaacaaaatatcgtttcatttgaaaagttgaaccaggagtaaacttatacgaaaataaaataatagatttgagaaagttttaacatttaaatcatgcttttagaagaaattacatatgattctaataaataatctatactattaattgggaagcattgtgtgaactacaacgtttgaggggtaatttaaaactaattaaatgaatttttatatgggtaatatagtaatttaacaactaatccaaaatatattagtgagcttaatgagctgtatattacgaattcgttttgaatttttaaaattatgacaaatgtagaactttacaatcgctaaattaatgaaaaattaccgcgcaacaaaacattgttttaaaatgtccatgattaaaacgactaccataattcgtgttcctgttgttgttgatctaacaatgtcagggaagaatataagcaaatagatttttataagctcttgattccactttgtaatataaaattaggtcgggttttaggtctctctgacgtgattgattttaatcaatctaattttaattaatcggtgtaattgtcattatttagtattaaagataattgtctgtgtttagacttcaaatatattcaaatatagaggaaaacagtttgtaattgtttagtagatttgtgtatcccatccacacatacagtatagcgtaaggtgtatatatatgtatgtatgacattaatttgtgtagatatgtatgtatgacattaatttgtgtagatatgtatgtatgtatccacataatcaattttctatctgcaacgtataaaattgtaaattttattttagttttaatgtgttctatttaaattccagttaaaaaatcgaacacaaataatgtttttgtgtaatatcatgtttaagtataatatcatgtttatgtgttctttcataatcaagtgaataatgtttttttatatctataaatacgaattagaaaacaaaattcgtaagttaatcaagaatattataccaaataaatatgtgttcaaatataaccctgtacaaacgttttaagtacgggtacggatattcaatctaaattcattttccgttctctcatacgttgaactaaattttaaccattctcagataggtaattaatttaaatgaaataattatgtgatgagaaatttcaagataggcaaagagacgggacatgactaatctactcactcattttatctacactcaattgaaaccaaataaaacaccaaaatgatatgaattcaaattatgagtattataccaaataaatatctacacatattatcctacacatacgtaagatctaaatttatatatacgaccaaaacaacaaaataatctatatcattttaaaaaaatatgaaatatgcacgtatgtgcggggcagaagctagtgtgttatataaaaaagtagcatattgacaaagagagatttccaattatcacgtgtaattcgaaaaagtagcgtggtataaaagaaaataaaacaaatttaaaaaaaaaaacataacgacggagattccaaaaaagaatcaaaatcgaataaaataaaatgacaaatcttctgcaaattgagggagagatgatttatcaatataaataacatttggcagcctagatttatcgaaaaagagatcgggtggatgagatggtggaagatgtggtggttgtggtggtggaataaagagagatgagatgattctaagtgttctgtaaatttttggaaaataacatgtaatatatataaaatacgaaaatgggtaaaaaggtaattgcaagtgaagaaagagggtgtactctgacaccgtagctattttgttaattcttttacaattcatagttatctagtacatattctctaatttttatgtcaacattttgggttataatttttaaaaaaattcttaaaaagttttctcccttttttctctcttaaaaaattcttaatggcatggagtcttcagttactaagagccggcgaatactgtggaagaagcacatggtgttgatttgaccaagcccgaccgccggagcaaggtggatcgtggatcaaccggcgccgttgtgtttcaacatctcttcatctcacgttagacatgtgtctgctacgtggcactttattttcttaaccttatctttaaatttgggtgggttaagctggaccttagatttaaatcaaagttgtaaatggtaagagatcggactttttcaccagcatatgtaataccctttattgggctttaataattaatacgaaacttggccgacaaaaagaaaaaaaaactaaaaaaaaattcctaatattttcattgtaaatagaaaaaatacatacataatacaatttatatatgtatataagaagaaagtaaatattagaagttttagaacttgagaagaaagttcacttttttttatataacataaccgtgtttatgtttgtcacaatagtacatataaaataataggtgaaaaaggttatataaataaaaaaatattaagaaggatttttagaaggtacatatcaatttttttataagaaaatcagaaatgttgaaaggtaagagtaataactaaaccaagatcattaagcatgacatcagacagaaattggagatggagattcaagagctaaaaggcaaattccaagtgataaaacatttaggagatgatgatgatagcatttgataacaatgttccctcatgtttacacacttgcatttttcttttaacaaaaaaaaaaacacttgcatttttccattatatagcatttgataacaaagttcctaagaagttattctctttttcgcatctgaagtgctgtaaacatgatcaaacactctagtttgttgaatacttcagttgacaataaatttatttgatggggatggagtgaagatgaattctcatttgataaggttaagaggactatgactgttgtggatactaataaaattcacaaaaacttaccgcaataggttttctaagataatacatactgtctttaacaagaaccaaagttggaattatctatgtgtgattaattttggcctatgttagttttaatttgaatatttaagtactttttttccgagtttgactggattgttgagtatccatacaatatcaataacatgataaaaaaatttggagaaaattgattttaaacctcttcatgaatgtttgcaagttgagacattctgaaaatgaagctctggttaaagctaccatcctttgctttacatagaaggagaatctcaaggattcatcatggcatccattcaaacataaaggaaccaaggacaaatcaaatatgtgtctttcctgctgtctcatcccattttaagagtgtttatatccctgatttatgatttacgttgacgtcattttgactttgaaaagtgtttggtcattcatacactttctagaccactgttttaggtaaatatgtaggagtagtaacctgtgattatgtgaatgttgatacttgtatccatattccatatgttggtgcaactggttgtgagttagcagtaatattgtaatagtttgagatgattatggttataggatctggttaacgaagagtatgagcccctgaagaagcttaaagaaaaatggggagaagatgtgcataatactttaaaaataacaatcaaggatatggatgagtataatgcatgtggtaagtacccaactccagaactatggaactttaagaaaaaacttaaatcaacactgaaggaagtgattaaattccttttgaatgacatcaagagtctaaaacgccaacgaatctgtaggtgtgttatatcttttttggttgacataggtctccttatagagtttatatatctaatgtgctagtttaaaccaacataaaccccatatagttttagtgtataaggtttagggtaaaactttttatcaaaattattgagacattatctcgtttattgaatttaatgaaagaaattcaatgatgattctaataaaaaaatagtatttataggttttcagtttcgatctctctcatcttttctgtctccgccgtcgttcactccgccgtcttaggtttaattttatgggggaattttgacaaataactaaaaaaaaaatagaaagaattcaaagaaaaatgagaatgtgacatattaaattgagaaattagtaaatgcaaattttgactaatatgttcagggtgaaatcatgtacaaaatgatgtttgtaaaaaccattttcagtttatcctctggattcttctttagtataaagaataaacacacacaaaaaacaaaggaaaaaaactattgttaagacttgaacccgggacacagtcattttaacacaatacagataaaccatctgacctacaggcaccaattgtgatatgaagaaaacttaatataatatcttgtaacaagaattgcttcacctgaaaatgttcttgtcctctcctacctctttcagtcttttttttctttgttaaaaaaaaaaaacagtttgatccatttagacaaaaatttatcaccgaaaaacaaaatcatcctcaaaaccctaagcctaaaaagctttcagatctcttagggttttctcgttttttgttttctaatatctccctttgagatttttatggacgagtgttgtagaagacgaagaagacgaagaaactgatccctttttctcgctcatggattctgattctgagagagcttctctggagtcgattaaagataattctgaatgtgttcatgtttccaacgaacctaatctcacggcaacatgcgttgattcgtctgttggagaggaaggagttacggatgtaaattcgtccgccgctgtgtcggagctcgtgccgccggagcaaggagaaggtgcgcttttgaattc

SEQ ID NO: 236 - DNA, 112792 bp, Arabidopsis thaliana
aagcttcgtttagaacaccaatatcaaattgacttttagattgattttttgtttttttttgtttttgttttagattgacttttagattgatttcataaaaggggaaagaatgagagtttctccaaatggaatttctctacgttaacaccattggtgtttcttacaaggccattcatatgaatctacttgcttagacctaattacatgggctaatattatggacttgtctcataggaatctacttgcttagacctaattacatgggctatttgagattttgcattttgttgtagaattttctctctagttgtgatatacttcactatgtatatattgactcacctctggtcatccaagtccatactagtttatactttcattttcatatcttagtaattcggatcctatatctagaagatagatgggcaactgacaacacgtcacgattgacgaggtccttaatgaatccaacaccacataattaaagagagctaacattaggataaccatcctctcttctttccgacttccatattttcttgtttttttcaattctctatttagagacaatataattaagaagaaaatgaagactatttctacaaagtaaactcatcttgttttgattgtaatttcaagttactaattcatcagatcatgaagaccattccattgatattcatcgccaccatcataatcttgacatcatttccagccacgatcaaagtcgtcggtgccaaaaaagatctaccattttgcaatgtggagcttctaccttgcgtcctaccttttaaagttcgtggtcacggaagcaaactgcctaatggctgttgtgagaaaatgaaaaagtcaacatcatgtatgtgtagattcctaatggccaaggaacgtgacctgaacgcagctgctcatagaatattctggttttgcaaaatttccgtccctaattgtccaaaaatctagagatataggttatggttttttcttaatttattttatacataagttatgttcctcgactatatctacgacatgattgattgaagctcgagagacacaagttgagcttcaatacacaaccatttaagaaacatataaccatttaagcgaaaattattattaatactttatccacctttgtaactaacacacagaaacatgatcctgtgacattttacgtgttccagatatcacttgatcctgtgactttttagcattttccagggtaccttaaaagtcgagttatcgatctctgctagtaatatctgtttctaaattgacaagtgaaaacgaagtcgtttcgtcaacaccaaaagcattaaacacgtcaaaaagacaaaaccacctttgtcttcttgcgttcttcgccctcaacccaccactatcaatttaagaccaatctgaaaaccatcatgacgacaaggatcatacattttttctttgctttccttctccttgcctcacttttcctcaaaggcagtattctaaaatacattcgtacatatatacgatgttgtgagaagccgtacagttgtataacacaactaaagtagcaatctatttgttaaattttatggtgagtgtggattcattcaaaacttccatccccatcactaccttcatccatccgaccattcaagcttcgaaccttagattctgtggatcaaaccattggtggatatcccgtggctgcctcaattctattctactttccattcaagatggttcaaagttctacttcaagcagatattttgtgaatggatttaagttattattcctgtctatttgagttttgtagaatttgctttctagtatacatacttcaccatgtattataattgactcaactttggtcatccaagtctatactagtttatactttcatatggtatagttcgggaccgaacatggggtcctatatctaggagatagtggagcagctgacgacacgtgacgagctccttaatgaataaaactccacataaacagagctaacaataggacaaccatccttccatctctccgacttcccatattgttttgtttctcaattttctatttaaagacatctaaaaaatgaagaaaacaaagattattaatttctacaaagtaaactcatcttattttgattgtaatttcgagttactaatacattagcaatgaagatcagtccatggatactcatagccatcatcatgatgatcttagcatcatttccttctccgatcaaagtcgttggtgcaaaaaaagagctaccattttgcaatctggatcttctagcttgcgtccaaccttttctagttaacggtcacggaggcaaactgcctaaaggctgttgtgagaaaatgaaaaagtcaacatcatgcatgtgtagattccttacggccaaggaacagaatctaaacgcagctgctcatagaatattctggttttgccatatttctgtccccaattgtccaaaaatataggggttataggttatgttcctcggccataattatgacactttgtactaaaatgttataacacctatgggcaaggtgtttctaaattggtaagtcggaaaacgacgtcgtttacaaaatccgatctgcacacacactcacattcatatgtcgttcttcgtcaacgtcggtgaagaaagcataaacacgtcaaaagacaaaagcacctctgtcttcttgctttcttcgcccttttacttcaacccacgaagatcaattcaactaaaccaatctcaaaaccatcatgaggacaagttttagacttctcttcttcgctttccttctacttgtctcaccttttctcaaaggtaacacctttctcttctacttgttcattcatttgctgattctactctgtttttgttcacatgatctttgtttgaattcattgtgatgggttttgtttgtttttagttgctttgtgccaatcggattcggaagattctggcttcgaagtttctgatgttggtgaagaagagagtgatgcagaggaagtttttggtttggaacttacctcagctcctggaattgaaaccctttgcgttttccccaagaacagtgcaaaaagtacagatttttactctgtttttaatctaatttctgaaattaggcttcttctcaatttggtttgtctgattttctgtagtaataaaagctggagttgagactgagctgcttgttggaatgaaaaatgatggtaatgaaagtgatttttctatcaaatgattacttgcaaagttagctataaagtttctaactttgtggttgggttatatgaataggtcaatccaatgtagatattgttgctgttaaaggcagtttacatcttccttttgatcaaaatgctgttcagaatctcactgctctggtaattaatcatcttttgcttcttctcacatttattgcttgtgtgatctcacttgtctttccatattagtttttccctttgttaggttcttttcattgcctgttttgtctcatctcatgttactccacactatgcactctttgttaggtcattcatggtttagtaacaatacctgaacttgttacatccctgtatctaaatgcaagaaagtctctctctagcctttaatctttatcatttatgttttgataccagatacttgctttggctctagctatattccatttcatttctagatatagaatcttacaatggcttttgctgaatatagagttttctcctcttttccttttctggcctttgctctttaagtttgctacttattatttggtcattttgtcgaatcatctaaatgtagagtttcagcaacgcgtctgtgccaacttccgctcaagctaccttgccatatgcttttgctgtcagcaagttcctgcaggtatgtttgttaatcatatagttcttctagtctccaagatgacattaaaatatagaatagaatccgaggtaaccatttgctcgtgcaggcgggtgcttttgattttgttggcaccatcatctatgagatagatggtaagccataccaaagcatcttttataatggaactattgaagttgttgaagatggtcctctcttcagaatggagtcagtcttccttagtggtcttttaatctttgttatcgcttttctcgccatctatatccaaaatgttttgaagcatatgaccaaggtacatcctatttcgctatcttatcgcactttcattccatggtactaactttgagaatggttactgtgaaaatgctttgcgcagaaaacaaagagagcaccaaaagttgaagttggaaccgcaactaaagatgcttcgcatgatgaatggcttgaggtattcgttgcacaagacctaataactttctccataatgggttttaacttttaatgtattgaacattttggtattgatacattgctctcaatgtattgtgtaatgcagggtacttcgtacactcaatcttcgagtaagtcaaagaagaagaagtagatctcacacgctttgttagggggcttgagataagaaaccgaaaacacacgaacgatagtaacgttgcagttgttggtagagataacttcacagaatctgtaatgctttctttactctctctagctatagatgttgcaaggaaacaattttctttaacttttgtaatttgtcaagattattttcttttgtttaaaatgataattctctttcgaaagttcatgtatatagtaaagaaaagttgaataatcattagattaacaatataggttgaaattttgtatttggaaattatatcgtataatccaaggtttaaaatatgagagttgtgtcattagactattatgatgctctatgaagctaatcctctcagtctctacaattatttaagagtggtttgggctaagtacatgtacattatcggaactcttatttatctccaaaccaatgggcttctttttacgacattgggcttaatattcctggcccgtaaataaatcaatgaaacgactacttaatatcttatccagtaaaaaggtagagaaaaaaaaaacacaatattctctctctgcctcggatccacgcaactattaaccctagttagattcaacactaaccacagttaacacgaaccctttcaatcttcctccacgtgtcaaaatcaacggtcacaaaaatcatttccttctctttataaaacactaccaaaaccctaatctctttcacacaatcacagaacctaatcttcttctccaatcaatctcagagaaaaaaagaaatggcaacaaaccctaaagtctacttcgacatgaccgtcggtggcaaatccgccggtcgtatcgtgatggagctttacgccgacacaacaccagaaaccgccgagaatttcagagcactctgtaccggagagagaggaatcggtaaacaaggtaagccattacactacaaaggatcaagctttcaccgagtgattccgaaattcatgtgtcaaggaggtgatttcacagccgggaatggtaccggaggtgaatctatctatggatcgaagttcaaagacgagaactttatcaagaaacatacaggaccaggtattttgtctatggctaacgctggtgcgaacacgaatggatctcagttttttatttgtactgagaagacttcgtggctcgatgggaaacatgttgtgtttggtcaagttgttgagggattgaatgttgttagagatattgagaaggttggatctgactctggaagaacttctaagcctgttgtcattgctgattgtggtcagatttcttagatctgtctgagattgttgatgatgatgatgatgatcttgaggatccaatggtagctttgtgttgtttctctttgatgttttctggtttatgtttttggattttgatgtttattgctgttgtgaaactttgagtttggctaccattgaataagaagaatgagaataaaatcttgagatccaaatttttgtttaagctttcattatcgttgaattgttcaagattcatattaaagacaaaaaaatcgactgagaagaagacttaaagcttattggttttggtcttttggatatggtgaagtatgaattttttgtcagtttgctatgggtattagatttttttagaacaagaaagtggaattgatgtgatttgtcggacttttagatatcatagagtacagttttattgatatttttcttattagattagtctttttcgatgtggttatgttttttgcacacgaggaagaaattgagactagagcccaactacgaatttataacgacggcccattaacaatggcagttatgacttttcatatccgaaatttttttggctttcttcaacaattttttttgaaaattttgacacacaaccatttaaaaatttgatatcagatctaacccattcaaaaagcgtcatctttacttcctgggataatctaaagatatgaactgaaattctcatctcttgtaagatgcaaatcaggtagcgaacatatacatatcaagcaaatctagtcttgtttttaagttgtttttactacgtctttgcatattcaaaagtgtatgcatcatgttatcaaaaattttcttttcgatatgcaatacatcctttgcctcaacataagatccttccagtaaggaagctgccaaaaaatgcttttcatttgccaattgtgattaactagatatccatctagcatattggcggggatgtgccaattacccccacatagaatagtttcttgagcaccccaataatctaactgctcaagcaaggcttctctagacacatgtacaggtggaggttcacgtactactttgttcttcttgaattttttttttgtccttcctatatagatgactcatcggaagaaaacgacgatgacaatcaaaccagcttgtcttacgaccatgcttcagttgaaatgcatctgtccgatgaatgcaataaggacaagataacctgccatgtgtagtccaacatgatagcattttgtacgcaggaaaatcacttatggtccacttaagcattgcatgcattgtaaagttttgttgttgtgagtaatcaaatgtacgaactccggtataccaaagctgatgtaactcatagatcaaaggttgtaagataacatcaagagaacgtttaggatgcttaggactagagactaaaatactcaaggataaaaattctcgctgcatacacataaatggaggtagattgtatggtgtcacgattaccggccacaaagaatactgccgaccggacataccaaatggactaaacccgtcagtgtatagaccaagataaatattcctactcttccttgcaaagttagaatgtaccgtgttaaaatgttgtcaagcctttgcatctgatggatgtgtgacctttccatctaaacgtgaatgctctgcatgtcatctcattgatgtagatgttctttctgattgatatagtcacttaagtctatccgttattggaaggtaccacatacgttggtacgagatcttgattcgtcctgaacttagcttatatcttggctttccacaaaatcgacattcctgcaattgatcatcttctttccagaatatcatgcaattatcaatgcaaacatctatcatctcataatatgactcaggagctaaattatcctctggcaaaatatcgttaattaattcaacccatgaatccatgcaaatctcagataagttgttatctgttttaatgttcatcattctagatgcaacagataatctagacattccttctttacatccattgtagatcggttgatttgcagcatctaatataaaataaaattgtcgagcatctaaattaggttcctcatggttatcggtgattgttgttgtttcatgaaacgcatcatagaccatatcttcaaatttattatgattttgttgattataatcaaactgttggggctcaaaagtgatattaggttccttttcatgttgaaaactagaattagtagacgtttcattcaccatgccaaaaccaaatataataatttgccatgaaccctctattatataaatgctttgcgaccgttttggcagaaaatagcgaccaattttgcactttcgacatggacaagacatattaccagttttttgcatgattgacaattgatttgcatttatcatgaattcttctagcctatctgcaaactctcttgtcattgatccatcaacatctttgtgtttatatatccactcccgccggatataaatctcgtgagacgccgacatattatatatatttattttgaagataaaagaaatataaaatttgagaagaaaagatttgaaaacgaaatttgaagaagaatgtttaatattgaagaagagagattgtgatgttccttactcatcccaacgtgactttatataggcatacaaatctatttgcgacgaatttttgcgactatattgcgaggaattgtaaactagttaggtagcacattttaaaacgtttatcacctaccatatatattcgtctcaaatatgtctcacaattgtgtcaaatttttacacgcaaattccacaccaaatgtgcatgtactttgcgatgaattggattggctgttgacttcgactcacattcgtcgctaattagacgcttatccgcctcgaattagcgacgaattatttccaagcatatttgcgacgaagttgagttgaattacactattccatccttattcgtcgctaattatacgcttatctgcctcgaattagcgacgaaaattttccaaacacattttcgacgatattgagtcgaatcgttaatgcgatggtaattccacgctaattacatgcaatttagcgacacatttatttccacgcaatattttcatgctattcacatgttttcttgtaatatatatggtgattctcttgagtcttaatttaatttaaagtaagaaaatctttagatatcatgtgtactatatatgatgaatcttatagaaataactagattaggatccgcatatatgcgggtttttgatttaaaattttcataacccgtgaaaataaacaaaaaaatagaaaacaaaaatagatggctcggaaaaacaaagttagattttgcttttatgtttctattatattgtttccattatatttatttttttcatgcaaattttgataagacttccttcacataatcgatttccagaatctttaagaagtgactgatgcacaaaatcttgaatagttttaaaaacaaattaaattttagtcagttaagttttctttttagcgttagtaaataataataaaaaaacattctgaattattaatctctctctcttttgttttgtaaatgtaaacatgtagataaaatatttattaaatattattaattgtacttgaattcagaatgataacctgcacatttttttataattttatttggtaaataattttagaaactggatttaatttgagaaattttttgaatgaatttcagtatacgtgactacacttctatcaatatcttatagttattgaataatttaaataattaaaaagagttttgatgaaaattaagcaaaatataagaaaaatatgagcaaaacataagttaaatatgataaaattatttgtaaagtgttatgtatgtccatgttattgagataattcaaattatcattgaaagcattgatgaacagataatcttgtttgtttcctattatttaatattattatttttaaaatgtaatattattaagttcaagaatgttgtatgacttgtatctttaatcttcggacgtaacttcattaccagattttgttcttgatgctcttaatggtctactttcaacttcttgagaagtgcaatattcagccaattttgcaatcttcttgattctcttaatggtttctttgtccgttgctatggtgccatcaaccaagttcaagaatgttgaaattttaatcttcggacgtaaccacatgaccagattttgttcatcaacactcaaagtctcataattcgcttttcttcctgtgatcaactccattagaatcacctcgaatgcatatacatccgctttttttgtgaccctcttagaacctacaaatatacttcgaaaatattattttttatatttttccttattttgaaaatagttaaattaacacaaatactgatacatataatgagctgaagattaagtctgattatgataatctaatttaccaacataatctggatcaatacagttgaaggttcccaccactcttaatgtctcaaatgagtctactccctcgagtacgagcttcatacagccaaaatcagaaatcttcgctcttatgtcatctcctatagcctataagtatggaaggcttcaagtctctatggatatagttttctcgcaagaccttggagatattttgatttcttcattttgagtcttgcattatcaatagatatgttttgagataaatcaaaaattttgaaaagtttgaaaatccaaaaagaatctggtagctttgcatatttatttttgttattagaattgagtctaatagcatctagtttgcgtttgcaaatgcatatgggttaatgatttcatttgccttgtagaagttcaagtttaggattaggatctttgccctaggtcgtaattgattgcatttagcggtttggaaaaaacggaaaatccatgattgaatcatttctctttcaaaagtcactacctttatgaaacttgtatgtttccgaagcatctatatgaatttgagtttagaccatctccatcaattgtttctcatttagaaaccacctaatataaaaataaaatgtaatcaaaaagtaagaaaaagagtgaagagagtctcttaactgagaaactatgagaaacccacaaagacacttgtttatcatgcattgatcaaattttattttaataattaaaatctaattatataactaatatttattaaaatactaatactgtttttttaagaaacccagagagtatctcactaattgagatgctcttagtttgtatctaatattatcgcttatgaaatttaaatgtgttctcatagttttaatcaaaaagtaagaaagagagtgaagagagtctcttaactgagaaactatgagaaacctacaaagacatttgtttatcatccattgatcaaattttattttaataattaaaatctaattatataactaatatttattaaaatactaatatatatttttttaagaaacccagagagtatctcactaatggaaatgctttagtttgtatctaatattatcgcttatgaaatttaaatgtgttcttatagttttttaaaagactcattcaggttttcttatctattttgtcaatctttgtaaaccggaatttcaatcttacaaattcgattttacaatacaatttaaatatctattttactttaatcaatataatttaattctatacattacattttattgttagttttccattttagttaagaaaattataagttaattttttagatatagacatataaattaaatatctagaaatatgtttatttatttagtttctttattttctttaggaaaaaagtaaaaaaaaaaaaaaaatctaacacatgtcaaaatctaaaatcttaaagattgacatgtgtcatgatattgtgagttactaacttttaaaaccgtactttatataataagattttatatatttatagacttaaaaattaatatatgtaaatttatttacttttttatgttttctatttttttaagaaaaaaaaagttcaatctttattgacatatgtaaacatcttgtcgttagatttactacgtgtcatgatctcgtgaattagtaacttttgaaaccgtactttatataataaattacatttgaattcgatttatacaaaatcttaaccgtaaatcacgagatcatgacacatgtcaggtatatcattgagatgttgacatatgtcaaaaaagtttcttaaccgtactttatataataagatgtgcaatttcgatattgaacctcatcaaacaatttacgtagctcgaatcaacccatacgattctaggcgcaaaagttatttcgctgtcatgctttgaacccaaaatttatcatctttagaggatagatttaataattgtgataaaacggaacttttgttaagttatgaatatattgtgtataatacatttatgtattaaaaaattaagattttcttgtcaagaggtatggtcattctcttacattaatttaaactcaagaattttttatatcatttataccaaatatgataaattttataaaaacaatgtaatttcgatatcgagcctcattaaacgatgaatagctccaatcaacccataggattctaggaggaaggctgaaaaacctcgtcgtaaaccctttatcacatgtagatcaatagttccatcatgaagttggaacagttaaaattacaggaacaacaattatttctgctgcctaaatttgaacccgaaatttatcatctttagaggaaaaatttaatcattgtgccacagtggaacacttgctaaggtatgaatatatcgtgcatatatacagttatgtattaaacttcttatgactcattattggttttaaaaagaatttaccaaaaaaatatgatcattctcatagattaatttaaactcaagaatctttgaatatcatatttaccaaataatacatatcctcaatcaatccacatagttttaagcgcaaggtcgataacccacggcttaaacccttcatccataattcatatagatctatagtattatcttcaagttgtaaccgttaaattacaccgcttgttctactaactcaggatcaagatccatcaaatctgcatctaattttggtatcgatctattaatagtactatatgtatattttctcgacataattaacttatgataccaatacttgtttaaattattaaagttccggccaaatacttatttatttaccatcttggaagaagcattaatgtgaaagaaataacacttcaacatgaacagaacaaacatctgtttaatccctaattgcaaatacaaattgcatgactttcctacactgcaagatctttctccttaaaatcaagaaaatagccaaacatctccaagaatttgcaagaacagtggacgatgttaaaatttgtaaaatacgtgcgggtagggtcgtgtaaactttcttcttttttattcacacttcacgtgttgtgtgtggaactatgttcacattagtttaacagctcgacacaaccatattcatacaaagtcttgataatattgattgcgttcgagccagaaccttcaaaactccattaaaaaaaacaaaaaaaatatatttgaaggaacaagaaaatttattgctcagcacagaaggttagggagatcattaagagtccattacaaaatttggaggctgaaacattaatattcttgactcgtacggattctctcatgttcatacacataaactagttatgtttttgtctttgtcaacaacctcaattaatatttagcagttgatggttggagaggaactttttatttactctttttatcttctgccttttaaagactacttgtttctcttcttcttctttattgcttatagcttctgagcatcaatggatccaaatcataataatcttctcatctttgtagccttttttgttctctgcttagccaccaatggtgtaaccggatatgccacggtcacaggctcggtgttttgtgaccaatgcaaggatggagagagatctttgtttgattttcctgtctctggtaataataattccaacatttttacattgctgtctatgcttgtgttccttaagatgtgtttgttgatttgttgcaggaatcaagattagtgtcacatgtgctgatgaaaatggacaggtctatatgtcaagagaagagactactaattggcttggaggatatgtaatgagatttgatgggacaccggatctaagtaactgttatgctcaagtttcagacaatggagttcaacaagacccaagtagctgcagcattgcttcaggtcctgcacagaaacttaaactaatgttcagcttttttgggattgaaacgtttgctgcggatgcccttcttgctcaaccagttcagccaagttctttttgtcctaaaccacccacagctccggtcatgcctcctcctcaagttccggtaatgcctcctcctcaggtcccggttaagcctcatcctaaggtcccggttataagtcctgatcctccagctacattgcctcctcctaaggtcccggttataagtcctgatcctccaactacattgcctcctcctctggtcccggtcataaatcttcctccagttacatcacctcctcagtttaagcttccaccattgcctcaaatccctccaatgccatttgtagagccatcagcttgttctcaccagtgagctttctctcggattcattccctaactcacttcaaaacaagcctagattttcgggttttttcggtttttggctccatgagtgagctttcatatttgttccttatagtacttcaaattctgcttcggtattttggtttttaaatttgatttttcaactaaaaccgaattatttgttggtttgaaaattgttgtttacttaacatttcggttctgttttaaattaaaattgataaaattacaaagaaaataatgtatattatatatctttagtagctaaatatgatttttggtagtataatcttactattggactttattcggtttggttaggctaagcttggttcttagttcggtcttactttcatatctgtttattatgcacacctttgtttcagataatttttaacattgtggctttgtgatataggttgtggatgaaacctgagtacagatgctactggagggcgataggtccagacacaaaggtcgcagttgcatttgggctagtagccgggagaatatacggcacagatatgacagtacgagaagcgcttgacgggcgaggagaagcctataagacacttctaagagaggcaacaactgcattgctcaattcatacaactctctaggatttccttataattccgtcgctgtgatcacatataccaatctggctctcctcgggaattcggaacacgatgtcctcatgactgctattcgtttcatcaaggctaattccgggacctgcagattcacagtctgcaattgattgaatgtgttttcaatacttatatactctacactctttctttctcttttacattgttcttgggtccttttgtaatactataaaagtctatacctggattcattggagaatttatggactattattgtatccctatttatactcggcattaaacttagttgttacaaagcctaacgttctagcactgtgagcactaaatgttgttatgatataatgcatcaatgattggagagggacatgaacaaaagtagatatgcttcattcataagggagatcacaaggtcttagaaatagaagaaaaacaaaccactgagctattatatatcagacaaggaacgtgttatgttctggctatttcaagacacaaactttcctccaacaattggtctcttgctaccagacagatcctgttcaaaaccaaagcacatcaacgctcagcaaaatccattaagagggtttccaagaaaacgaaaatatcgaaatcagtaatcacagtaagatatagagatcagattgtgtaccttttcaactcactctaacatgttcttgtgactaatcgattcctaatactccagtgcaaagggatggaagtgaaatcagcctaaatgtttcttaatcattgtccatattgcgtttgcgggtaataataactaagtagcttcttgaagagaggaacaatcgcaaccatagcaagttggagctgctcggagctgttaacacgaacacttacttgccctgctcctctattgttcagattagcacgagcaattaaattagaggaacgtccaatgggaacctgagactgtatgttccctccaatagcaagatcaccgtgccaatccattacagaaagtccaagagtagtcaaaaaccgaccaagcggataatctttatctctcaactgagcttccaaagtaccaccataagcaaaatctccccgactagtcatagctccaccagacattacgattctgaaccatttactagcaataaacttatcttcgactttcaaccccgcagaaaccgaatcacccaagtgtgttacagaaagaccagctgcagccttgtttctcctgaaattgttaaatctcgtttcgcttcgaagagtataagccaattcctttccaacagtttgcatgtcgaaacctagggaagttgatttaccctctccatgtttaaccgagctggccatttctagctgcacatttgcatccttcttgtcttttgtcacttgacctgagacagatattggtattttttcttttacaacaaagagccgttctgcattcacaccttcataaccaatatcatgatcccacccatgagtttccaggactggcctaacaagccactgattggaggaatcaaggtaccggtagcggtgagtagggttatcagagtcaaaagacgcaggtagagataaatctggcataggaactggaactgatgcaggtccaccactctcctcttccacattttcactatacccatcaggcaaatctttaatctctgcagcaaatttcttaaacatcttacgtctctttctttcctctttcatttgcttcttcattaaaagtttctctcggtactccatttcatcgagatactgcttcttctgagatttactaagcgtagccatctgagctttagtcaaactcttaaacggaggaagctgatcatactctgattcttcgtctgaatctgatgattcttctaaatcatcttcatcttcttcatcaccatactgctgttcaggaagcttaggttgtggtcttgattgcagaagcgatgaaaggagaaatggtaatggcggagccttggaccgagctgcaaatggtctccctggaatattatcttgcaacttcaaaagagcatttgcttctgctagaatcttagatgcaaatgagagtagcaacaaatgtggcttccacacttggccattcggtaatactctctggcctgcccgattagtcctgcaagctgagtgattctcaactaaagaaacagggttcatgagcctcatatctccagctgcttggcgaatggcctgctggatgacatgagaacgttgtgtaacaaacatatcatagctagaagcagtgccatttgggccatctggtggaacagaagcggcatgagtcaaacccacaatggcattaaaccatatcgaaggaccaaaaacatcacttatggtgcgcaggagaggcatgtcaccagaatctctgctttgcatatccaacctatcaagatatagtacaatgtcaggtggattcttcttgatgaaagccttaacagaattcaggatcttctcattcttggcttgatcagaccaggaaggtaagagaccgggagtgtcaatcacccgtaccttaattccctgaaccaaaccctcaacatcttgaaccctctttgtccccatctggaatgcatcagtacaaaatttcacttcatcaaatatagaattgatcgttgcacttttaccaaccccactttttccgagaaccataatcgtacaagaaaaatcaagtggatcctgtccagcagcctcaagctgttctgccatggcactagcgcgatcaaaactaaaagcaccaacacggcttccatttctgcccctcaactgctcagccaatccaagcctgtataaaacctgagcaacaacaacattatgcggggtttgccctagtctatgtgcaagcctcaaaaattttaccctgatcaactggagcttctcgcgggtctcatcatgctcatcagcctctgtagtggtagagtcttcagcttgctgaaactgattgtgagacccattcccattgacgcgagactgttgaggagcacgtgatgcaggttccaaaagaggagaagcacgaccaagacctgctggacgagcaggtggtaatgccgcaggattacttctagactctgttggtgaaacagaacttactacctcaggttctgtttccacatgtgaattttctgtaatctctggatctacatgtactctgctgctttgctgcttctcaagctccttatttggttgaggactctgaacatcatgtcctccattagcactttgaactggtttgtgttctctactagttaccccaggggagccactattgctgtgaacttcagttgactcaggatatgagtgcggcgaagaagccaagtgttgctctggttttaaacaagtactgtccccttcagtctctcccttttccccggaactagattcctccaatggagatgaagtcacagcacttgatacttcattgtcacctgaagcattagtaacgatattacttgtgtaggcggcaccagtctcaccatttctttctgcctcggactcactgtccatacatactgaaccattctcaaatagatccttacttgttccttcaccttccacaacatcttgttctgtctgtttctcaaatagattcttacttgttccttcaccttctacaacctcttcttctgtccgtttctcaaattgattttcagttgttccttcaccttcctcaacctcttgttctgtctgtatgccatcaactctttcctcccaattatcgacttcaatgccatcattccatggttcctcaatcccatcatctttagggataacttcagccaccacttctttatttttaggagaggcgattccatttcccaaaaaagaatgagtctttccgttttcaatacccacatgctcagctgctaaattggaaccattagtattagttgatgtagcattctcagtggtatcaacaacatccaagctcgattcaactttatcataagaaccacctccacctccttcccccttatcaccattcattttagtagccaaaacatcaaattcagcctctcccgcaccatggctctctccaacagccgtaaaatctttaacacccccttcattgctactcgtttcatccaaatcacccactgcctcttcaaaatcctccacttcatgctcaaccatagaacttttaagagtttccactaaaggcaaatcatcagattcaaacaattcacgttttggatcctcctcctcctcctgctcatcattctctgaaccaatcgcttcctcaaaaacctcgtcctcgttatcatcccttacttcatcagatctcaccaactcattcttcactacttgctcatcactaattctatcctcagcaagcttcttatcttccctatctgacctaaccacaaactcagtcccatctcccattttctagatcaccaccgctacgggaaacaaaagccacaaatacaataatcagagatcagaaatcactccaattaccaactacgctttaaccatcaatataaattccaacaaccaaaaaaaaaaaaaaacgagcacacagctaaaagaaacctagatcagagttaatcaccacgaatcctagaatccttatcccttaccaattccagaaactaaaattcaattgaagttaaccaaatcgcttaaacacaggtctaagcggtgatagggatctccaaacatggaagaagaactttgttgattacaggaaacgaaaaccaaaacagaagaaagaagacgaagaaagaagaagagaaatggagagaagccttaccagaagttagagatagagagagagagagagagagagaaatagagagaaggtgaaaaagtgtgaagatcctttcatgcgctttaccggctgcgagcctgcgactacgacggggaaggagataagagacgttcatcaacggtcctgatcagtttgggtttaagcatcgtacggttgataatgactcgttgatgcaatcgtgaaatgatgctgacgtggactatataaagtagagtgagtgaagccgtgaaagggaatagaaaaccctcgtgcgtcaattcggtttaaccaacccggtctgattcggtttggtctactacaattttttgtgttctttctaatgagaaaagttcagtcccttattatagaaccaatgaacgttttttgtgttaatcttcaaaggacaaagaatgaaaactcataacaaatgatacatgaactcaataagctggtgcagctactaaggaatcttcccattactcttaggtgaatctaaaatactttgtctgctaatacacatccaagttcttgaagactcttcattgttttcgcatgagaccgggaaatgccatgaccctttctctgattcctgattttgtcgaaacgtaattgagaaactatcgaaaccggagaaaaaaaggactgagatggtaaacaaacctgaatgacaaccgaaaaaggagacggcatttcaagcttcaggttacctttcacaaaagtataccggacctgtaccaaaaccataaaccaaatgttctaattgtagacttctcaaagttgcacttttagtataaaaagttacatattgtatataagtttatataactttacctgatgtctttctttccacttttggaaaaaagtactccctaagagttcaaaaatgtggtctctcatctcatcatttgtcacaagcaaacacttgagcttagcagcagcatacagccaatacctggaaaggtaaaaaaaacaaaagatgagtgtagtaaccaaacattgtttgtgttttttgtcgaaataatggtgctgagagaagctaaaagttcataccaatcatcattggaacctggtggagttgcatacaggacaccgttactaatccattcttcaaccagattccggtgagttgggttttctaaaagcgtcttgacccgtctcttgtgcaatagaattaggggccatttgttattaccactttcacggtaaagttccttcatcacagattcaagctgctctatcccacatgtatgtgatatcagtatagcaaggaatggattctaaaaatatggaggaagaaaaacaagtaccccagaaaagatgggagaacctgtgaaagactgaaactgccatctacaaaattttgttggtagagcccaatatttgctccatctactatagcttcgtaatctccatgtttctcaagccagtcctgccaaataagatagcaacattcaacaaatatcgacatttgaatactcaagattgatgacaattcgcagcaaaaactccaaccagtgtacctatctctaaatgcttatcatgcaatatttaatgtccaagacttattataaccaagctaagagaatcccatctctaacctgaaactcgctgaagaccacatttgtctcacatgaattcatctttgtcttcctatccatagccaaagccaccaaagaatccacaaacttctgtgtttctacctcattggtatctacacaagctaactgctcactgcagctcaaacatcttcctgttgagctaacattacctttctttacagtccatttaccctccccaacccacccatgcccgtgccacccacctccattattcaaaacagcttctctaagcatcccaacatcagaaccaattccattatcaccaacctcaccagctttttctccacagaaccattcctcaataattttcaaagtttcttcactaacgcagccaacatattccctcaacttatgtaaatatctataaaccttgttttctcgacccgtggcagcacttaccttcaacaaagccgatatctctgcctcctccaatgcaatacctgcagcttccatgtgctcttctacctcataacccttttcagcctccaacttctcgcagaaacagagcaaagccggcgcatatgtcctcagacgaggaatcgacacacctccaacagaaacaaactccttaacaaccttgaaagcataatcaccattacctttagcagcagccagtctagccactgaagtaacagatgcctcattaggacttatccccgaactaaccatacgatcaaaaatctcgaaaccacggtcaatggcaaggtattgaagagatatgtcagtaatggaagctgagcataggtacagaagcgtttgaaaatgttgctggctgagacgtacttcactggaagtgatggctgcatcataaagtgctaatgcagctgagaggtccttggacttggagcatgaattgagattgaagaggagatttgtttctgggtttctgcttaccttcttcttcttgttgggtcttgaagagctctcgtcgtgacggcgagaccggtgttgatcagaagcagccatgtatacctcaaagttacaagctttgcattggtagaaagtggtagatgaaaccctaaaccctgaatcaaaaaaattatgaactttttcttgaaaagtgaacagaaacatacaaattatagagttgctatggattggctaactattctagttctcctgagtattcattccaattcaaaaccaataacagtttcagttcctaaaaccttaacaaagatgaaagaccttaccttgtttgaagtaaacgaggccggcgagataaaccagctgacggaggtttaaagagattagatggtggcgtaacgtcgatgcgtggaggagagaccacgaattcgacaaagaccacggcggcggctactcactgagcagaatagatttaaaaggtgaaccgggttttcaattgtcgatcccggtttagcgtaatcttggttcagttttcgattcacttgtaagtgagctggttctcgagtgatcccattgttgatcccacttaattttccacaaaaattcttattatggtcatattcgagttcccatctattaattgcccattaattcacaagtgactgaaaagtgacaagattggtgattttctgcattatattgtgtattattaaccacttagtatatatatatgtaactaaataaaatcttagaaaataattggaattggactatcaaaatgtcatacatttatataattttgaacaaatctcggaaagacaaaaaaatacattggcgatgctactacaacaatgatctctggtacttgaaattttgttcaacaatatcttgaatccgatattgtatcatgtatacaaaatcagcatctgaaaacaatgtagtgcaccggaactagatatacagtgtcttaactaaggctaccaccagatttctttgacttcttgctagcgtgaatcttagcgtaaatctccttagtcctataagccaacacaagatccaaaccgactccgataacagaagctaatgccatgactatgaagatgagacggtagcaatgagctcctacgcacgtgttgcccccaccaggagttggtgttgcctctgcatcgtagaggaagccagcgaggagacccgagaagagaaacgagccaagtggcaagttaagtactaagatgttgtagatgagaccgtagtatttgagaccaaagagttcggaagctgttggtacagttatggctagacggacaccgtaacatactccaaccaccattgaaccgatgtagagtgaattaggcacggctaaagccattagtatatatcctacggccataaggatttgagaggctgcattccatagtggtcttggtgttccagctttcctataaaaattagaagaaaattatacattctttggttagtaaagtataaaatcaacatggttgattgagatatgatatatatgttgcataacctttaaattgaatttttataaatcagtagaatgtaaaagtttcaaaagaatccaaaggggaaattttggtggaaaattaagtgggcacgtgaagagaaaagaccgtggtccaaaataaggaaaagagcaagatatttgatttggaattgtctatgtagtacaaaaactagttaaatgaatcaaccagaaaattctaaaagatcccttttcttaatatgagaaaaatcatttaaggaagaagaaatatacaaatttagaacgcattgaattttgtatgtccatatatgaggatgaaaaactatatacgtcacgttacagctctgcaatgaatgttggtagttaatgtaagaacgagaattgatactttcaatgttagcatcgtacagaacgacacatagtaatatggtttgaacagtaaactacggccaaaactgtgcataacttatgaagtttttactgttattagtccctaaaacacctttggttcatcttaaatcatctccaatgtatatctctattttttcttctattttagagacaactctattttaaaggaaattgagttgattttgtttcgatgtattactctaaaatagaagaaaaaaaaataaatttcacttttgactctatatataaaagtgaaaatgagattcctctatttttttctctattttagagtaaagtctattttagagacaatattggagcaaaatacctctaaaatagagacgggcattgcctttaggagcggatcaaaccgtgaacggtaagataaaatgcatatggagatgagaggagcaggagtacttacttgagaaagtattcggagagagtaccggagagaatgcgaccgaagaatccccaaatactagtcatggagacaaagattgagacatttgtgtatccaagggcaagacctatctgacccatattgttcatcacagctaaaccagttcctacaccacacaagaaggacacaaaaagcacccaaaagtcaacggtcaacactgcttccattatagtgtggtcttctcccaaaaccggtttcttcctcttcttctcctcctcttccgctgccaccgcagctacaactattacttctttctccgctgccgctatctcggatctaagcaacggttcttgaatccgtccttctaagtcatcttgttcaccgtagttcaagctcttgatgaaggagtggaaaggaatggctattggagaagccaagaggaagagaagtatagaagcgaaagcgacagagaacactccagttttgattccaatgatgtcgtaagactgaagatacacggcgacaacaacggccacaatgttgaatatggtaaagtaacgagtctcttcgttctcctcagctgcggaagatgctggtgggatctcacggaggaagaaaaccgccgtgagacatacggcaaaaggcaccacggctagtaaaaccaaaaacgacgccggatcgtttgagaacagagcagtacagagatcagtgaatatagctgtgcttaaaccgacatatcctttcaatatcccggagaccggaccacggtttcgtcgaaaattgcgtatgcaagtcactagaaccgccgtgttcatccacgttgtgctgttccctcccatacagaggaatatacacatctgaaaattcgaaaaaaacaacatacagtattcaatttattgttgactagtggttagttgtactatgactatccatgtgtgagttgtagaaagaaaaagagaaagattatggttagtacctgccaataagggattggttggatggtgcggctaacaacgagccattgtacaccataaccaagaagaccttcaaagcaaccaataaggaggatgaccggagtgggaagacggtcagaggcaaggccagccaggatcccaaaggcttttccgacgtctttagcgacagagaggttgttgagctcgagctggttgagattcatgagagacttaagagcaccggagtagtttgaaaaagtgtagttgttgccggagatggattgaacccaaaccgctgttacaaatccaagccattttaatgcagaagaagaagagatagatctttggaaacccatttgtagaaagaagatgagaaagtgtgtgtgggtcgtggagcttgtccgtatggacggttttatagaagagaaaaggtaaagggtttttatgctttgcgtgttttgttttattaattaggttttgacatttttgtgaacaattagtaacaattagcaagttgtatattttaattataagatgtggaatgagaccaggaaaggtacgacgccgacatgtacgggttaaagtaggtgtatgtataaagtataaaccgtgtatgtattatgacaaaagaatattaaaatacgacgtgctaatggtttggtctttttcttttttttgttccggtcgtttgaaataattgtatgtggccaacttgggaattgatgcatcttctggtatatacggttagatctagtattacttaattccgatcaattctgcaattttttagtatccggaaaaatttagatacagagagatcgtgtaatttactagctgatacgaatgcatgtgtgttttttttttttttagcaatcatacgaattggatgtttgggtactaaaattggggtttggagaaaaaaaaaattagggttttggatactcgtacggtcgtacctgacatgattcaagtacttaatttcaattcaaattatgtataacttaactttttttcactgaaataatatcgttattaatttacacataatattttcgtatcatatttaaaaagaaacagtttaatcaaatatatatttttaaatcagattaattagatgcaagctaagttcccaacttttttgtggctaccctaaaatacgaatttcattgaagacctatgagggtttttgtttgttttgatcctttttaatcaaatatatttcaaacttgacattttattttttaaattaaaaaaattatatattaagttttagtgttttactcaaaataatattgttttaatctttgagttttatttcaaataacactaaaaagaattcaaacagcttacatccttgtaacatcgaatttcgaccgtcacaattcttgtctatactaaaataaaaaatcgtccgaataccataaaatcatggatatgttatcaaacgagattgtggaagtcaaaactcgcgtaacaaaccaaccttgaactctttttttttttgtctggagattgtatatttatacttataaaggaacattacaaaccaaccttgaaaaaaggacatggattagtgttaagatgaaattaaccatatgtccatatctaccaagaaaaccaaagcaagggacaagggagagccaataagagttacacatgaggggagactctctctcatcaacaaagaacctatatagtatgtaactaattgggatggccaatagcaacatccgtgatttcgggaatcctagataacattttgtgcgataagaaaaactcttctatttgtctatgcattcacactttccgaattctagtccttactcttttacaaaaattaacgaatctgagagagacttgatgattaaaggaaccttattaaactctgccataaactgtataaattaaactttcaaagcaacactcaatcataacgtagacttcattacgaaaatatatagaaaacgtgtaatatatcattataaaattataaatgataaataatttaaagttaaaatacccatattcaacttactttatcttggtaaaatatatgtggccacttttgtctatattcacgtcgaagccatcgtgctcaacagatcttataagagaaagagattatttaatgtacggcgtggaatcgtttacagctaccttgtcagataattaagactttgttaagataatcgtaagaaaccatgttctgtttccattatcaataaaataaattcgttatcacgttgtagcctgagtattatatttccagtatgtgataacgaatttattttattgaaaaatttgtaatatacttagaataattttattttgagtaaaaataactttttgaaaacttccaaattagaatagtaatttgaaatggcccattacggttaagaaattgatataaatgcggtagggcaaaaacttatggtgacgtaaatatgaggaatatgagaacatgtagggtgaaagtcacgcaacttgcaaattgtataatttaaaacggtggggacaaagaagaaatatattgataaagacgagtctctatcttacatcaataatagatattttttgagctatcgatctgatttgcgggagaggttatcacattttgcttatcacattcgaaaaagacagaaatttgaactttggaacattatctctttggtactggcaatgttctttgtacaggctgtctttcccagcctccaccgcagactaaatgatatgaacacgatccaacggctgagagagcgggtgtattattgtgcgtactttgctttccgaatgaaacctccacaaaagtcataaaacataggaccaatagatgaataatatcgtttatgaaataaacagagtttctctgatctttattatgaacgattacatgtacatatatagtttttagagaacaggatctctatgttatcataatatcgtatcttcacagaaaatataaaaacaatattaacgatgcagattttatggaatgaatctgatacatattgctgatttaacgccaacttcctcttcacgtaactttgtagctaaaccaaacccggtttacctttaaacgaaatctccaactccaacaccccccctcaagttggagcatacaaatttcgtatgcctaacttgatcctgaatgctgagaaacaatcacgtcctaagggctttgtgaagatgtctgcgagttgagacgttgtgccaacatgtcgaggagtgattacacctttaacaaactcatcacgcacaaagtgataatcgatctcaatgtgctttgtgcgttcatgaaatacgggattcgtagcgatatagatagcggacttactgtcacagcacattatcatcggttgtacatgactaacaccaagtgaaaacaggagctgtttcaaccacaacaattctgaagcaagaaacgacattgctcgatattcagcctccgcagatgatttactcactgtatcttgctttttcgttttccaagagataggagagtcaccaaactgcacaaaataacccgttactgaacgccggctcatgggatcaccagcccaatccgagtcgcaccatcctgtgatttgaaaatcacccgaacgtcgaagaaaaaccccttgaccaggatcagctttgagatagcgaactacacgcaatgctgcagcccagtgatcttctcttggttcttgcataaaccgtgccaaaatatgtactgaaaatgccaagtcaagtcgagtaaccgcaagataaatcaatctaccaaccaatcttctatatcgttgtggatccgtgagaagtggtgatgttgacaatccaagtttatgattttgttccaagggaaaattcgccggcttaactcccaacaaaccggtttcggaaatgatatctaacgcatacttcctctgacagatataaattcctgtggtacttcttgccacttctatacccaaaaaatacttcaatggacccaaatctttcatatggaagcaagacgcaagatattctttaaattgctgagtcgctctttgagaatttccagtgataatcaaatcatccacataaatcagaatttttatccgaacagaacctttgacaagagtaaataatgaataatcagctagtgattgctgaaatccatacctctttaaagctgttgtcaacttctcaaaccaacatcgaggagcctgttttaatccgtatagggctttacggagacgacaaaccttgttcggatgtgaagcttcaaatccaggaggtagcttcatatatacttcttcacgcaaatctccatgtaaaaacgcattgtgaacatccatctggtggatttcccaattgcgttttactgctacatcaagaaataagcgcacagtagccatctttgcaacaggagcgaaagtctcaccatagtcctcaccttctttttgtttgttccccagcgcaaccagtcgcgccttataccgttcaaccgagccatcagaattgtgtttcaccttatagacccattgactaccaatcgctcgtttcccgggaggtagatcctcaatggtccatgtatgattttcttcttgagcatcaatctccaaacccattgctttaatccatcttttatccatcattgcttgtttatacgatcatggttcaatcgcagatgtaattacagcaacataagtagtatgagaggcagagaaacgacgagtatcatcccgtttttgcaattgatagagaatcgaattaagtttagatggcgactcttgacagactgttgtgttgacaacaaaatccttaagagtcacaggcggtgctttgtttcttgtactttgacgtcgtggaggagggaccgccggtggtgcgaccgcttgagcggtcgttggcttagctcgagacaggggcaaaaattgcaggttcgtcggcgaggagggtgacgaagccgatgtcgttgaagttgcaggcgtcggaacaacttcagtgtctaacggagaagacgtcgagtgttcagatcgtgaactagttgcagaagggctaatcggagaagaaacacaaattggaggtgttgggcctgcgttttggcccaagtgaacttcttcttcaataagcccatcaactattggagcccataaagcttcttcttcttcttcaattacgttctgttcgtgagaaattcgaaatggaaattctagttctgagaaaaccacgtctctcgacacaaaaaattcattttgttcaagatcaaacaatctccatcctttttgaccatgagggtacccaacaaagacacaacgtcgactcctttctgcaaatttatcaccaccacgattacgattgtgtgcatagcacaagcttccaaaaacacgcaaatgatcaaatcgaggctgtttcttatgcaaacgttcatatggtgtgctgtcatttaacaccgagcttggagtacgattaataagatatgctgcagtcaacacacactctccccaaaactgaattggtagattggcttgaaacctcaacgcccttgcaacattaagtaaatgtctatgttttctctcaactctgtcatttcgctctggagtagccacacaagatcgctcatgaataactccttgttcctggaaaaatttagtcaaacacagaaattctgttccgttgtcgcttctcaccgtctttatcttgacattgaactgtctgtctgtcattgcaaagaaattcttcaagtgacatggcgcctcactcttatcgttcaacaagtacaaccaaacccctcttgagtaatcatcaattatagttaaaaaatagcgagcaccggtatgtgacggtgtgcgataaggcccccacaaatcacagtaaattaactcaaaaattcgcaaagttttattgatactcaaaggaaaagaatttcttgtttgcttagcacgatgacaaacatcacatgccttattcaaatgtgtagaagaaacagaaacagaactctcgggtatcaaactaacaactctcgcagctgggtgacccatccgactatgccacagctcataattcttctcctctttaaccgtgactgatgccgcgatctccgtactgcgaaagtgaaacgttcccccaacacgcctaccagctcccatcaccatcctcgaagtgcggtcctgtacgacaaggaagcgatcagacatttgcaaaacacatcgattctcatccatcaattgtccaattgagattaaatcggactgaaattcttcaacataaaatacagatatcataaccaaatttgacccaagtcgaactgttccttctttaactgaaattcgttccctaccatcagctagaactatcaaaattgggtccatatctctaacatcatcaatatatcaaattttcccgtcaaatgatgagaggctccagtgtccattatccaagagggtgaagtaaacttaccggttagcttttcagttgcagcatctttcccggagttgagaatgcttttgatggttctccactgactgtcggtgagaccattcacaccatcacggtcttcgtcagtgagagcatagttagcttgctcatatgtgtcgtggtttggaaccgtcacacgattggcataggcagctgcaccacgtccacgccctccgctcgaattggttcctccacgacctcgagtttgcaatgatctgctccgtggcctatctccccaccactccggatagccaatgacggcataacagctttcggatgcatgaccactgcgattacaatgtttacacaccatactcttatctttttcatcacctcttccttgataaagcttcggtctcatttgagctgcaaatgcattgacttcacgttgatcatccaaaacatttgccccattcctgagcaaatcctcctcttgtcgcactatgttgtatacctcttctaaaggttgcacaggaatacgtgacacaagactcgatctgaccgttcgaaacaaagcatcatcaagaccagacaaaaattcatgaactttgtcttcttctcgatctttctcttgaagagcaccaagatcgcacacacaaccaccacacttgcagatgcgcaccggtttgaaagctagccatactatcccaaatcttcgttagcttcccataatatgtctcaattgtaagccctctttgcttacaacacgctaactcagatttcagttgttgaagctttggcccattcatcacagagaaccttttcttcaaatgatcccagagatccttcgccacatcacgatgagaaacattctttttcaccaccggatcgatactcatcttaatccaagacacaagtagtgcttaaattgtccaccaatcctccaaatctggagatccttctacgggttttgagattgtcccgtcgaggaatccaaatttcttgcgagaacacagcgccgtcttcatgctacaagcccattcatcatagttacttccagtcaacaatggatgtgagattactgcacaaggattattagcggaggttagatcgtagggtaaaattgttcttctcacctccactgtcgggttcgggatcgggttcgtgttcgtgttcgtgttcacgttcgcaggagctccaaccattgtcactcttcgtttcaaaagaaaatcaaaattgatttctcaagctctgataccatgaaataaacagagtttctctgatctttattatgaacgattacatgtacatatatagtctttagagaacacgatctctatgctatcacaatatcgtatatttacagaaaatatagaaacaatattaacgatgcagattttatggaatgaatctgatacacattgctgatttaacggcaacttcctcttcacgcaactttgtagctaaagcaaacccggtttacctttaaaccaaatctccaactccaacaggttaacagaagcttttaaaagaaactcacgcaatgcacttctctaaatgttcataactctataaggttctaagaaaagttgctaggtacatttttttatctataaccacgttttgttatacacgtttaaaattttaagaggaaaaaaagttaacaagtgttgtttgtggtttaattcaaaaagcgttcctaaacattcattgcattattgtcttgttttcaaaaagcgtttctacattcattgcattaatgtctcaaaaaatcaaaactaacactcacattctaattccatataggactacaatattattatgatcgggggcagaaagtgatcacttaacaagtttacaagcttcgtttgcttttcctaattatctggaaagaggagatataaattggctgttgataagtgtaaaaactaatcaaacacctagaatcttcaatgactttagattgtagaaactaatgaagcaccattattttgttattccctttgatttgaatgcaatctataagtggctttagattgtctccaaaagccattaattagtgtctccaaaagccttagagacactaatgttccactaagatatatatggcaccggtcgaatcaaatgtgtcgaaataaaaatgtgatttcattttacctttataaaccaaaaggaaaatatatcgggctgcttttgtactcatgagtttctttagttacacagtttttcaaccacacaacttaaattttatatccggactagttatccaaactctggaaaaaggttgaattcaacaacattaatttctaattctaaatcctacgatttaaaaggtctttttgaaaatttaaacaaagttaaatgaaataaaataaaactattaagccgaaatctaaagcataaattgttaatctcaatcctgaagatagatccgaatttgaaatttaaaaatttataaattggaaatccagacgcctaatctaaatttttagatattattagagaataaatgatcaactggaaaaagtgctgataaatttttagatattaccgaaacagaaaatatttgtaagaaggaaatgacaaaaagaaacaaataatatgtctaacgataattagtgacgtaaggaaatatcttacctacatacaaataaaagcagtgcgcaagtgggtgacgttgttttgcggctgaacttgaaatgttaggtgtatgattactttttttttttttcactaagtgttgtctttcttgtattaagaacataccttgtattaagaacatacatcaaaaagtacactagttgaccttccacttacaggatgaagacaaacactataacaagaaaaaacatgatctaacaaaacacaatgttgatcatgccgaaaatcaaaaagtgatgagtaaactgaaacaacaacagcagataagagaagtcataaccaaaaagagttccaccggctctacttccatctgctacttttgcaaaccttagacctgcaaacttgtaccattgcagtccctattattcaaacgtttaagttgccaacaaggatcctcagcagcaacaaaagccaaaaaatgacagaatttgcagagtgtttaacgcttcttaggaggtttcagaatacctccttccttatgctcctcaactctatgagttcttccttcttcatcactcccaggtcttcccatattcttcctttttattgagtctcccttatccaattgagtccttgaagctccaaactctccttgtcatgaacattcacctacttcaaccactcgaggaacatttgcaccaaatgcaggacccgtaaacggttgtacattagagtttcttgacgcctcttgcctgcgagatggaggattaagatttaatgttcctatatttggtaaagaacctgctctgccttctggaaaataagcagccctaaattcatcaggattcaaaggaggagctgccactcttggaggaggttcaataggtgctggaaaggcgttctcagacatctgtgattgggagttcagggaagaacgatgatattcatcccgggtacacactccttctcttctagacctagtgagattgttggtaggaccacgaatgatagaacgaggctcaggttgtcgataagggcagtaattcctatgatgagtcagcctgaaacagctactgcaaattcgccttagtctttcatattgaaaccttatcagcgcagtctcaccagaatcaaaggtaattctttggaagaaccttatacgatcagtgatctcaaatcggattctcactctaataaaagctatttgggttgtagtagcatcatgaaaatccaatgatataatttgccctaaaccaagagctatctctgtcactgtggcttcacaaacatagaggagaggaatcccacgcatttgaacccacaactcaatgttagacaagtattcaaaagccgagtttacctcccaacgatgagccgtgacaaaccaactattgtaaagccagggttcccttcgtagcacagacaagagatccagctctcccgtgaactctagatgtcagaccccaaacccttggcaaggcagcaaccacaacattaagattttgagctctaggattaagaggccttgcaatcaggctaagtctattccgtgattcattagttgcataagcaacatacgaaataaacaaaggaggatcctctcttcctaactctaactgttgtaattcatcccacaactcatcagccataataccaggaaaggagaagcacaagagaagatgagatgagactcgacttataaacctaagacagaactcgtatatatagcacaaactagtctacccataagacccgactaaagacaaaagagaataaaaaacctatccttataagaagataattaacaaaagaaaaggaaaaacataattgctaaaaagacctcgagaaaatttaaattaattaatataaaacaaaactaaccgactcataataaagagaaaacccaacacttaggaaactacttaagataagaagacaaaaaacaacccagtcataagacctccaaatacaaaaaacattcgctgcttacacctgtcaaccttctaccacgactggatcaacacaattggaagccaaacacttgtaatttagcctgccagatatcagaagccagtctcaaacattctgctgatgaattctttcctcttcaaacagacttctcaaccaatggggaaaactacaagccacataagattgccacctcataccagtgatgacactcttagcgatctcagcagcaccgttattacactgagttgattccatcatcataaaccaatctgatatgtcctttgtaaagctcaaaaattccgcaatatggccaatcaacataggccactcattcggtttatgaagggccttaatgatatcatgggaagtggcagcaaatgtgactttatcaaaatgaaagtgatccatactctctaatgcccaatcccagcttttgatttttgcatcaaatagagagtatacctgagaatatgatcttctactatgtagtaagacctgccccattgaatctctaagcacccaagaaactccagctaactgtttctgtcttgaccaagcaacaccaatgttacattttagttcacctgcaggtggaggattccatttgtgttctgaaggactaacaccaccacttgatttttcttgagcattgatccaaagattgcactcttcataagctttagctacaatctcactactcgttaaaccagtaccttgaaacaaagtcttattcctgtttttccatatctcccacaataaccatggactcacagttctcatatgacgagggattccaaaattctgagaattttgaatcacatgatttatattggagaaaatagatgtcccaaaccccgttgcaggtgcctgaataagtgaaagtgcccatacttgtctagcaaaaggacattgaaacaatagatgattaattgtttcaatttcctctttacaaaataagcatccatctgcagttcgaatgcctcttgatcttaatctgtcttctactgcaagagcaccttttaaagctttccacatgaagactttaatttttggaaccgtttcaagagaccaaaccttgtcaaacaaaggattaacagaaggataaacatcagcctccttgaagagattcttgaaagtctccctgctacttctttcatatccagacttcaccgtgtataaaccattattagtcccagcccaacaataagagtcttcgctagagatgagaggtctctgatgcataattaattgaacatctttctcatgaaataactctgtcagcttcttcaagttccaattccgagtgagaggatcaattaaatgactaaccttcatatgaatattcatcaatgaatgcaaattcataggtcgtcgactatgtccatcaaacagccatttatcaatccacacattggtttgctcaccatttcctataagtctcttcagaccaccatttaataattctctgccatacaaaatgcttctccaagtataagagggcctagttccttgacgagcattaaggaaatctgtgttcatgaaataccggctcttgaatatttgagaaacaatgctcttcgaatcactgaataatctccaagcttgtttggccaatagtgcctggttaaaacattgtaagtctttgaaaccaaaaccccctaagctcttaggcagagttaacttcttaccacctatccaatgaattttatttgaaaattccatagagttccaccaaaaatccatcattacacttgtaagcttagtgcataaacctttaggaagcctaaaacaggtcataatatacacaggcaaggccaaagcaattgactttaacaagatctccttgcctccttgtgagagagttttatcataccaaccagacaaatgagattgcaatttttctttgatatagccaaacaaatcctgtttggaaccactcaagttctcaggtaaccctagatacttccctgtcccaccttctagatgaataccagaacgattcttgatccaccgtttagtatcctcatctaccttaactccaaaagtgatcgaagatttctccacattaatcagttgtcctgagatatgcccatactgagataaacaaagcatcatctgttcacaatccgattttgttgctcgacagactaactgagtgtcatcaacaaacaataaatgattaactgaaggcccagaaccattaaactgaatgccactaacttttttagaattctcagcttgttgtagaatatgaataagagcttccgtacaaagcacaaacagaaatggagagatgggatcaccttgtctgatacctctctcgggagtaatatgcccaaaatgttgaccatttatcagaactgaataggtaacagaagtcacacagcccataatccaagaaatccatttatcattgaagcccaaagcaaccaaaatttcttgtaagaaagaccattctaccctatcataggctttagacatatcagttttgaaaaccataaactctttggagatcttgtcattagttcttaagctatgcacaatttcatgagcaatgagaatattgtcagagattaacctttcggcaaaaaacgcagattgagaaggtgaaacgatagatgggagatgcttctttaatttgaaagataggattttggagataatcttatataagactgagcatagactaattggtctaatatcggacattctctgagggttagtaaattttggaatcaaatagaggtgagtatggttccattcttgaggcagaacccccgtctcaaagaaacccagaatctctatataatctgatccttgacaacattccaatttttctggaagaataaggcagtgaaaccatctggaccaggagcactctctacattaatcgaaaaaacagcagaatgaatttccaattcagtaacagcttgagttaattcttgattcatctcctctgaaactcgagttttaaaaccatccaaagccgactgagagttagcaggataagaagacatgaacagattctcaaagtaaacagaagcaatattgcctttctctctattcaaagtgtgttcattgccattctcatcaaccaaaaatctcaaagagtttttagttctattagctttcaccatggcctggaaaaactttgagttcctatcacctccaaacagccatttatctttacttttcaatctccaaaaagattcctcttctctaaacgcaaccccaagttgagtttgaataactgaaattctagaccagcaaggatattgtttgcttttttcttcatccaattctgatcttagtctcaatatcctattctgagcattaaaatcactattctttttccatccacttatagcttttctgcacttgaccatacgcaacatagaagaagaaacatctgaaatgccattaccaatccaagaactcagggtagaagctgcacattgagggtcctctgcaaaccgtttatcataacagaactgacctctaaacacttcctggtcattaacaaagttcaccagaacaggtctatgatgagaccctaatttctctaggaaccattggtgagaatttgaaaacatcgtaaaccattccgaattcccaaaacatctatccaatttacattgaatccattgatcattccttgttcctccccaggtgaaactatttcctgaacttcccatttgatgcatgtcacagttaagtaacatattcttgaaaggttgaaaagaagatatcaacctagatggaccccctagctttccatcattagacaaaatgtcattgaaatcccctatcatacaccaagctgaatttctctgaaccccaatactactaagcttatccaacagaagatatcttaaatgcaacacagggttaccatacacacaagagacaaaccagcttttttttccttgagacacttttagatccaaaagatttttatcttcaaaaagaaaatctatctctaaatgatttttccaaaagatcgctaatccaccactctttccaactggttctatagtatgaaagtaatcatagccaagccatctaaaaactttcaatagaaactgatcagaattcatggttttccatgaggaataagatatccgggaaatgctcttttttcatttccttaaggtgccgaattgtccaagggttcctcaaaccttggcaattccaattgaggatgccttattgatattgcgatggttcacaaggaaccaccgtattatcaaatctctttggacattttgcagctttagcttcagaagcttgattcttccttatgaaagttttaaaattcttgttattgaaactaacctctttcttagtcgtttctaaagagattagcgccgtcttcctagactcaatctctttccttgatctcggatgtttctgtttaatactcaaaccagacgaactcggcctatcaagagaagatggacaatttgccacaaaatccaaatccaggaaatcagagctaggcttttccttacaggactgaaacatatcttgagataccaaaaggcctggtggagaacttgaaggagagttggaatgatcaatagaaaccacacctctctgattatccaaaacccctaacctttccttcaaccctttatctatcacagcatcttgaaactcacaccccaacgaggattgggttaaaggaatattcaattccttctcaggaaccatcctctgtaagtgttcagaatgaatattctgattttcttgttgacataagggcaatcagctttatcatgagttaatctttgacagaagaagcaacgtttcctaattcgctcataatcaaaagtgactgaaaccacttcacctgaaggcacctgaactgacttggagttacgcagaggatttctaacatccaaattaacttgaactctcacataatcctgtgcctgagatttctccaaatctaattcaacctttaccacctgaccaacacaccctgcaattttctttatcgtctcctccgtataataattaaccggaatattgcgaagacgaatccaaatcggaaggatcatcaaatactcctcaggtggcttttctacccatcgatccattataacacaccactcatcttgagtccaaactcctgttttcaagatttcaagtaaatcatcatttgatttatagaaaaattgaaatctttcttgagatagagcaaccccacgaactctagagtagatcctccagattctaggcatatctaatatccaattagacatccgttgatgagagggattcagaaatcttccaataagactgcaactattcctctcaatcgaacttaactgaggttgatttgatagaattaaaggactatcatcgttgatcgtcatctcaaagattgctttatccaattccatattcatgataagaacccctttaaaacactttcagaagatactcacagcaacacaattcacagagaattgatacaactacagctgcaactacaacccaaagatcttgacttgattgaaactcaaaagatttagaactccgacagaaaacggaaatatcttcgacaaaggctccgctccaaaacaagagtgcaatagagggagaagttcttaagcccagctgaaaagggacggcgaacaaacggcgatttgaaattagaaatttcagctactaagagagagaacagagaaaattttttagtaggtgagtgtgtttggtcacccatttaggttagtttggtgtaggattacttcatctaaataattcaaatgaaacaaaaagttatggtgaataccaacgattagacgacttttatgtggctgataaagatttgatctatgtttctattgaaaataattggtgatactatggttaacgaaagtcatgcaacttgctaacttggttatccataaaataaaattaattataaagtgataaagacatgagataaatcatgatattaacctttaaaactaaaacgaacaagataaatagattgataagacgatatatcatcaataatagagatcagctgctttcatattttgaaccatgaatctgattctcgtgagaggttatcacaatttacttatcacattttgaatatgacgcaaattatttgaatttgaaactttatcccgttggtacgtccattgtccacgttgtccctcatggcctcatttttcttcaaatagatccaaatggctgaaagagacgacagaggaaagaagcagcatggtgtcttgtaatgttgtgtattttctttccttttacagttaacctattttctttctattatcacatgattcacatttgattacatttttaactttaattagaggataatagttttcaaaaattagtttgtgaggctcaatactgatagaatagagcatagggatttgcaaaatcgtttgtttactctatggacatctcctaaaaaatccacaccattttaggctccgaatgaagacgtgcagttcaactgcgcataaaatgcagtgcggttcaaataataacaaatatatatatatatatgcaaagaattttgttactatttgaaacgcaccgcactgtgcgattcggtcagcattcaaaccacaacactaaatatctcactaaaatagctactatcatattagtaaattaaagatattctttattatttaatagttttgattagtacatattattatataattacagaattaaaaacatattacatttaaataactttaatagtaattattgcgttcacatttttgcctcagtaaacacaactttgccatccactaactaaaatgttatagtaaatattactattaaaaatcacttaacatagaaagaaaaaaaatcacttaacaagtgtacaaattggtttgctcttactaatcctaacagagagatagagaatatatggctgctaaaaagtaagtgtacgacgtgaaaaggaccgtagtgttctacatgtgcgccttagatggtctccaaaagccactactttacaaaagctatataagaacagcgttatgcttcatgctttgtctatttaacaattacgcgaattgtatcgtctaatttttaaataaccatgttgcaccgcacctaatcaaatcttaatatgcttgaacgagtcaaatgtgccaaaataaaaaggtaagttatttttactgttaagatcaaatattttacgaaccacgaagacaaaaatatatccagctgtttttttttggatactctatagtctatacactatcaaacacaatattctctatttaacaagaacaaaataatttaacattcattcaaaaaaaaagaaaaaaaaaaatagaaacagattaactattaaaaaaaatgctcaaataaaaccaagaagaggaaataataatgtttttaaaatacaaatgaaaaaaacagataaaaatgtctagataaaaacagataaacagatacaaatgaaataataatagaattttttttacgtcactcaattttttctagaatgtttttttttgacaaaaatgtcttacctacctacaggttacatgtacaagccagtgacagcagtgaggccagtgggtgaccatttacttgcggcttacattgagactcgttcagggactttttctttagtttttgggacagttacaatttgttattaacaacaaaaacaattggcgacacacaaagagaaaagaactagctatgtttttttgtgtgtgcaaagaattcaatatcgattttcaaattttcacaaactgtcttgatatttatctcttttgtgtgttaaaaagaacaaaaaatatatatatctttttgtgtgttgaaaagaatttgggatgattatcatattttatcatattagaattaaaaacctaaatcaagccccagtttatgatggccgagaaataaatataccctcaacgatccaactaatcccaaaatgtgtgtatgcatggagaaaaagcccaaacgaaattggtccacaattgaacagtaataaacatgggcctataatatctaggcctgcacataattactctttactctgcaattactcgttacttgaccgtacttgccttgaaaattcaaatactaactataggtaagtcggataacaaatgggttaatttattacttataagtcgaagtcaagtatcaagtatcaaaatattttttgatactagtttggttatttccctcattttgatacttgtcatgttattccttattatacatcgttattatacatgtaacttgtaggatcactaacaactagacttgaacataaaaaatttttgttaattgttgatcactaaaaattactatatacttattactaaaatactaatgcttaaattattataatagatttataattttgatttggcccgtaaaagataaaaatccaaaattccttgtaacaaaactcattaaccttaaattttatgtatatgttttttttattccaaatattttaagttcaagtaaaagtaattatttttggtcagtaataaggcgggtcaagtaacttgcaagtaatcaaatttcggacaaaccaaaaatccaattacatgtacaaggcaaatcggatcacaaatactttgaatttggcaagtacttgccttgtgcccggccctaatattatctaggcccaaacaaccatcatgaaggtgggaaatcacaaatccagactttcttaaacataatcagtcgcagaaactatcatctatttttttttggtaagaaactattacattggcgaacttaagattttcatttaaacttttcttttcattcatttaaactttttgttgaacacctttcatgcgacggatatttagcaacatatcctcaatacattgaaacaatagtcactggtgcgcttacttttccgtcaactccatcaataacatatttgtcaactcaatcaacgtcactttctgcatcgacatcgtcttttttgccggaatttacaaaaaatctccgccactaacactgttaacccaatggatctaattaaaagagtttttatgaaaaaaataacccctaaagggatagtatataagaaccaagggttacaatcttaaacacaaattaaatcaattaatcaactgttcaaattccaaatcaaaatcaaattacatgtttgcgattggttagtgtgggatatataattctaaattgaggtttgtcgattgacacgaagatcactaatatctgttaagcaccaacgacgaagattcaaattccatgccaaaaaaaattgcagatctagatcgatgaaataaaagtgaaaaattgagtttagttgagatcatctccttcgtatctctgacattcccatcaatattttattttaatgagttgcagaggataaaagagttattttgtgagagaaaaagtatttaatcgtataaatatattgaaatatgtcatcttaaacaataccacaaataataatatggttttcccataattgatctgagataacatgatattaacatatcacaccatgtttgtaaattggatgacgtaagaccttaaatctatatagctccaaataagtttcatttctattatatatcttcaccactgtaacataaaccaaattttacccggttaagaaaaaaggaaaaaaaaatcttaaacattttttttgtaaactagttctacccaaaatgcacttttgagatcatattagccaataaaaggggttattgtggatttgagcattttttagcccaaaattgaaaatgcatttagctaatagactttgaaaatatgtacttttatagagggaaaatgacgaatttgtccttacttttctctggttttttttcgatgttctttttcttcatcctttttttccccttgaattgcttttgttcttccttcatgattttttctttttttttcctcacaaaatttaaatagtttttaatcagagaaaactaaactgtaaggaaaaatagtatataaaaagaaggggcttttatagatatgggcatatttcagcccaaatattagagaaatagaacatttcattggacttatgaaaataggcatattttggtctgtaaaattacagttttacccttattcttcctttcttcttccttctgtgacgtcgatttcatttttttttctgtttcttccaaaaacttcattgatcttcttccttcttctataccttttgaacccaataaatccaattacatgcattttgttaaaagaaatctaaaccctaataggatgatatatatagggaacccaaatgtttcaatcttatacacatattaaatcagttacttatttgagaattcaattgaatcaacctcttcaattacatgtttaacaagaaacccaaacaaagaaaatcaaagatttaataaaatctacaaacatgttgatgtgtaattttagatggataatttaattgtttccttaattgaattctgtaaaagattgtgtagaagaagaagacgacatagacaagaaaaaaaaatattaattgctaataatacgaagggtgaaatcgtcaatacaacagagaaagaagtacctaattgcatagacacatgattttgtgcctatatcaacaatgacatgacttttaagtgctttattcataattgatccataaaaagaacccaagcaacaaagtttgtgaattttgtgaatgaatggttctattttttggataatgaaaattagtagaagatgagttttggaagaaacagagacgctgctctcacgtcgagatgttgttggctgttgtcgcttctctctcgtctttgagcaccgcatatctgtgctacattgctcacggatggttctcgagatgatggagtaagagtagaagcgtcatttcaaataagcaaaagtgcttgatttcgtaaacacttataaaaatattggatcttatttttatttttatttttggagctatccagacaattaactctaatcataatggtttatagattttgaaaaaaaaaaatatagattttgatttaaattttatttaatattcctgaaataaaaaaagaataaaaaccggaaaaggattggaggtgaaaggcttgtcgacccaacgacctcacatggacatatatttttctcacctaacattagattttaatgtttggtattttggaatgatcttttacgtccctatgtatggaactttgattgccttgaacattaggcgagtgtgcacgtacactctcgtacagtcgtactcaatacacaaattaatatcgatttttatatataacagttataacacacacacgtctatatatttatttacttatatttatgtacttgtgcgtatatatatctatatatggtatagtacaaattcatgggtcgacaatatatgttgtgaagttgctcactttgtaccggtcatgatttcatatattggacaatttcatgggaagactcggatagtttcggaatttaactaaacttttgaaattgtgtagtgaccttcaacgtatccttatcttatattctatttaccatttgtgcttgtactaccagtttacccctctcacatatgactataataataatttcttacctataactattagactattattgttttggatgccccatgtcatcgctgaattatctgtttgaattgtcaacttatataccaataatagaagatgaaaaattaacgaaatcgaaacgagataatatgagatcgatatctcaattcttagctttcacgcaaagggtcacttgagttttgagtaacacgaaattgtaaagatcaataaaattgtgggtgttggttttacttggaggatccacttctattcattgggagtttgggaccaccctctccattcctagcgtcacatttttctaagtattttaattgcatataagcaagcattgacctattatttctcttcttcgtatcctatatatacatatactttgattttctttgtaatcccataatgtgtttagtcgcgcaccctataatcataatggtgacgagaggttcgagaaaaaagtggtgaagagagtgccgacgagaatgtttttcaaagatcataactgaataactaattttatctataaaagaaaacactaatctattatgttttttcaatggttgatcaattcttttgcaaatgaaaatgttgatccaaattccatacgcaaataaatcgttagatatttttaaaatatatataaaaaaaattattagatatttatcagaaaaagacaagatttattagtgcagaacacacggtgacgttaatatgccgacgagaaaaagaacaaaaatattcgtctctaacaaaaaagtttacaagggtgagtttgtaataagagtaaatagtgatcgcatttgtataggcataactttttatataaagacctcaaagtcttaccatttgaacagaaaaaagctctccacgcctaaaaaaaaagaaaaaagagacagaagaagaaaaagataaagaagaatcaaactttgtaaccctttagcagcaatggcgatggctttcaagatggtaaattcaaatttgtttttctacgtttaaagattcttgatctgatctttaaacaaatagctaatgatgattcgcaggcgacgacggggatgcgtgtgacggatgagtgtacgagttcattcatggacatgaaatggaagaaagttcatagatacatcgttttcaagatcgaagagaagtcacgtaaagtcaccgtcgataaagtcggcggcgccggtgaaagctaccacgatctcgaagattctttaccggtggatgattgtcgctacgctgtctttgatttcgactttgtcaccgtcgataactgccgcaagagcaagatcttcttcattgcatggttagtccaatttacctttatacccttcttaattctagttgcaagcaagggtaaaacagttatttgataatattcgtgcgtcttagaaacgccatatgcccatatccttaaacattcgtattggctaaagggtaaagtagtaatatatgtgttgccggagatgtagaggatttgatcttctatttagtgtagaattcccttgtaaattcattatgggctaaagggcaaaatggtaattataggtcaccggaggcatcaaagataagggcaaagatattgtacgcaacgtcgaaagatgggctgaggagagtgttggaagggattcactatgaacttcaagctactgatccgacggagatgggtttcgatattatccaagaccgtgccaaatagattgatcacttaagagaatatgatttgactcactttgtcaataattaacattaattaggtcatcggttaatgtttaattattgctggttagtgcttactcttttttgagtttattatccttgatcagtcttaccggcactatcctttaattatgacgtttgtgttttgattgtgttgttaaaatatttttttgtcggttaagcaaacataaaaagctacgaatttgtcctacgagtaacggatattatacatttatgagagattttattttataggtcttgtggtcttctatataaatttgttgtgacttattgtgaaatattggccgtgtttgagatacatcgtgtatagaaaacatcatggattttttattttctggaattggaattattgggatgttgaaagctgagattgacaatagtagagttggtaagaagataaagttcggacaattacgtatgaagaagagattagatttgtccatctttaacgacgttgacattagtcttttttaaagtcaacttttctttttgtagtcaattaagttgggtctaatttgcctccgtgtcgtgtttaagcatttatgagtttttttctgaacagaactgtgtattagaagatttcaatcaaatttttattgagcatatattattgtcgaagggaccatttatgtattatcgatatgatctttatgtctacaatagccaataggtttgtgcatcagcattacaagtaagatcgttacataccatattcagttttgatatagataatctgattatctaaaactattatccaaaatatattttaaaatacaatatttaatgaaaaataatgttgatttggatctacatagtccatattttcctatgaattccccacacgtcacattgtcaattacatatttgcttctctaatagacaccgacataccaaatcaacaaatcttatcatcatctccactttcactcagagaaagaaagagagcgaccatatttttatctgaatagaagaataaaaacgaacgtattgatctttttattttttatgactttctcttttctatgcatactccgaccaaagccagctgtttgattctgtaaatcaaataatgaatttgtactaaggggtttagacaaattcacttctttcttatctcacaagtaatcaaaggaaaataattaggatgtttgaataaaaagttagggtttgctctttaatagtggtctcttgaattaggttaaagatggatctaatagatggcaaaacccttctatttatacaatgaattcaatatatcaaaatatgataaacttctaattatctaagaattaaatcttcattacttctattctgcacgagatcctcttctctgaaatggaagtcttccctttacaaggtttaggaagtcggctgggcgacctcaattgtcaaattaggtcttctggcgatctcataacttaggccgattaacaggctaaccggggtaccccggttaaatcgagttctcgattttatacacattttcctccgatttaaaccggtattgtcggaggtgccaattcctgcaccaacaccagccatgcatttcaaatgagataatcctttatgaatattttcgaatgtcatgcaagatctagaatgagcattaggtctcaactatggcttgtacagggccgaatgagtaagcccaaaagagggtgatgtgtaaattgaagtccaagtcttgtacaatgcagcaatacaagagagagagttcttcttgtggttgtgtgtcaagtgtgtgtgattttttctgtgatcttgtaacacattcgtttttactttcttagtgagatagaaagagttttttgatatgtttctcctttgattaatagggaatgtaaagaagtacaaacggcaaatatatatcactaagaatagaaaagggaaacccttaaaactacagttacttggcataatagattcattcattagccatgatcagtcacaccccacgcgactcacaatgggataatctgagttacaagaacagagttccgcaccacatgtcttccaccacaaaccaagtaacagatccaaaaaaattttcagcaaaaaaatgcttttaaaaatccttgtaaattttttaaaaactcttttaaaaaacattgtaaatttttttaaaagttttggtagttgttataaacccttgtaaatcattttaaaacctattaaaatctttctagagtctttaaaaacatatgtaaatactttaaaacctctttttaaacctttgtaaatcattttaaaaccttttacaataggtttacaagatttacaagagtttttaagagttttaaaaggatttacaaagattttcaattatttctttttctttttattataagggaatcttaaaagagaccaccattgctcatgctcttagttttagattttatggtgctatatacttgaatagtttatgaaaattggttaccttttgtaattcaccgattatttttaaaatttatttgtctgttttttgtttgctccgtaacttatacggcaaattcgaaaatagtttaaatattcaacactgatagtactaaaaaaataatattttggtatataaacgagacgagtccaatttagttttagtatatttatatatctaaatataatttgaagatatttgtatttctttaagcaaaagaaaacagacttgttcattttccaacttcggtttagaaaaaaaaaaggagacgtcgtcgtcttctagcttctgattaagtctgataaattatgcccctaaatctgtaattctccaaggattcggattcgatcgatgaaagcttctcaaattttggcggctgcagcggcgagggttggaccggcgttaaggaagcaagtattaaccttaacggacgaagctgcttctagggttcatcatctcttgcaacagcgtcaaaaaccttttctccgattaggcgttaaggctcgtggctgcaacggcttgtcgtacactctcaattacgccggtaaaacttctgggaacggtttcaatttcaccgcctttattgttgtttctctggtttttttgggtggaatcaagtttcaatttttattttaggtttttgggttgagttttgaattttgatcttgtgctgcgttttgttcctatgcctctatttgatagctataggaggaggagatatatagtgtgttcaaattgagattttgagttagactttggtaaaattgagattggggaatgtttatgatgtgtgtttaatagtgatgaatttggtttttgggtcattgatgattgttatgtatctagttacagaagtttatgagtcatatacagggacaatatagctgaatgcatacgttctcttgagtatctagatcttcgccacagtttcgtcgatgagaaaaccgtatgcgttgctatgtcccaagtgctatctagtttacagtgaaactttcaatggatgttaccaagtttcaattgtgaatttagggcattgattttttgtgagttttaatcttgtgctgtgttttgttagttttcctctatttgagagccatagcataatgagatattgatacaagaggtaaatttgagatttgggaatgcttatgatgtgtgttcaatcatgatgaatttgattttcttggctcatcaatgattgccatgtattaagtactactatctagttatagagtcaatgattatgtggatgtttcttgtcttatgagacaaattcacggtttaaatgcatagtttcccttaaattgcgagctcttcgtctcatagacgaaaaagtcatatgcattgccatgttccaagtgctatctactttagagtaaacaaattgatgaatgtttgttggcctctaagtgtgtagatatttggctcaggtttggtagacacatatcattttttgttctcaaacttgattgttagatttggtagatctgtaacatttttttgttctcaaactcgatagttaggtttggtagatacgttcgtgttttcaaactttttggtagtcaggtttacattcaattttgtttatatctgtataactgaatgtgaaaaagtgtacactagtattaatgtttctctatctgcccattagctaatgcgtagtttctcattacaatctctaaaaattgtcgttatgctatgttacatattgttaattgtgtgtcttgagccattgtttaacatacatttctctgcgtatatttgtttcagatgagaaaggtaaatttgacgagttggtagaagagaaaggtgtgaggatccttgttgaaccaaaggccttaatgcatgtgattggaacaaagatggattttgtagatgataaactcaggtttggacctctgtcacatttcaaacgcaaagtcacttgtcgatttctaaaaccatattaaccttttcttttcattgcagatcagagtttgtgtttatcaatcctaactcacaaggacaatgcgggtgtggtgaatcgtttatgacaacatctacctctagtgctaagcagagtgctagttaacacacagtgatgcgtttacatttgtgattacactcatatattatactgttactggaattggcgttaatgagaaacaaatactttttaataagaattgagttttatgtttgtgcgctactttcaggcattagattggtcactttattgcatatacacattagaagctcatgttgttgcttagagatatttctgaagctatgtatttagtggaacggataatcttgagattaattaatgtattccttatccccaaagttataaaatgttggattacataaactattttttatggttactactttagaccttaagggatagaatttgtttctcttgtatgtgtctaagtctattgttggcaaacttgttagaggatttccaatggtgctttaaatcctatattttgggtaaaatcatctccaatgatactctacgcttgctccacatgagtagagcaacactattcattttctctgtttttggggcacatttcttttatttacaaaatatttcttcaaatggcctctctataggaattggttaacacaaatccatgagattgctgatgcatttgaatcttgtacattccgtcatattgccacaaacgcaaatctgatcgctcgatccatttctcggagtgtgattgaagacagaaggtttcagttttacatagcacttggagcgagagccttcatggcttcacaatcaagtgtttgagaagagtaaagtttaaatttcattttgtatatctcgttgtttcactgttattttgtttctgtttctgttttaatttggcttttggatttaacttcgtactttattactttttctctttaataattatcagatgacaaaaaaaattcaatatattaatattttatacctaaacaaaattatataattacattttttgacgacaaaaaaaaggaatatataattacattttttacttacataaatttcaatatattatcattttatatctaaacaacattatattaattagtgtttttacttacataaatttatattcaaaatcatagctactaaactaagtaaaattttataatataacaataacatatatcaaattagaaaatataatgacaccacaaatgataaactaaatacataattagcactaaaaattataaatatatatttaaaacaaaatgtgtcggataagctcgaagagaggctccccttttgaaggctgaaatagcagatgatgaaactactggatttcaaaaatttcttgatagatatatacaaaaactcatttctcacttcgaaaagtattaattgattatttgtgggagacatgcactaataatgctgcttaaatacatatgtaactagattttaacatgcggtacaccgcgagactatttattttattaagaaaaaacttaaatacatttgtagataataattcaatgttctatgttatgttgttgatatttttaaaaaaatggcttagcccagttaaaaatgtagaaatggtattcagtagaagtattgggttcgagttcggtgctagtagttttttaaacaaaaacgacaccgtttattaacttaatggcatggatattttggcaaagttaacaaaatttgacgattaaattgactattttggcaaagttaacaaacgttgatgtccaagataatttaaccttgagataatattggacatattttcacttatctcaatgtctagttgaaggagatgagttaatcatgcaagtagatcaataacaaatactaggtacaattcacaagatatataaatactcgtcagcattggtcttgttcgtttgcctgttgctggcgactgaaaccaacgacatttagcaaaagttgttcgtttgcatatcgctggttcagcgatcaaaagcatcgaccgtaattttcagtttctatataatatatttagtagaaactttttagtcgttttcttaattagtaaaaaaaaaacttagtatttttagtagagaagttttttaatttttaggttatataatatatttttgttttatattcaaattcaatgtgcatttaaaactgtggtaataatatagaattttttgaatgatttaattagagaaattctggaatgattaatatagttttaatagagaaatttgaaattatctatattggacaactatacatattagaagaaatctaggtgtgtttggttagtggttatgtgcatttctgtttaactaacttgggcttaaacactattttcgttttaatatggtctggactgataaatattgtttgttttagggtagaggcggtagagcacttcattttttatttcatatggccaagatatttaagtaaataaatttacatataaagaaatttttttatttataagaaaaacagagtcacccttagcttgggtctgccctgcatataaccaacaatctttcaaagacatgacgttaaacgtggatctatataagagcaaaaacattcataaacaaaagtctgatgtcacaacaaatcagattattcgattgacattatttgaaaaatttgaagtttcttgacgttatatttatctcggattacaatgtgaatttgacctatgaaatatcaacatacaagaagaatctgtagactaataacttgacgatcctgaaaactccatataaattaaagaaattagagatttttatttccgaattcgaggatccatcgagatatatatggagtttttttcgtaacaaaaggtatacattctaaatccatcgagatagttatagagacaataattgcgatatcaatcttttattcaataggtatctatttcaataacagaaaataggaaattgtaattataacaaagataaagaaattataattccttttagtaacaaaaggtttatgtgcccacttttaagaacacgttaccatggatactctaattttggtacgtctttaccgtgtgtaaagtaaattccatcttctctgacatcccaataatttgtcttatcatgatcaaatgagccactagcaccttgaaatgccctaatccttacaagtttatattgtaactcccttatgtcacaatccattttgtttgtggttacaaattcaccatgaaaccaatgatcatagatttctccaggttctataaaagctacgaatagttgtttgttgttcaatttacaaaagacattgacttgctttccctcaacagaattcttaaattgtactaaatttttcccccaaatcttcgcatcacccaaccctacacacaaaagcatgaaaaacaaaaaaaaacgagatgttattcatcttttcaattaaccgtagtggttgtttagaggggtgatatctatctagaagataaaatatttaacttatacaaaggtgttgagacgtatgtgtatatatagtgttgagatatatatcactacaatagaaacagggtttaagtgtttaacgtaagtaataaataaggttgacgtcagtttaaaattgactcaaaaaaataaataaaatttttgttatgtatgttacggaatatatgtagtattaagtgtttaacgtcagtaataaatagggtggacgttagtttaaaattgactcaaaaaaataaataagaattttgtgatgtatgttacggaatatatatatgaagtgtaccttttattacatgaccttgcgcttttactaacatttaaactctattacgatttaagtttcttataaatctgtgagaagatcattacgacaatcaaatagataatgttgtcatttcataatatataaccatcaaatagattatagacgtatcggatcttcgaaaaaatgcgcactcatcaaatttggaatgttaaaaattaataaatataaagtggattaaaatttggtgtaaacgcatgtgatgactcttctttaaagcatcttatccgttacacgttactctttagtctctacttattcaaacatagaaaatgcattctagttacttaaattatcattgactaaaacaaaatcttgtcaacaacatctatcatgcaagtttaatttcgtgatgcaacaacgatattaacacaaatttattctattattgttcgcaaacatttaactattattataaattcgatgaaggaaaaaaattgtttctatataattcattcacactcaagttcatatattaaggttctgaatggatatgcatggtcttgacagaatcatatcaaagttctatatatacatatattttaatattattccgcctgaaatgtatccaaatttgctttgcaccgcacgttttcattcggactctaacttgattagctaggtcatgtttttgagtcaaatttcttattatgcccgagaagattttaaacacttcttatttgccatccatctttataattatatatgggttatatatcactaatgcacatatctcccttcatgtgtttcatagcgataaatagaccctcctgtctaaaattgacatttcccacaatcattagtcaacctgcagttcgtgtgatctaaattgacctgtcgggtccttgatattgtgtaacctagtgtatctacgtgagacactctgatttttacatatttttcatgtgatattagtagatctatttagtttgaagaagtcctatgtaccctactgaaataatgtaaattattttgtataagatttattataaacttttatttgctaaaatcctacggaagtctttaaaatatatagtaatgacttgaaacatgtaccatccaaccacttctcatcctcacacaacttatcatcacctacttcaaaaatctcaagtttctagaagtaagcatagtgaaaataaataaatagtaagaatttaattaataggatagtcccctaatctctatagaaaattaagcatttttgtcatttaaaatgttcactatatggccaaccacgatcaaaatcaagtaaaaggatattaattctcgttgtgaattttattataaattatgaatgattttttttttttttttttttttttttgaggtgtgcaaagaattttcttttgatatgaaacaagaaatgctttttcgggtaaacctttctcttaaagtaattaaattgttataaccttgactggtttcctcatattattggtcaattaaagatatattttacaccatacactaatttctcttttacgtaacacatggatggttaaaaaatttaagaattggtcagaagcttgatgaagcaaaccggatcaaaaaatgattgaaaaaagaatttgacatgactacaagacctattaactgttagatacaaacgaaatcatttttcatttttcaaatgaataagggtatagacgttaaatcctatcgtatattataactagatttaggaatttataagttctaaatcctatcgtaggtcggagagctaattagtctacatgatgcctgatggcaaattcacgtgtggatctctatcaaaatgctcatcgatctcataggaacacaaggtcttgcggtaatctgattgaaaatttcaagttaatatacaaatgttgtggaaaaaaggaaaacaaagatgaaaaaaaaatagaaagaagcaaaattaagaatctaacattcattatcacacctacaaattaagaatctaatactattcatttatttcatttccaagcttcgaaaatccaaaattcttgtcttcaaacccaagaagtcataaccaacgttactactactaatatcaatagaagaatagctaatgctgctactattctctgtttgacatttcacagtttcactactacactccatgtcgttttccatgtaaaaacgggacgcagtgcaagtagatatttctctctggttttgccatggtggactgatcctaagctcaagattcaaatctgggcctattttttcttcaacaacaactctctcttctttgcaaactaacccatttcgaatatacttattttgcttctggtccccagacttgtctgtttcctcaaactttgtcacaaaagaaacatcttttacaatttggtcctttgttttcttcaaatcagaaatttttgcctcgttgatccctctatgagtggctggatcaatccctttgctcaaaagcttcctctttatatgtgtgttccagtagttcttgatctcgttatctgttcttccaggtaatctcgccgcaatcaaagaccacctaataaaaaaacagaggataagtttcaagaaacagagcataagctatataaaacagagcataggggcttacttgttgcctaggaggctatgaagcttgatgataagttcatcttcatcatgtgtaaagtttcctcttttgagatcaggtcggagatagttaatccaccgaagacggcagcttttaccgcagcgaaggagaccagcggctctaggaagagatcgccaacaaccttcaccgtgagacttgatgtaagagactagtctctcatcttcttctttagtccaagcacctttgttcatgtgttctttctcgcagcaaggagatcttcccatgactctcttcttctgatgatgatgatgcttttgattctgttgttgagggttttatggagagagaaggggagagaggtgttggaggtggaaggtgagcctaattgcttctagaagagagttggtaggacacgtttgaaggagtggctggtggggctcttgatttttgtttaatcttttattctacatcaaactataactgccacattcatattatttattcaatattttatacctttctcttcttgattttcctttgatgttttagatctcataaccattattattcacaatttttgttttcctttcaaccatcaaatcttaacatatgaaatgctacaaaattgcggtttaacaaaacactagctttgatcgttttaataataaccagacccggcccaacataaatttgagtcttagggtaaatgtttgcttttttttggaccttttgttaggtaaaactttttttgggcatcttttgcaattattttgaagtatatcttgagtgttttaacattttacaaaaatattggctctttggtatataaaagtcatttagaaataaaatcagggccttttaatatatattttaaagaaatttggggattttatcaattatattttgacaacttttttttccaaaaaataaaaaactttttcttatgtaaatttttttaaataggcataaggtttggaccgtcgcactttcgctccaccctaatgagtcgagcctgattataataaataaaagctttatcatatatattactctcagagtcttaatggaaacatgcagttcaactgcggataaagtgcggtgcagttcaaataataacaaatatatatatatatatatgcagagaattttattaatgtgcgattcggtcaccattcgaatttttttcgtgactcatacccctattttatactgtttttaactattattgaattacttatgattttttactcgttcaaaaacttgtacaggtttgtattaataatcggatccattatactttttcctccaaatatagaagtgagccgctttattgtcaactttgaaatctcctactaccatttttttttattaccaaaagtagctttttattatttcttatcgttattataaaagtaaatatttatcatcttatgttatattccggatctataagtaccgatagtttattttgacagaagaaaaatagtggatatattgtaggtttgaatttgcgggattaacataattttatttagatacgattcatatgaaaatgttattacttggaagatcgacgagaacaaattatatttaaaaaaaaaaaaaaaaaaaaatatttatgaatcttctactcatgcatctttcaagaacttgggttgctttgcggttgacttgtcttctgtccacagaacctttaaattcgtcgtgaaagtgtagcatatggtgctgaacataatgtttttctagccaaaaaaaacacaatttattggatccgattggtaacctataagaaaatacaaagagtaaaaatgaacatgattaaaaaagaataaatagaaaaagaaaaaattataaaataaaaataaaaaggaatgagtgtaaaagaaaaatagaataaatgttattgtaaatgataacccaaacataaaataaatagtataaaaatgaaaaaataaataaaatattttctaaattaaatattaaataaacatggacgttaagaaaaaatatcaaacaaacgtggaggttaaaaatttaatttttaattaatatatatttaatttttttttctgtttattcctcatcaaatttgggaaagaacaattttcttctacgattcctcaaaaaataaggaacgattaagaataatgtgaggtccacatataataatttggagaaaaaaattactgttaaatggtaaaaaaaaagaaacatgttgttcctgtctattgtttttgtaaaaattggtcaccaatcggacccattaaaactgaaaatgcatagaaaaaaaaaagaaaaaaaaaaagtattcctaaataatcaaaattttcacaattgactcaaccaaagtgataataacgagatgacaagcttcaatttatttattttggtaaaatgcttcaatttatgtaattggtattatcctacatattttaaagaaaattggcaaaatctcatattccattccaaattaaataatcaaaaatttcgtaaagttcacaccctagtcaaaatctattaacaccaaccattgcaccgttgaattttattttctaacaattgcaaccacgtgtcaccgatttttatcctcaatatatataaaaacacgaatacaaacagataaatacacacacaataaaaagatagtaggtgttctagaatatcaatgttataccaaactcatatatcactatcatcttgttgggacaagccctatgtgcccccatacgtgacgccttgtggaggaatagtccaacttcgtttaatacaaaattatttattatcataactccaactcttctttttcatttttctaaattctaaatgattgattgatgggttcaaaaatgtatgttggatgaaaaggttatgtttatttaatttagttggttgcgttttttagattgcttgttctaatattgttatacttatttaatgaattagttaggacaagacttaattgataagttaaattaagcccttcaatattatataaactgctagtccctttgaacctaaaagataaacctatagtttatcatatgatatacgtaatacgtccgcatatttaaactaatgtcagtttttaaatattaagctcaagttcggtttgtaattgacggtacgattttttaataaacaatattcacctattgttgcttgaaatgtggtggtattaatttaaaatattagaaatagtctgatcttgatcgatgaaaaaagtagctcgatgaagcatatccatggaaatactcgaacaagagatctttcaaaccaaacatgcatggtaaagaaaacccctagaaaatctttacaataaaccaaaaaaaatccccaaaaatgtctcgtacatattttccatatttatagtatccaatataattaatcttcgagaaaccaaaatcaggatttcttgaagaaataatacatgatacaaagacatattgaacaagagaataatccagtcaacaagaaaatactagtagacttatacaacttagttaactatttttacatgctaatatcataagttcataacataattttaaaaattacgtaaatattttccaccaaagaccaaaggattaccgagtatctaaagtcgtaagttcacgagaagtttagaaattgaaattggttaaaaagaatatatgtccattataattagggaaatttacataagaaatagactagtaaaaaaaaaaagtggtttgaaatgaaagagagaggtcatggcccgaccttataccttacaatgtacaaagacacattgcaacatacaccgatcaatcaatatcctaaaagttgttctaactactttttcaaattaccatattaacctcctcatttttatgtgttttttgcgtgtgcatcaactattacacaaaaataaatgatcaaaacactaatattacgattccagaaagaataaaacacatactaatattgaaatctcataacaaaaataaagacattttgctaacgagtgcaaaacacaaatatgaaggaaacaaaacaatcaaagagtacaaaatactcgaaatattatcctaaacattcgaaaaaaacaaaaataaagaaaaacgtatataaaaccaaaaaagtctaaggaaactttgtacctaacaataccaaccatgtcaagtcctcgatagggttcggtttcaggtgagtcccacttggtgtaaggtgtggtgggttctttttcacctatcttatatcaattaatgctatttgctatgtgtattaaaagatctcaatgttacgtagagtacgaggcaaccatagatctcaaaatagagttcccaaaagccaaaatcaaatggaacctaccacactgaaccgaaccgaaataattaactaaaccacttgagataagttctaagccaaacctaatcgaggcagtaataaaccaaactataccgaaaccaaagtagaagacataggggcatacaattcaaataaaccaaattaccaatctcaaaaccagaaaagtatttacttgttgaaatgatatttactttttagatatctgaaaaaccagaaataaaccaaaccaattcatataggtaaaattccaatctcaaaaccagaaaaagtcttaacttagttgaaaagatattggttatagatgtccgaaaaaaacagaaaacgaatagcaaccgaaccaatccaaaccaaaacttatctctaaagatatatccggtttagatctgaattatatgtaccgatcctagatacaaactgaccgaaccaatactactgaaagtaccgaactaccgatcactgttagatgagtttatccttgttgccgaatataagaattaattcatgttatcttgataaatgcatgcaagactgatgggctcatgcaacgtgaccagcccatccaagttatggttttggtttgaatgtgatattactaaatcatggatttggttttgggattcatgtttatcttctctggtgtttccttatttaagtcatagattaatcaaagttaaggtagatttaactaacgaaataattaaggtagatttaaccgttcgggtttagattttacaattaaactaagttaaatatcggtttgaatttataaaggaggattatgatttagattttaaaattaaacgagattatatgtaggttaaggtttataaaagagtggctagggtgtagattgtacaattaaatgagtttattcctaatctacaaagaattttgatgcctttaataaaattatagaaaataaataaatgaaatattctaaactattgatggagaattttctataatgttgttgattagtttttttagaatcttataaagtttcccaaacaatctctttactttgatgatacttttcatgactttattttgtaaagagaaatgttggtaagtgatatttttaacatattatatatatattaattattttattgagttttttattcagatcaaatcatttttagtgtaaataagttttttttaggattttagacttatgaaactaaagtgagcattataaaaacgagataggccaatatacaccttaactttgattagaaacttcactatatacaatcacgcgtatatatctgtatgataaacattttagttaataaattcaaaaatggaacaaaaaatcaatgcataattttagtatctacaaaaacattaggtataaaaccgttcagcgaagcaaataaaatatatatccttagttcttcttgtcacggccacacttgacttgtaccgcaagcttcttctcgactttgggacatgaatcctttttgtcttgctcgaacgtactcttgttcaccggaatcacacactctgctttacccaaacagtactgaaaaaaggaaaaaaaaccgaaatcagtttgtgttacgtttaccgcaagtaacactagttagaaatataagccaactttttctttttaccttttcaacgactttcttagaaacaggagcattacaacttccaagagtgaagttgccacaagtcccattaggattcccaaagcttgcgaattccacagcggagattttctttgtgccggaacatttgagattagccgtgagatgcacgtcatcagtgatggcctgaacttggtcattcttcctggtccagtgacggacactaggagtgtagttttctccaatataagaacacaccgtatctctattgacgatgacaaagtcgataagctctggcttcacatttggttcttcctcaaatataaccagaagatttttcttgggcttcaagaaagacctagggatgtgatactcgatttgcgtaggctgtcctaaaggcgatagaaacgacatccaatatcgaccaacaccttctccgttcacccaaatcaaacctttccccattccgttcatcctaattgctgctgcactttggctctctggtgcatcgaagtatgtctacaatatctcaaacgttgttcattagatcactattcttgttgctcaagttacttccaattattttttctgaaaggttaagtttattcacctggtaccatgtcattcccggttctttccctgaagctttctcccatttaaccttcttcaatccttcttcggcgtggataccaagcctttcgccttccatacccacctgcggatttggaaaaatcagatcaaaatagtcataacaaattgagaaagtaagatctataacaaaccttgtttccccatttgttttcttcagtgagatcaagtgttccagagcccaaacctaagatggaaacactacgtggacctgtgtatctatgctccatataagatccactatcctgttgatacaaaaagaattcatatatctcatcatcaaaattgaaaactatgcatggctttgttgttattagttctttttaagaacatctatgtttcttaccggaaatcccgtcaaaacacctagcatggttaagtggttctctccttcttttagagtaactggcttctgaaagacgaaactcttctcttcatggctaccatgtccgtttcctgaacaagtttcattaattaggtcaaagttttgtcaatttttcacattacataaaaatgttttatcccatggatggttccgatcttaccaaggtattctccattgagccatacatgcaacgcgtggccaagactagcaatcctcagattaggcttacctcctttcttcttagagaggtcattgtcatctattttaaagctgcatggaatattaaccaaagagatgtgtccatatgatattttttcttctttgtttttcatttcatacataagatagtccaattatatccttacttaccttgttgtgtaccatccgtaatcagactcatctttggtcaagccgtagagttcaacgggtataaaagagtcacccttgatcttacttggcactgactcggtgaacactttgaaatcaaagttcttattcgcttttttcgatttcatgaagtttcttgaagtatgatgagagatgatctgaccaaaatagtaaaccaaacaaaaaaaaaaacaatcaagattcatttttcttcttcgaggaaaatgaaagatttgctagaagattttgtatttattatcacctccccggtgttataaacaacggttttgcagtcagggagaatactgatggagcggtgcgggataagatattccttgcctctgaatttgattttttctgcagcttctgtgttattgttagccaaaaatgctgcacaaactttagttccaggctgctcgtagtatcgaatctgcgataacaaaaatacataaaaatcaagaaactgattctttctatgtacattttctaaagtttaaactttttgaacattaatgatgctatagatgaaattacctctgtttcattgctaggcttctcgactcgaggctggccccagagaagtgccttcttgcacaagttaagggcgttgtgaagatgctttagatgaccgtacttaggctccctttccagtcctttgtattaaaaaaagggcaaatgagaacatacatattaatctgtaactcgattttattcattcacaacgatcatatgctatatgttttgttttagttttaccgaattcatcaagaggtgcatcgtcgtagtaacgagttgtcacataatgtgcagaggttcttccaaagttagtacctccgtgatactataagaaaaacaaatatttaacaacattcttgaaacgttacatataaatctcttttttattcggtattcgatcacttaccatatagtagttaacatgggttccattcttggagaaaaaccgggcaacagaatatgctatatcttctacagatctttgtgctgggggatcgccaaaaacgcggaacctagaatcaaattataagtcattgtcgtttgtttcatcaagaacatactaattaaggtgttcaagtgaaaagctcactgagtagtccagttctctgtccataaagatggcttgttgtctttgtttggaccagggaatgtatcaccgcaatgtcttccgttacaagcgttgatctgtatcaaaacaaattaagttcttgatttaaccttttatgattatgtttttatagtgaacgtgttataaaatatgacttaccataggatcaggagcatcattttgcttacacataacccatgggatccccaaatccatcgagtgtaccagtttagatgcccacttaatgtagtttaatccatcttctttatatgctcgttgaaccgcactatactcattctcaatctgaatccaaacgccaattttaaaaaaatctttcaaaacttttatgattcatatcttaaaaatgtgtttgttgtttttattaatctttatctttttgtcaatgttacctgtcctaatataatggggcctccttgtgaagcaaaaagcttctcctccttcatcatgtcaagtaccaccttaacatatctctctgtatgttcctacaatcaatagttttctccaaattatttaattgttccaacatatcacacacatatcttacatatgcatagccatatgtgaaaactaataatcataccttgaaaggttcattatcggtacggaagaagatcccgggaacttccctcagccagtaaggaagtcctctgatgtttcattataaccataagcattaaacatgtcacatatgtaaaagaattttatctcaatttggaggaatcagacaatgtaacaaataaacatacccatgagtccattcagcttgaataaaaggtccaagcctcaaggttacatacaaaccattcttctcaattaattttatgaacttcaccaagtcggctctacccgaaaaattgaactgtcccaacaacaaaataaaaaactcttcaaaacagtgatttaatcttttctaaaggtttttgtttgttaatatttcaaattacctttccctgctcaggctcatgaacgttccaaaaaacgtatgtctgaatcgtgttcaaaccgccttgtttcgctctcttgatgatgtttggccacatctgagcaaaacccacatcacatattctcaaaaatgtaagtaaaacaaaatttaaagataaaacaactttaactaacgagtgtatgaatcatttacttcaggagtgctacgagggtaatgtatggagccagagtaaaggagttctctatttccattgatgatcaaagacgttccatcataagttacttctttctttttatcgaccgatttcgtcttcttctctttgtcatcgcttgagagagctccagagaaggagaggagaatcacgagaacggctagtaaaagccatgaatgatcagaagaatgtattttcatttgactatcttcttcttcttcttcttcttcttgaggatttttaaatttaaacaagaatccacctaaagggatatcttccttgtcagagaaataaaaactttagagaaagaaaatgaaataagagaatgtttcgcagagaacataaggtttcagagaaattcacgtattctcaatttgagattccacattttgtttgtaaataaaacttccaataactctcccttttatttccttatttcctcctttcattttgttttcgttgaattttctaattttaaggtttttggttgaagagcctaatttggcgggtatacacacaatgacttctctcaatcaccaccaaaaagaaatgtgagccaatgcttatgttgagaaggtgcgtattacaccaaaaaaaaatggttcatacgaaaccaatgattttattttattttattatgttcattataaacaccacttttggttcttctttaattgtggaaatgtggattaaatccatgagagatctaacaaaaatttgtgtaacctgttatctagttattattctttgtctacaagttgagtaaatttttttgctgtaatttggattatcatcgtttaaacctttagcttatttctaactttaaatatcataacggcaaaaattgtaaaagctttggtatgcttcttttacgtaaaatacataaatgtgttgaccgtgtggttgaagattgaaagcaaagcaaacaacatttgttacaaaaaaaatggctatttttttaagtaatcaattaatcgtcttttaaaaaatcgagaccaactattgttgagaattattttcctcccgtaatcaccatcataaaatatcggttgggcaaatcacgtagcatgcatgtacattaactttggactaacagctgtggagtttcttcttatagcaatattcaaaagacctaataagtctgaaataaacagaggcttgaaggttatacttagattgaaaggcaatgatttacatttacatatataggttgatcaatgacgatctctacgatatgttgtgatataaatctttaaaataaggaaataatatatgcatcactgatttgtggagtgttcctcactcgacgccactctgatttgtaaattttttattgtaaaattttaaagtatgtaaatagggcctataattttttttcctaatgatacatgggcctataatcttaagaaacttttgaaatgggtcctataagttttcaataactattttacctcatcaaatgtatgttatgatttatgattatatttgttgaacatgatgctcatcacccatcactttgctggtccagtgaacgtggacaataagattaagaacaaaggatattgtaataaccattctttatgttaagttattctgattctcagactttatcaaatcccattatagaccgttcaatagatatggtatattacagtaagcatgtacgtaagaccatccacttcaaggcacgtctctctttcagaatcagaacaaaagaatggatctttctccattacctttatgggcaaagcgggcggctaaaaagagactttacaatggtaaatctttacttaaacaatgataaatgcaatagtgcaagcattcctgtttgcaagagaatcacaaatctttgcttacggttcacgctttaaaaacacaactctcattctccttctcttcacaaaccactcatattttttttcacatacttctttgtagtgctactttccattatatcaaacactcagcaacctgatggcaacgagacggatattgaaagaattgaaggagttgcaaagagaccctcctgtatcatgcagtgcaggtaaaggatcacaatttgttcttaatacaatataagccatgtatcagaaattttttctaaagattttgatatttcctttctccttggtttgggatttttaggtccaacaggagaagatatgttccactggcaagctactataatgggtccgaatgaaagtccttactccggaggtgttttccttgtcaatattcatttccctcctgattatccttttaaacctcccaaggtaacaactttctcaacaatttttttgttttttaatctacttcttaaatccaataaccaaaaggcacaaaaccaacattaaatattggatcgtttatgatcttttggaaccttaagttttgatctttattttcaatctttttcttcttctttactcttgttgttatgtttgtttgataaaatcaggttgtattcagaaccaaagtgtttcacccaaacatcaacagtaatggaaacatatgtttggacattctcaaagaccaatggagccctgcccttaccatttctaaggtttgaaattctatatatgtatttagttatttgtcaatattttctataattccatatatcagatttggtatataaccaagaagctccaataggtaacacaaattactaacattttggtattataggtgcttctctctatatgctctcttctaacagatccaaaccctgacgaccctctggtgccagagatagctcacatatacaaaactgacaagaccaaatatgaagccatggctcgaagctggacccagaagtatgccttgttttaaagctcacaattcctctttttttcctttttattttggtttggtcttatttgtaataaaaaaagaagaagaagaaattgttataattttaatacaaacatatataatatataaagtagagttttcaaagttgttaactcatatgattgatgagatatcgacatgtattaaatctaattttgttaatatataaaaaatcttctaaccctatcgggaaaataaaatatatacataaatcacaaaaattatttatataatcaaaaaatttaattatattttatataataaaataattcatattattagcgaatttgttttttttaaaggaccgttcaaatatgtttttttgtgtattttgtcgaaatttttgttatttttctttttattttgttaaaataactctaaaatatagatttcaaacaacacataaaatagtgagatgcatagataaaggttataatgggaaaactcaatagtatcaaagataaatgagaattaattatagtcatgtttgtgtaaaaaatttaggacaagttactaatatttaaagtttaagcctagttatttagtaaacaacaaaaataacttacgttatctaacgatatttttggagaatagatagattgaaataagagttagaacactaaatattgaaaacgtgtgtgggttactatttaaaatttaaatatcataaagaattaaaacacgaagatgaaatatgtagaaatattttttcagctcttatccattaaaatgaaatatatagaattaaaattcagtatattttcatgaaatatatagttaaattattgcaaaatagaatggataaaattaaattttggttttaaaatatttagataaaatgaaaaagtgtacattgctattagaattcaattattatttgaaaaattatatatgttttttatattcgcctatttaaacggggtttatctaatatatatatatatatatatatatatatatatatatatatatatatatatgatcttataaagaaataattaaaagatagagaggaatggacgagaaagcaacatgacagttctctcttattaactttcactcctcttcttcttattaatactgagatccaccagaaaagggttattgctattgattgatgaagatgatccattgctttacgagtacgattataacttctaagcttttttatatggtttcccatagatattcttagctttaactgaccaaggtagttatatgttgtagtcggaatagccattaatatctcaggtgcatcgcagcactgtaaacgccttgcaagcctggacaggtggacagtcatggtctagaagaagatcatgttcatagcttttttggagactttggcttttatagaaatcaaggaataagaaagtattttaaagtatagaggctttaggtattttaagtcatgctagaagtgaacaattggcatgggaggctgctcaattgaatcttgtaggagagataaaggaaagagaagtacttccaatgttttctccaataattttgtgccagacgagttgtttttaggaagatgcaaaagtagtacttttaaggcaaaatgtcacaggaggaggagtctctcaccgattcacttggaaatggaagccttattatatgagccatgaataataatatcctatcaagacggataaattatcagctttttgaaatacattgtgtagaacttgtcttaatagtggaattccttgagaattaaaccattttctctaatcttttcgatgaatttgcttcgagttaagttttttatttattttcaaagctaattatttctcgttcttgtaacttcaagttgattgtttagccaagacctcataaacctttactttcagaagtttcttatgtacacactctttctcctaattggattaccaatcaaaaagtgaatttttaactagtacaagattgaaaaaagaaacatttatataatatccgtttagattgaaagaatttttcttttgttaatctttatctcttttttatatttcgatataagccgtttctcggaaaattaaaaattctaagccgtttatatggccataagtaatgaggcagctctaagcccgaaatagccggtggccacacatattcacttgggacttggcccttttaaaacacctaatttcatgccttttcccgctaaacttgccactttctcctaaccaactcatttcttcatataaaaccaacaacatcacacaaaaagagccctcatttattcacctttcttttcccttaaatataatctttataaaaaaaattaaaaattaaaaaaaggaagtaaattgaaaaaacaaaattggtcccctgtcttcttttgttcactggacccttttcttggcttcgctaaatcatactatctctatcttctcaccgacactttcttcttctttgatcatatcatatttatcttcactacaaaaaaaacaagtaaaataaagccaatcttcttaaatatctccagaagatctatcagcatttacgtattcaggtcctccaatgtaagtttcttttttactttcttattctatttgtgtcaatctggtttcattagtcgtggcagctgggcaggtacaaatgctgatggcacatggcatcaaaactatcaatttatttatgtcctaaagacaaaatttaatgataaaatacaaaggatttaggtgatactatgttgtctcttaatgctcatcgtgtatctcttaaaaatccaaaatcttcttattttccttatatttaattaaatgtgtcttgaattttcaagtgtgtctctctctcaatactctggagtttttgtttgtttgtatctgatagttgttacaacatcaattttctgattattctatctttcaacttccctataaaataattatttagagaacaacataaagtttgtattttaaaaatatttaatagccattgattacttttgtaattgcgttttctattagttcttctcacaaagaaaaaggaagaaaaaaaagaagttgtgagagcaaaaaaaaaatggcagtggataaagtgattgtgaagcagaggaacattatattggttggaattccaattgatgaaagtggcgtagaggttttaaaatgggcacttgaagaagttgcaaaacatggagattgtgttgttgttgtccatgtttgttttacttattgtaagctcttcttcttctccttcttgttttgttcttttgaagttactaaattttgatttatggatcttatttttgagttatgattgatacagaccgtgccttgaaaagcaagtcatcgctggatcggtacttaaaaccatacattgaattctgctcaacaaagaaggtatctttcgatctttttgccgcgtcgaaagacacacttttttagcaatgtgtaacagagaatatttggtttttgagaacagattgagctcaaaggagaagtgttaaagggaaattcagttctaggggttttagttaaagaagcaaagagatacaacgccatgtcagttgttgttggagttaaacaacaaagtaaattaaggtgagatcacaaaatctttaagcagagacttatataattttcttgataatctcttactgattttagatattttttcattagtctaaaaatagctaaaggctgcgcaaaagagcttccttcaaccaccgatattttggccatccacagagggaatatagtctttagacgttccaaccattaccaactacctcttggttcgttggttctctttacaaccataatctttgaatctatatatataacattcttcaaactcgaacctgttgaccagaaatgggtttatttcttcttgcagctcaaaagataagttcaagaccaagttctgaactctctgaaggattttcagacaaagatcttgcgaaaacaacgggtcaagagaagagaaagatatcaggaagatctctatctcttccatcggtagaggtagtagaccagacaccaggttggccattactaagaacatccactttagctactccaatggttcaacatcagactaggaaaatatcagttgtcaattgggtcatgagcttgcctgaaagatttccacatcatccgaatcagacttgtcaacagagcttttgtgataaacaacttaaagacatactcaaggacataaacagatggtttagctatgatgttctcaagacagcaacatcagatttctctttaggtattaactaacgtaactactctgttttatcgtattcatagccactttatcggattctttttttttggtttacagagaatctgatcggaaaaggaggatgtaatgaagtttacaaagggtttcttgaagatggtaaaggcgtggcagtgaagatcttgaaaccatctgtaaaagaagcagtgaaggagtttgttcatgaagtgagcatagtctcttctttgagtcactcaaacatctctcctttgattggtgtatgcgttcattacaacgacctaatctctgtttacaatctctcttccaaagggagtttggaggagactcttcagggttaagaaaatactactttgttctcttaaacatgatcttgacacacaatttcataaagagttcattaatagttcagtttctgtaggtaagcatgtcttgagatgggaagagagactcaagatagcaatagggttaggggaagctcttgattatctacataaccaatgttctaatcctgtgatccacagagatgtcaaatcttccaatgttcttctctcagatgagttcgaacctcaggtattaaaaaactactgagaacttgtaaatatatgtaagaaatcataaagatgtgtggacctttaacggattttgttttgcgagaatagctttcggatttcggtctttcgatgtggggatcgaagtcttgtcgatacacgatacaaagagatgtggtgggtacatttggatatctagctcctgagtactttatgtatggaaaagttagcgataaagtcgatgtatatgcctttggagtagttttgcttgaactcatttcaggaagaacttctatttcatctgatagcccaagagggcaagagagtttggtcatgtgggtaagtgttggttttgtttacttgtagcagaagcaattatcattgaaaaccttaaaaaaaacagattacttgcgttgcaggcaaaaccaatgatcgaaaaaggcaatgcaaaagagctcttggatccgaatattgctggtactttcgacgaggatcagtttcataagatggttcttgctgctacacattgtctcacaagagcagccacttatcgtcccaatatcaaggaggttagttactctaattttggcagacttataaccgaattttaaatgttggatcctctgttctacctatgaattatgccaagatctctaaccttttagtcacatatccaatatcatttctgtagatattgaagctgctaagaggcgaagatgatgtctcgaaatgggtgaagatagaagaagatgacgaagatggtttcgacgacgaggtttacccaaattcgaacacagaattacacttgagcctcgcgatggttgacgtggaggataatgactctgtgtcaaacagtagcttggagagaagtaacaacagccttttttcttcttcttcttcttcctctcaggagcttcagtcttaattagggtttgtgcttagcttgtctccagttcacttgaggactacgtcatctcttacggtgtctgcactcaatatgtcacactatatatcacttctctgccttggcttttgcaaccattgttggagaagtctttttcctctttctctttttgtatatatgagaggaggaaaatagaaaataattattataagtttttaacgtgattgaatgtaatgactaattttaaaaatcagataagtttcatgaattagtattgctaaaacacgggtttttccaaaaccgtatttaatcattttatagcaagtttctcttgtcaaatataacataaacctttgtcactatcaaaactaaaatttaaatgtttttgcttggtctaagttggtagaggatggtttaattaaaagactcagtagactcaatatctcttgttttggtggcaatgttttgtcaaacaccaaatactaagacataaaaatttatgagtgatactaaaggacttgcaaaaaccatgtataggcgaattactgttcactagttttttggttaagaatgacttggaacttgcagtttggtgaagctcttggaagagtcaaaagacgttgtatatcgatgggcactttgaggttatgtgaagcacatattttgaccagctcaagacacggtaatgtagccaaaaaatgcttcatttggttcagatctttgtcactatctttgtaacctgatatctccaacactttcactcgagatgctgataggcaagacgatctatccgctctcgcgttacgggccttacggaaaacacatacatcaccacaatttcttgtaatcaaacaaatttttatttggttaagcataagtcattccattcaaatttcttcaaaggctactactcataaatttcttgatttattcgaaatttgctatatatatttttatatatttcaatttaatgaaattattccttccagtttttttttttttttaaatggaacccttaagcattttatagaaattcaaacctaaaaaatcggaacaattgaacaaaaacatgcaaacaaacaaaaacgtttgaattggaatttaaagctcccactactatatgttaaagtggtttaaagtacacttcctgggcccaataatacatttaacgggccaccaaatactagttttcactacgtgcgcatcaccaaatctttaacgttcgctcaccaacttttttccccataagttttggtcttcgtcgtacccaatttatttctctctacccgttttttctcttatttcaaaaaaaaatgtctccctcgttttgctccggccgatgcaccgccgcgctcttcctcgttatctccgccgttccaatagcttacctcatctccttagagctagccgttccttctacacacgtcttctcttaccaaagctccggcttcttccgagagtgcgccaagtgggacgatgttggtcggagattccttgtctccttcatggacggtggcggagtcggcgagattgttcctaaagactccgacgacgttcttgaagaagtcactttggtcaaagacgttgacctcgccggtaacgcttccctaggaatcgctatcgaccacgtcagaaaccgtctccttgtcgccgtcgccgacttgcttggaaatcgttatagtgctttagctgcttatgatttgtccacgtggcgtcgtctcttcctcgccgaacttagtggtcagagtaagattcttaaccgtccgatttcatcaacattcaattagatccgaaaccgaaccgaaacgaaccaaaattcactatcctaaaaaggaactacatctttatctatatggtttaaatggatttatttttctaatttaagaaacagaatccgaatccaaaaccaaacagaaacaaataaccagtctaaaccgaaccgaaaccaaaactgtaccaaaataatccattgtagactaggtcttagtaataaacaaaaaaatgttcaattcgaataggttttgtgaaattattggataatggtttaactctatatgaatatatatgatcaatgtaggtaaagagaaaacatttgcagacgatgtagctgtagatgaacaaggcaatgcttatgtgactgatgcaaaagctagtaaaatatggaaagttgatgttaatgggaagcttgtgaacactattacaagtcctctctttacaccacctggatggtacaataaccttgttgctcttaacggcattgtttatcaccccgacggctttcttatcgttatccatactttctctggttacttatacaaaattgacttaaccaatggggatgttagtaatcaagttagtgtcattgatgtttctggtggtacattgaggtttggagatgggcttgagttgttgtctccaaccaagattgttgttgcaggtaaatctttaacatctttagtatagttatgatttttaagcctatgttaatgaatgtgagtgttttcaggtagctcgtctacaaaactggttgagagttcagatgggtggagaaccgcttcggtgacgggttggttcagcagcggtatggttcatcgggtagtctcgtcggctacagtgaaggaaggaagagtttatttaaaccatattgttggatttgggtctaaaaagaaacacgtacttgtagaagctgtgttttagagtcttcttagttataaatcgcttcttaaattgtgctaatgatctcggtatgattctattgagatctgatgtaaaactttttttatcatgttttatgttgatttttcattatgatcttacgtgttgaaatttaacatatatatattgtgtacatagattagttgtagatggtatgtcgacgttatcgaaaattgaaaatttgttcaatttttaaaacaagttggtgctgcaacgcccgacacacacacacaaaaaaaaaactcattaatcttactatagttttttgtatatgaaatcaaatcttcaaattaatgattgtgtccggcacgttattcttaaaatcaatagttgcacttaacaatcaaattatatcgctagttcatacttccgcatgttttttgtttagttaaatatggaatacacacttgtttttcttataacaaatatcgtggaacttttggagcggatttgggatgacgtcttagattatatagaaaatagaagtagattttgactgaatatcatcaatgaaaggaacaaagaaaaatatttaggttgatttgatagctaattaaactagatgtagactgatttatataacaatattacaaaacaatgatcaacaataaataaatgtctttctaaaaaagtttatgaataccaactaaactggtggaacaaaccattattgtgatgttgtaaatttgtaattgactttttcgataaattaatcgaaattgactagaccggtgaaagctaaaccggttccatctaattaaaatgagaaaaaaaagtagtggtagtaacttcgtctcgaaccatgcgcgggattaaagagagcgaattatacgaccactatggcaagacgcatttaattgaataaataatactagatttgcgcaaaatagttgttatacattttgaacaaaatatataatataaaaaccaaataatatttagatccgtgatgtacaggttgaatctatagaatttttttagaggaagtaaaaaagaatcaaaatctaaagttaaaattaataccttaaattttttgaaaccttagagagagtcttcttcccgtaaaaatatatattttactttatactgaaaaagtataatattttctatgattttttggcaaaaaaacaaagaaattgtatcacggaatctgcaaaacaaacatattgtttaaaaaatatttctaaaatagttatttaattgatcgtaattaatatgtcccctcatgtcttatccgttgatttatttttagtgacaatccacaaaaatcggccataatctctacttgatagttttttctttctattttgatattgaaaggttagtcctatgtttgactaatattgaggaatcttctttgttgatgtattttgtgcaaattttgaggaaccaaagagaatttcaattccaattttgggtggattcgagctattttattgatttatttttggttatatctcgaaggatgttctgacaatcaatagataatttgaaggccaacactgtttttgcataaatataggattcttcatctcaaaaattaaaaagatacataaataatcggaactcaccatataattgatctgttttggttctcgtcctagttcttcttgtacttctctttccaatttcttctctcctttcttctttcccatttcttctcttctttcttctttcccatgactatgattagattttttttggccctttttaccagcaagatgttatcttgtccatggaatttttaaaactagttcaattttgattaattattttaaattgaccccattataaagtagaaattaatccttgtaaaatttagtttaagagcaaacaattagatattatataactttttaggccaatttaaatcaaaacaaataaatataaaataaaaacatgtctattgaaatgatttcaacctcataattttgtcctcttgttagtctatcatttttttatcatccttttttttttcattcaccatttttcattgaaaattaagttaaaaataaagttataggttaaaaaattaatatacattttaattttaaatacaatgttttgatgattttatctaactgattatataaaaaaaatattcagcgtcttcaaaaaaaaaaagaaaaaaaaattattcagttagaatattgattcaaagaaatttttcaatgggtataaaaaatagcaacgcaaattactttggttgaaaaaaactaaatttaaaaatataattcgagttataaattgagctataaactcaaataaaagttttaatacgaaattaaacaatagaatcttctgcaattcgaaattccttttggtacgtccatgtcttctttccgccatggaaataatgccatctgttaatcatcaatgttcattgcacctcttcatctctagggttcccatttctaattctctcttaaacccttctcgccgttttcgcccataagtttctcaattcccaaattcgcaatcgtaatggcgattctcctcaagctttcgtcttgctgatcctttaaaggtacgatttttctattcaatttagtatcagccaatgattagttattgataattggttctgaatcgcttggattgtgttttcactctgcaattaggttgttgtttggtttttgatcacaaagtctcatactttttggttaagattcaatcaaaagagtcaaaggttacttctttgttactgggttttgagtaatggacgacggtgagcttgagttttcgaattcaaacatgggtggtgaattacctagctgttcgatggattcgttcttcgatgagcttttgagagattctcatgcttgtactcatactcacacttgtaatcctccgggaccagagaacacacatactcacacatgtctccatgtgcacaccaagattcttcctgacaaagtttctactgatgatacatcggaatcttcagggaagaagagacctttagggaatagagaagcggttagaaagtatagggagaagaagaaggctaaagcggcttcgttggaggatgaggttatgaggcttaaggcggttaataatcagctgttgaagaggttgcaaggtcaagctgcattggaagctgaggttactaggctcaagtgtttgcttgttgatataagaggaagaattgatggagagattggtgcgtttccttatcagaaacctgcggttacaaacgtgccttactcatacatgatgcatccttgcaatatgcaatgtgatgttgataacttgtactgccttcaaaatgggaataatggagaaggtgcatcgatgaatgagcaagggctaaatggttgtgagtttgatcagctagaatgcttggctaatcagaatttagctggcaaggagatccctgtttgtagtaatggaattggaacattcactgtcaatggatccggcgttaataagagaaaaggtgacattctagttcctttggatctctttcctagaggctgtccttaatagctatatctttatacagttttcatcgtagttacttccatattgtcactgtacttatcctggaattgtgtcatttctgaggttcccttgaacgttttttgtttaaacttgtggtttgtgtatattttgtttatgaactcaaggtttttgatcttgcaacaggtgagcctcgagcagcgaaagcagtttgaagtatcatcaatcatgtgatactatcaatcattcaccccattttcaagttggtagttaattttcttccaataagtagtagagttcaactgcatcaccagcttccttcaagtccatttgtgctatcatcaggtttttagtctctttgcatttccttgttgagctcgttgaagctagaaataagacttgttaatattcaaatcgagtttgctatttggttttgtactttagtagcttctttttttgttgtgaagttcttgtagaagagattgaatgttgcatttggaaaagtaagttatgggaagccatctcgacaattagtaacttggttgttttcgacttttcgttagtctggtacagtcttgtgcttctgaaatcacttatacgatgcatcaattctcgatttggtatgatattttccttgatgctctatggagtcttggggagtagtactatgctaaaaagaaccaagacacgaacgattcctgaatattgttgcacgatcgtgtctacatagaatatgttgcacgctcagtttgactggatgactactaattactgccaatgatgctatcccaaattccttattcaatgaatcttttgtcaggctttggagttctagagtcgaattttgtgacacaggaatgataggaaaccaacaaaatccaacatggttacattaacaaacagagatgattcatgttaatcctaatacagacgcaaagcttgtctttcagaaactggctaaagcaagataagacactttaagtaatggagagaccaaatcgtttcttaattttcatgattgttgtgtaatatcttctttgatgtcctcggcatcctcttcatcgcgatagatgctttctgccatctgccacacctgaagactgttgtcttcagctacacttgcaatgacccaaggctcgtttttgttccaagcaaagtctgatatcttagccttgtggcctccgtgagagaagagtaactctggtggaccatcttctgcatccaactctatctcaagctgctcttctccaaccctgtaaaccccaaaaaagaagcattactcaacgttgaacaatcttcagatttaaaagttgaagtttttgaattctgcaaagtagatgatgatgatacatacctgttcaggtcccagaccatcagccttctgtcctcccctgaagatgcgagtactgtttcatggttaggatcccactccacttggaagacctctcccctgaaatcagaatatttctttaaaaatgtggatttttacagcaaacagtccttcacagttactcagtccacaggtgtccacaggtatcaacatttagttctaacacaatttatagatagcgcagaggttatgagaaaatgtaaaggaacgtactcatggctgctcatgacatgcaatggcgcattaagtttccggaggtcaaacaaagcaacagtggagtctgaggaagctgtggccaatacccattcgttgaacggattgaaagatagatagttgacctgagaaacagaaaaaaaaaaaagcatagtcatacagttgcaatatttgattgggagatacaggacatatgaacttgcgacttcagacccaagtcatttaagttaccatttttaaaaaacaagcagagatattaaagatggtggttttctacctctctctcgtgaactttcacttggtgttgcatttggtttgtccgtgtgtcccatatcaccaatcggccatcctcacccgcagaaccaaaaaggttctcattcttcatgtgccatgacacatctgcgatagcactttcatgtccctaaaacaaaatcaaaagagtaaaatcagatgtatcaaaccacattttctgaaaacagaagaaagataccaactacacagttccttttacctcatacacaaacattgcattcaaaaccttatcttgcggtgtagctgaaacatcccaaagacagatcttctgatcctgtgaaccactcaaaagataaccttccttgaaaggactccaagacaatccatacccttccttgtcatgtcccactagcctcagatcaggatcacactcactcgtttgagactttgcagcatgtttggcgtaatcaaacagaaacacctcacacccactcgtctttgcacccacaagcgtcggcttttgaggcatacaccgcgctctgttcacttctccatcaacacgtatcctctgcctaatctccacctgaaacaaatcagaaaattgaagaaacatggtttagtagtatacaaaaactcttctttatcctaaacctataaaagagtccaaatttaatatctcaaatcctataactaactaatccttaacactatcagtttcagctagtcatttgatcgaacacttggtgcgcgtaaaacatgagctataaatattgtccaacaaaacgaagaatctccagggatcaaataccttaggaataaagggatcctgattagcgccgcctatcccaggttctgcgtttggtgtcggggtaacgacgtcggcgaccatgagaaaatcttgagcactaccggaagtatgagtaccgagtataagcttgtggacaccgaagtaagagtctgctacgtaaggatttggcgtcgatggaacccaatggacggtgagagatggccattcgagtgggtgagagatcaaaagatcgtagagaaatggtgtgttcttcttccacacagaaaaatcttcctcgacctgacccattcctgtctcctccttaccttcatctgccattatctctctcgcctctcaatctacttctctctctctcgctgatcttcgagggtttttctggttgattttcccgccaaaaatacacagagctgatcaagggctgtgatgctgttttactttttcacaattgaacgctttgccgttttactgtttcgaaacagcatgcatgtgctgtggatgctggttttgagtttatgggcctgtaaagcccattcttaaattacttgctcaaactacatttttttgttcagaaaattaattacctatagtcctcctatacaccaactaggcaactatgttataactatgttataactaaaagttttgattgctgtgagatataacttgctatatgatgtgacatagtacacataaacaataccatttttattatgagagttcaataaaacttgaatactcaggaagtaagattttgcttatttatatatgtagaatacaaagatgaatagtaacaatactatgtgctgagaatttcacaagtctttacctcaagggttcaaagaatttgctaccatttcaagaattgtattgactataacttcagggcttagaaccacactgattttgaatatcttttcacattcatcagcttgaagcagatcaaactgagactgaagaagagtaagaggcatgaaatgttcttcctcggaagctctcttctgtaaccgagcagcaatcacctctgcattaccttccaataaaacaaacgtaaccttgcaactcgtatagcttcccggtttgtaatcaggatcagaacctctcaagatttctctatactgttttctcaaagaagaacatgcgagaacaacggtttctccatcgagtaaacgttttcgcaaactctcttgtattttttcaagccatggcattcggtcttcatctgaaagagcaatgccttgacgcatcttatctagttgaacaattagtgttaacacatgaaattttcccaacagattcgtcaaaagtaatatcgattctgttacctctgtttgataaagaatgaaaatcatcagcatcaagaaaatcgcaagatagagctttccccaacattttacctatggtactaacaaagtgaaacaaaacaataaacatcaatgatctttcttcaaagtagaagagaatagtacaaatgagaagaaggaataaaaacagcttacgatttccctgcgccacttacgcccataatcgcaatgactttacctgtcactatgacaatgagcaacaaaactgatgagatcatttacattaatggaccataataacaatattggagcttaccgtcatttttagccgacatgcttgatgaaacaggttttggtgattcttgaagaaaacaatctgtgatcaagaaaagtaaacatatctattaactctcaatcttagcttataattcttcaatatttcctaatttcatctgagaggagtatatgactcaaattcaataagtaacggtggaaacgaaagaaaaaaatccctaattttgaaatcaagaacaaaactgtacggatcaatgtttattatacgtttcaaaacttactaagcaaaatttagttttctgtgagagacgacttactgagattctttttgtgtttcttgactctccacaacaccaccaatggtgaagcaattggatacgttttcttgatcaaagacgaaattcacaaaattcgctagattaggtgaattggattagaattgataaaaatctaataaaataataataaactgattaggtggtgagacgtgactttgcaagagaggtaggaccaaagatggaaaatgattataaaaatacacaattattgacaattttttttttttttttgaatgtaaattgataaatctttttttcataaaaaaaatttcaattaaaaaatacaatttctcttatacatgcatgtttctacactattctctaccttctttcaataaataaaaaagtaaaaactatacaacaaaaatattcttcaccaaaactgaacatgaataatagtattatattttaatacttttttttatataagatcaacatttactttagttaatttccattcctataattaactaatattttattgattgataaggaagcaacaaaatatatttttagaaaaaaaaagttttatcctcaccgattgagagcaaagtctcactctcttccttaagctctgagaaacctccgataagcttatcggacaaaaagagaagtagacgccgccatggataggcttttgcaacctccttcttctcactcaattgctccctccaaattccaatcaagaccatctcccttattactccaccgtctccactcaacgaatcttagtacttttccctcctctcgccgtctcgagtcacgccgaatcagctccatttcctgcttcttccgtcagaatccatcgccggatacatctccaggattgaatcagagtagtaatttcttgattgcttcttctcaaaccgatgcgtcgaaacctaatccaggatttatccaacggatcgtgagcagttttgagcaacgcaaggtaattcacaactatgaatcttctccatttacgtctctgtgtattggttatataggttatggtttcagttactagatttggtgtttctggagaagagcgtcaatgcttataggtttcaattgtttcaagaaaccattggattgattactagaagtttagggtttcgtgatcgagtattgtgtactttaccttgagattgttcactgttctgtatctgatgtgtgcaaatttgtgtgtttcttgtagaccatatcggcaggaatggttatattagtctctgctatagctgcgcttttgcttaatcccattcttgtgccgcctgctttcgctagctttcaaacggctactaattctggtggagctgctgtggttggtggaaaactcctcaggactgaagtattgacaagtgcttggactggtttctttgctggttgcttacacacgttatctggacctgatcaccttgctgctttggctccactttcgattggacggacgagaatggagagtgctgcggttggagctctttggggatgtggtcatgacgctggtcagctcatctttggtttattgtttctgcttctaaaagataggctccacattgaagttataagaacttggggtacaagagttgttggtttgactctccttgtgattggtgctatgggaatcaaagaagcttctgagatgccggaaccatgtgttgttactttggagaatggggaaacagatgagaaaagcttaaagaagaaaaagatagggtttgcgacatttgcgactgggattgttcatggcctgcaaccggatgctctgatgatggtattgcctgcattggctcttccttctcggatagccggtgcttcgtttctcatcatgttcttgattgggacggtgattgcgatgggaagctacacagtttttattgggtcgtgtagcgaagcgttgaaagagaaagttcctaggatcactgagaaactaacgtgggcatcttctcttgtggccattggacttggattggcaattattgtcagccagttctttggattcagcctgtattgaagaaaacatcgtcaagtctttgtagctctctctgtaggataagattttttgcatgtaccaacaaaatttgtatctttgcttcagaatctttttcttcaatcaaatacaagtttgagtttggctcccccaatctttttaccgaactaatgaatgttatatataaagtatgttttgtcatgttcctctcttaagggttgatttgctcgatggaatgatttttgataaaagaatggttaaatctttgtaaagtaatgcatcacaattattgcatacaaaatcaataaattattacctaaataatccgaaaattttcgatgcaatccactaaagaaacaaattatttgatagctaactctaattatatcgcttgatacccaagttttcaagtttccagatacatgatgctctcacttggatccataagctccatgtccatatatctggtccttacagggttactaaaccaacgatctggtattcctttgacctcaacctttttcaaatcattgatttgcaggtcatagtagagaaagtaaaagggagaagaaaacaacttctttggtaccaagatgaccttgccttttatagatgtaccttttgctgcccatatattatcagtgacgtctaaatgcatctgagagggctgcaaaacaaaagtcttcctcgaccattccttcttcttggcatcttccacaacccacaaatccatcttaccattcactcggagatcggtgaaatcaagaacagctacattctcaccatactctattaactacacccttctcttgtctaggtagtgtgtctccagcattgcgtggtacttgcatcgtattgaactcttcagacctaacgtcgaaactaacaagcatacaagtatgtggatcagtccaagccaaaaaatacaaaactccattcatattcaaatcaagatgtgaaggaacatgatgaggaaactcatttgcaacccttttccacgaaccccctgcttctagtacgaaaatccaaagctctgactttaaattttgcaaatcattgtctgatgcataactaactgtgcagagtagtttgtaccgatcattaacagggtcatggcagataaaatagaggatgttataaggaggtcctgctatgatatcagattcttttatggtaggtaagatcacaagttgtctagtggtggggttatagatacgcgcctttaaatttctagtgaaaaaaatgaagccacgaagaatccgcaagaagaaacctcccatcttacggatggttagatcttggtcgaatacaaaggaatacggagacgtgcttggagcagatgataagatgagagacttagagtagttgtatcgatccaataggcacatgtaaagactaggttgaggttgagatgggacgatgagaaaacggttgcaaaaatatctggaggacaagagagatgaccaaaactttgagacacacttgaatctcatcactgacttcggaggtaatctcgtcagaatctcgatcagtagatcctgagggatatatcttgcgacccaagttttcggatcttgcttcgctcttcgtctacttctacttcttgttctcgacctcctcttcattctctccttttgtaccgtggcaaggagaaaggaaaatcccattatgtggcacaacaacaatctccactttggaagcacccacaaactttatatccttgtttcagatgttgagacaagacagagttagtcggcctagactcacacggacaagagcagagaagtagcaaattagggtttgaagagtgatgacggtcacgagtcttccatcatgttgctatgtatatagatcaacccgacccaaattgtgaacctaagtaactttcgggttatcgggttagctggttgatctggttcaactgcggattaataaacaaatgaattctttctttttcttttgataaatttatatatcatatatatttttttcggtatgatcttagatttcatagaacctagaatttcactttctaggttttatatgtaagacaaaagaaattttcacataagtggatgaaaaaaaattgttctcatggtttgtcaaagtgagatatggttttcaccgtttgtcttttcagttgttttcagaccaaaatactcttaatgggagcaaccaaaccacacagcacttgatttcggtttagtttctgtagttcaattttgaaaaaaaaaaaaaaaactgaaacaaagaaatcgaagaagaagaaaaagagaaagagacggagaaattcgagagagaagtagaaagaagttcaaaattcattatccactccttcatatttcgacatctctccattgaactccaaaattgaggaacaaatttcttgttttcagagatgaacaaaatgcaaaaaaaaaaactcatagattcaaacactttagctttttaaactaaagatagtataggtttacaagatttatttataaatagtaatcaaaacgtaaaaaaaatgagattttgagaaaactgataaagacggccgcaaaattaggtttgcagaaaaggatacacaggttgaagatgactggaaaattataattatacccttcatcgaattttttctgtgtacgtatattcaatttacagtgtacgtacacaaaattatttattggaacgtatatgtgacgatttctaataactcaaactattttattacgtattcttatatctcaataatctcaatacatacataataattaaataaaaatagatggtgaaataatgtacgtacatttttgttggtaaattaatgtatgtacatgtgtaataatatacgtacatttttgtttgtgaattaaattattaagaaaaatttatttatacaatattaaaccaatattggcagtggctaagataagacattgtttgttgtatgattattctgttcttaaaaacacttcccaatctatagtatacgtacagtggtacaaaccatgtttacacatatttcttggagtcacagctggtgtacggtcacccgagtgagaaatgttatctccgtcaggtacacgctgacttgtggacgtacactctgccaacagaggactgaattcccctggtgtgagaatgacgttctcctcaacattccctattccatgttcttctacaattacatcgtttcacttgttgtaatcataatcttcgccactactttcactaccatcaatagtaggatcgaaggcacttctccccatagatccatcgtcaccctgataatcatcatacccatcaccatcttcgttgtccccctcctcttcatcctcatctgttttatcgtcttcaacgtcgtcttactcatctacgacctcattattttcatcaacatttgaaacacggtcactttcagcatcgtcaccatgagtcctaaagacattattcatgagtgtcttgacgattgtaatgaaagagacaaacaagttgagagaaggatacctaccacgaatcataaagaacgtattcaaccccacttgactgtcattgtagacaggagggcgtttagtatctatcattactaacatctctcccggcatcctgtaactaattatgggattgatctctgtggacttcaaactgaaagcctcgcttagtgtacgtacaaattccgtgtacgtcatgttttccttaacacgtacacaacgaccaaacatgtcttcctttagtttaaatttccattcttcttctttgcatctccactcaccgaccataataaatacgggaatatccattacccaacaacatcataaattcaggagaaccccagtaaatgcaattgaaaacatgattatatctacaaaaacaaatagaatttcgagatacacacttataaacataattatttacacatttatcattttcaaccaacaaaattaaaaataaaatatttttgggtttttctataaaaaagcaaaattaatttcgaacacaatgaagatcatagtgtgttataacaaaaaaaatctttaaaacttcattacttacacgataatgcttatcttggctccaaacttcgtaaataaacaagatcaacacttcttgaatatcaatgtttgttcgcaattaatgtttgttcctgggttcatctttaactcaacaattattatcaataattttataatattataacatgtaatgatgattttgcattaattataacaagagtcacgtctaaactttttgggccattaaatgttgatgtcatttcgtttttaatggaaaaaatctcccttctaactgtacagccacactcctcaacgtgaaacaaaaataattccaactaaaccggaacagtgtacctaactaaatctgactaactaaaccgtacattcaacagtttctcagctgtagcagcaagggcaaaatggtcaaattttagctgaaaagacaaaacgtgaaaaccacctttcactttgccaatccttgaaaataaaacatggtcaaagggtgtggcacaattatgtgaacaaacaaaaacataattgaaagtaaataaattctcttaatttttccaaattgtttttagaaagaaatcaaattagttttgggaaaaaattatatttaagcaaaaagttttaagaaacaagggatattatgagattttaatcatcgggagtataaaaggaatcgttatcgtcacaaaaacccttaaaatcctaaaactatggcgcgtttgtctctttgaacagagaggatgaagttgagaagaagaagacctagagaaagagccatgcaagctgcaatagaaaatagggtcgaacatatggaagaagaagaagaagaagtagaggttaataaaagaaaaagtttaaaagaaagcacgattggaaaaattgtgttgcaccagaaattcctcaggatctcctgatcgagattctgacaaaattacctccaaaatcagtgttgaaattcaagtgtgtctctaagttttggtcatctcacttgtcctccacatatttttgcagccgtttccttaagctctcatctcaacctcgtctttacatgtctttattggataccaactactactccaagtctcggctcctatccgccgctccaagctcgttgtctttggctaccatagtattcgaccaagatgtgaccatccgtaggatgggtggctacgacccacgttttcttcatggctttatttgcttcatgtatgagttaaacgtgcggatctataaccgtagcaccagacaactttatatcatacctgctattaaagaatctgtcatcagagctgaggatggcgaccttaatatcgatccttatacaccatccaatattatataggccttcatgatgactccatacaaacgtctcggaggcggagctaacaccgtagctgatggacagcaccggaacagctcttggtgctgagattattggcatatttgtcttggtttacactgtcttctctgcctctgaccccaaaagaagcgcgcgtgactctcacgttccggttagtaaaacatttcaaatggttttgtgtaatatcttttatgttgaaatcttctgaatgttatttcattgtttccaaaatggggccgagtaatttctaacaaaattgaattcttttgaatatttttcaggatggatttgtgtaacaaagttgatatgttcaaacaatctatttttgggtatatatatatatatatatgtaaagggtaatttgcaggccacaccctttgaccatgttttattttcagggattggcaaagtctgatgtggttttcacgttttgtcttttcagctaaaatttgaccattttacccttgctgttacagttgagaaactattgaatgtacagtttagttagtcagatttagttaggtacactgttccggtttagttggaaatatttttgtttcactttgaggagcgcggctgtacagttagaagggagatttttttctttaaaaactaaatgacatcaacatttaatggcccaaaaagtttcgacctgactcttgtcacaattaatgcaaaatcatcattacatattataatattataaaattattgataataattgttgagttaaagatgaacccagaaacaaacattaattgggaacgtacattgatgttgaagatgtgttgatcttgtttatttacgaagtttggggccaagacaagcattatcgtgtaagtaatgaagttttaaagatttgttttgttataatacactatgatcttcattgtgttcgaaatcaattttgttttttatagaaaaatccagaatttatttatttctaattttgttggttaaaaatggtaaatgtgtagatatttatgtttataagtgtgtatatcgaaattctatttgtttttgtcgatataatcatgttttcagttgcatttattgggtttctcctaaatttatgatgcagttgggtaatggataatctcgtatttactatggtcggtgagtggagatgcaaagaaaaaaaatggaaatttgaaccagaggaagacatgtttggtcgctgtgtacatgttaaggaaaacatgacgtacacggaatttgtatgtacactaagcgagactttcagtttgaagtccatagagatcaatctcataattagttaatggataccgggagagatgttagtgatgatagatactaaacgccctcctgtctacattgacagtcaagtgagggtgggatacgattttttttattcgtggtgggtatccttctctcaatttgtttgtctctttcattacaaccgtcaagacactcgggaataatgtctctaggactcatggtgacgatgctgaaagtgaccgtgtgtgtgatagtgttttaaatgttgatgaaaataatgaggccgtagattagcaagacgacattgaagacgataaaacagatgaggatgaagttggggggacaacgaagatggtgatgggtatgatgattatcagtgtgacgatggatctatgggggaagtaccatcgatcctactattgatggtagtgaaagtagtggcaaagatatgattacaagaagtggagcgatgaaattgtagaagaatatggaatagggaatgttgaggagaacgtcattctcacacagctgactgttcaacatccaagggaattcagtcttctgttggcagagtgtacgtacacaagtcaacgtgtacctggcggagataacatttctcacccgggtgaccgtacaccagctgtgactccaagaagtatgtgtcaacatggtttgtaccaatgtacgtacactatagattggagagtgtttttaagaacagaaaagtcatacaacaaacaatgtcttatctcgcaatcaaacaatctttttgctacaagcaacctaggtcatatcctacaagattggtgatggtatgcgttgatgatacttgtccatgacatttgactgctcatgtcgtcaagaattcagaatgtttcaaaatcacatcgtatgaacgtcttagaatatatctcacccactgccaatattggtttaatattgtatcaattaaattttcttaataatttaatttacaaacaaagatgtacgtatattattacacatgtacatacattaatttaccaacaaaaatatacgtacattattacacatatacgtacataactttcaatatgaggaacaaatattatttcaccatctatttctatttaattattttgtatgtatggagattattgagatataagaatacgtaataaaatagcttgagttattagaaatcgtaccatatacgttcgactaaataattttgtgtacgtacactgtaaattgaatatacgtacacagaagaaatttaataaagtgtataattgtaattttccagtcatcttcaacctgtgtatccttttctgcaaacctaattttgcggccatctttactagttttctcaaaatctcattttttatacgttttaattactatttatatataaatcttgtaaacctagaatatctttagtttaaaaagctaaattgtttgaatctctgagatttgttttttcaatttttgttcatctctgaaaacaagaaatttcttcctcaattttggagttcaatggagaggtgcgaaatatgaagaagtggataatgaagtttgaacttctttctacttctctttcaaatctctccatctctttctcttcctctttttcttcttcttcggtttcttcgtttcagttttttttttttttaaaaactgaaccatagaaactaaatcaaaactaactgctgtggggtttggttgatcccattaagaatattttggaccaaaaaccattcaaaagacaaacggtgaagaccacatctcactttgcaaaatcatgagagcaattcttttttcagcctgtgaaaatttcttttttataaatgggtttgtagtttcgaataaagttgaattcttctgaatatttttcttaggtttcacatgggtttttgtaatttttaactgactgtaaatatttttgaattttgaatttttttcagcatgggtttgtgtaatttctaacaaagttgaattctattgaatatttcgaatacttttccatatgtttccacatcgtttagtgtaatttctataaaagtttaaaatcttttgattaatatttcaatttttttaggtttttgctccgtacgttacctattgggtttgctgtgttcatggtccatttggctactatccccataactggaactggaattaatccagctaaaagctttggtattgctgttataaaataaaagactttatttgtactaaaataaagagacacaaccacattttgaactatctttaaaattatagaaagactcagactatttttatttatgctgatttaagcatactaacataaactagctatcaatgcaagagagatacaatctggtgaagtttcctcgtttggcatgggaccctcgactggcgaaccctcccccggtgtagattgtggtggttccacggtttctttcaattcagctggactgtcaatctgtcattaatctctggtggttgctgagacgactcgtctcgagcttctgccgtcgtctcctgcgccttttccgccaacaccgtctcaagagtagctaacgccggtttcaaaggaggaagcttttcatcggcgtagtaaaccctaagcccaatctcacttgcacaagattaaacaaactcttcttctcctaaggataatatatcaaagcctcttctcctttaccaacaaactgatcggacacaagtcggatcctacggagaaaattgttcttccgcgtgtgaccaaagttcttgtcatggtatattgaattaagcttgaagttaacttaagcctcaagtctttaaagagattaggactagtaactttagcagttatctaaagttatatttaggagttatctaaataagcgttctagtaggattaggatttctttatgagagactcttatataaggagatgctaagttgtagcataacttatgaggttaagagtttgagagattaagagagtttaggttttgagaggtttttctaagctaataaaagagaggttttatttgatctttgagttcttaatcttcttttaactatatttggtttcagagtcttgtagtgtgtttgtgagatcataagaaggaacgtgaacaaagaagatgtccgaacttaccgtcacaacgggaagaccgaaagaaggaggaggatcctcatcaatccagtgctcatgcttacctcgataaactacacatgttgggctataaagatgaagattgcactcaaggtacacaaggcatgggagatcattgagacagttgaaactgatagcgagaagaatgaaatagctatgcacttgcttttccaatcaatacccgaggcgctggtcgtaaaaattggagagctatatatgagttatgacaaagaaggtttgggaagcaataaaagcaaagcatgtaggagcaaacaaagtaaaagaagcgagactacaaagcttaatcattaagaattcgatcgcctcaagatgaaaaactccgagactattgatgccttctcagaaaaactctctgagataacgtcgaagtcagctgcattggggggaaatatcaaaacttatcaagacgtttctgaaaagcctcccgcgtaaaagatatatccacatcgtggcatctctcgagcaaattttagatcttaaaaccacaagttttgaagacatcgtcggacgtcttaaagtttatgaagaacgtgtatgcgataaagaagaaactcaagacaaccaaaaacaaactaaggtacactaatacgaaaacaaattatggaaaccgggactaccatggagatttttaaaacagaggacgcggtgatgggaaacgttgctatattatttgcaaacgatgtgagatggaagatgaaacaattaaacgattaatgtgggaagaacctcaattggaaccgattgaacttagcactactacggaagttttggacagccgaattcaatctataagatgcgggattcaatctatcatatccaactattcggagtggaagcgtttatttgggaaatgaataatatcctttcaagaaggattgattgtcacgtgtttgaaacagaatgttcagagttagtctcgatggttcgatctgtcacatgaagaatggcctgatttttcgaatctgctagatgattttggattgctacgacccgtctctctttatccttcttctcgcactcttttatttctcgtttatgtaatgttcatgtggactatttagacggttattctagagtgttatttttaaaaattattttggtaaactctattcttcctaatttggcaaccaatcatgaaattattttttaattaacatgtggttgacaaataaaaaacataaaagtgtttagatacttagaatttataataaaataaattagttatcaccaaatttagatatttagatatttagaatttataataaaataaattattttatagaaactgaaaaactaaactaaaatagaaatcatttattaaacaatatgaccaaaacaatttccatctctttacttgacatttacacgtaaattaatagaaaagtaaatataaaaatgataaggatttataattaattataaaacagaatataattaattataaaatagaaaaatattctattttatgtaattagatgattactttaaaaaactaaatcatgttagaaaaacaaaattatgttaccttatatgatttaatacattgtaaaaaaaaagtaataatatgtgtttgatttaaatttgaatatcaagagttagcaagttgtcaaaatatagacaaactcaacaaatttatactgcttcactgattctctatttatattacatacatacatcaaacatattagtgttaacgaaatgaaaaatgaatttcaagtatacaatttaatccgtccggatcctacctaatttttgttaaaaggaaaggggagattggagaacaaaaggcttgagaataaattgcaaaccatatatgattcggtttagactccatgcctagtaggattatgagattgtaataagataataacgttgtagaattcatattgggaagccctatatgattcggttcactggttgcgttgcaaatattctacgaggtgatttggtttgagacttgagagagttataggcaatgaggaatgaagcccaggccctgtgatctttttactatcttactaagcaaatctaagctaattgtaaaacaagaaaacattttagagagagaaattcatagatttgagatcccataaatagagataattgatgttcattttggtaataaaccccaaaaagaaaagtcataacgttccgtcaaagaaacaaaagtaaaggcctagtagtacggcccaaatacttttggcgggagttagaagaaaaataaaaagtcaagcacgaaatgtgtttgatggaatgccaaagcgagagagagacaacaatggttcaagaagaacctatgaaactgagaatcaccgaagttgttgacattgaaagaaggtggtgagctgtcattctttttttccttcttcttcttctctttctcctattgacattgttggaggtctcattcttcttcatattcttctttggccttcgattcttcttcttaggctttggtggtttttcttctactacattagctttggagtctaaacacataggcataataatttttgagtatataatttgttgatatgaatagttaaatttttgaatttaaataatatttgtattaactaattaataaaattattttattatcgttttctgaatttttaattacaattttcttaagattttgggcatataatccaattattccttcgaactcacaattatgattcataacacatgtataagagttaatcaaaattgtgatgtacaacacatgcacaattcgagtcattaacttttggcgtcaacttgctgcttctgtaagtacaaagcttaattgctatacaaaaataaattgaggagaacagataaatatcaaagacatctcgaccgaacctaatcaatccaacaaaattctacatactcgatatccaaatttagcaagatctatgcgattcaagtgtcttgaggcataaaagcaatcacagtgaataatcgaatttgaagtcaggatcaacaaacaaatactaacaaactagatctaggcatacctatatagaggctgggatcttcgttcttcaattcatgttaaagaatttaatagccatcatcttccaaaaaaagagtaactagggtagaaaaaataatcgaaaacataattcaaaataaaatataattatgaatctagaatttcaagtctattttaaaacctctataaattaatattcgataaattaataacctctataaattaataaattcttcctgtcccgagttgggaccagtgtataaatgtatacaaatcgataaattaataagataataatttttttgaaaatcctatgtaaatatatggtctcatcaatattatgtaaaacttagtaaaatatgactttagtattatttttcttcaatttatataatttatattaattctgtgtaaaatttaattctaattattttactacgtataaaaaagttttttttttgttttaaacataataaaggttttctacttgtaattgatttttagaaaaattattgagtgtatagagaaactaccttttagatcaaatttttgtaaaaaattacaaatttgtaaaatatctccataaattaataattattaatttatcgataaattaatatctctctaaattaaaaaaaattttggtcctgacattattaatttatagaggttttactgtagttacaaactgcgcatggtttgtcaaattctaaaacatgctttgtttattttgaaaataaaataaaatgatactagatgaaacaaatataatgaaaaggatatttaccaattgattattcttatatttccatatttttttattttagctactatttttgaaaacttccattaactctttcactaagagctgtgatagtacacaaaaaaaaaagctgtgattcaagtttttctactcataaaatatgtctttgattttttgtagtaattataggccgtaggccaatctttcaatatcatacacgtaggcacgggctagtgctggcccaaattggagatggtcttagtggttagaaacgaatgtttaaattcttaattaacttttgtaaaacaccagatagtttgtaatatacgacgagatagttgaaacttatgtccaaaaaagaaacaaaagaaagagagtatgttcatatagtaatagggaaaagaaagaaatataaccgttggtgattagtcatttagttggatgacaaatctctctcaccttcacatggaccaacggcttctatgtcccaccaatttgtactctcaatctcctttaccttatttattcattacaccaaagctacgacacgacatggcttttgttttattttcattatatttatgttatttaatgttacagtacatacaatatttagcttttatgtcatgcattggttattagtattttgtattactagtaagattgaaaacggttttaagaatgtaggagtgtgtttcacaaaattgagagtattgcaattacatgagagtgttcagacttcagagtattacaaacctaacaaacctggatattgtgatatgactggcttttaggttttgtaggtctcccatttgattataaacaaaatgtatttattacctatattccaaaagtacccttatgttccatgttctcttcttataaagcaacacacaagatgcaagaaatctccataactagagagagaaactaatctttttagtgagagagaaatcttagagctgagctaagaaaaatgtcaaaagaagtgagtgaagaaggaagacatggcaaagactacgtggatccacctccagctccacttctagacatggctgagcttaagctctggtctttttacagagctatcatcgcagagttcatcgccactctcctcttcctctatgtaaccgtagctacagtcattggccacaagaaccaaaccggtccttgtggcggtgttggtttactcggcattgcgtgggcctttggtggcatgatctttgtcctcgtctattgcaccgccggtatctccggtaaatatttccacaaaaaccacaaaaatttccataaacttcagtttcaagatcttaatatgaagttgtttagcaatgatacatttataattcaaagatacatttttagcaagtttttgtttggtaaaatacctttttagcaagttggtaaaatatttcaacaaaactttatcctaaaattactaaaccttaatcttcaacaacttaatatggagttgttaacttgcaggaggtcacattaacccagctgtgacatttggtctgttcttggctcgtaaagtgtcgctccctagagcagttgcttacatggtggctcagtgtcttggagccatttgtggagttggactcgttaaggcctttatgatgactccatataaacgtctcggaggcggagctaacaccgtagctgatggttatagcaccggaactgctcttggtgctgagattattggcacatttgtcttggtttacactgtcttctccgccactgaccccaaaagaagtgcccgtgactctcacgtcccggttagtaaaactttgcaaaccagttttgtataatttataattattctaaagctgaattttttactgttctttcatggtttcaaaatgtgattgtgtaatttctaaaaatagttattcttttctaaatttttcatagatttcatgatgggtttttctttactgttttttcatgattgaaatttttgaacatatttctaggtatttaggtttgtgtagttaataaacttgaatttttctgaatatttatcgtagggtttgacatggatttttgtaatttttaacaagttgaattcttttgaattttttttcttatgatttcacatgggtttgtttaatttctgaaaaagtcttttgaatatttttatttttataggttttggctccgttacctatagggtttgctgtgttcatggtgcatttggctactatccccataactggaactgggattaatccagccagaagctttggtgctgctgttatctacaacaatgagaaagcttgggacgaccatgtaaatatagttctctctcattaacaatcaatttacttatttttttgttgaataattactaattaagttttgggttaatggatttgaatttttagtggatcttttgggttggaccattcgtgggagcattagcagcagcagcataccatcaatatatcttgagagctgcagcaatcaaagctttggcttcattccgcagcaacccaaccaattgatgattcatgagacttcttagaacaatttgagatctttttttttgtgtgcttaatgagagatatttgtgtgttttaatttgatgtaatcggatttattcattttcatagtttaatttggtttaattcatctttgtccgttgctttctttcatgtagggcatcttatgattcacttttatactttagtacgaattaaaacatttgttacaagtttatatgaacccacatgcatgttcgtataaaacattccttggtgtttttgtcttatgttacttgattcttcttatccggtggtcggatcataaaccactcacatatgacatattgacacatgttccttagttagaataataatagactataatagctaaagccttggggcatgcaataaggattggagtttagcaataagcattatcacgtctcgtcttttcagaattgtagagacagagaagtgtgtgtggtccttctgataaagaggtcaaaaatttcgaaaagggctcgaaagcagacggagatgaagagaaaaagataaaggaccaccacactaaagggtccacactcttcaccatagaccactttacacattagtctatccatctcgataataaccggaattcgtacccaaaccttaaatttaagcagatttcttcaaaacattttcttttaccaaagttgtgtgtcctcgagtttggctacatcagctgattctatttttgacaaagaaacaaagagaaaaagtaaaaagctaaaacttttttcttgttaccgtttgttctctctagcgagagctggtacagaaattttgtttgaatttcaaagtgggctaaagaaacgttcattctacaatttagttctctcaagaaggataatttaaggacaattaatcagacaacagcatagtttactttcgaaccagaaatccattcccttgtttccaacatgtgagctcaagtagcttagtcgggtaatgcagttcctcgttccaagttgtttttgatctccagcgtgtatttcccaaacgcacgctcgattttcttgttgaaatgctcgtttctgtcgttgatggaatcgatatccttctcttcccggaacttcctcctcctgctaaactcttgtcgcttttgctctctgtctaagagctcttttgccatcttatctatcttatcttgcgaagtttttggagcctgcaaaagtttaacaaaggattgagcttttctatgactctttactttagatttgagtctctcattgaccaaaaacgacaaatcacaaacctttccatattgcaagcttgaggcctcacggtaaaactctggatcagctgctctcattctgttatactcctccagatcaacctgaatgttctttgtccgtttcttgtatgcgttgtataacgtcttctggttaaagactgaagataaatacaacatttcacacattagcctctcaataattgtgtaatcatcgaagtgaaacataacaaatgagaagagacaagagtttcaattcagtacgaatttcacgtaccatcccaacccgcaggcgtaggttccttttcccattttttgtattttgattcagctgcttcttgagtatcgagcatataagcctgtgtcatatctaaaccattagcatcaagaagtttcccaatctttttcttcctcccctccaaccatttctgttttgagattccttttgtctctgttggtgcttccattttcttcttttcactcccgacatccgtctgattggattttcttgcttcattctgaaacaaaagcgttatggaagagttacatatataaaacgatctttggattctttaaaagaattactaatgactgtacaaaaagacttaccatcttaagtctcaactcaaacaacttcttttgtctccctgtaagttgagttacatctacttgaggttcttggttatcctcttcctcctcttcttcttctgaactatcttcctctattcttttatcatcgagcggctccctcgtctgctcgtgaactttagctaatccttttggtacatgaaaaagaaaaacaagtctcagaatggtaattcacactcacttcttatcagaactacatgaacatttcataagacatgatatcacaatgacaagtaacatgtctctatctgtttctgcacatagtgggtggatcacaaaattgaaactaagttgcattgagacaacaccagctttatgtgaagatttactcataactctaataataaacctcaaaccgctacgcttacgcatcaaaaatcataaaccataatcacgggaaacaaattcacacagatgatacatacaccgcaaactagtattctacttctctctacttctctactggcctttgcttcagcaattttctcaaagcaataactactccttcactcatttttaaatagtgagaatcacagaatagaaactcagtagcattgaagcatcactagaaacttaatgtgcaaattcactaacagatctcctctaaacgaataacctagcaagtagcaaataatcattaaacctcaaaacagctactgctacacatcaaaattatagacctccatgagaatggacacagatgacagaaacatcaagaacagctaagcctcaaaaaatagaaaaagaacacaaaccagtgttctgcttctcgaatctggcctttgcttcagcgattttcttaaagcaatactcgacacactcgtgataaggatttgaagcgtttatacaatccggatgcactcttctctcactaaccatacttccaagcgttaagaaactgcaaaataaaccaacagaaacgccaataaagttatccaacagaaacgccaataaactgcaaaataaactcttctctcattgagatttaagaataatagcaaaagaggcacaagaagcaccaaataacaacaaagctcacacattacgatgatgtaaataaaaatcttaactgggttcaatgaaaaatccctaatttgatgcaaatttgtagctaaactatataacactacaagttgatgcaaacaagaacttaactggattcaatgaaaatttccctaatttgatgcaaattcacttaaatattaaacctaatctgttcaaagcctaaaacaggaggtaggaaattgtagattcatgacctcataaatcggaatcaatttcgagattctgtgtatttgaaacactatgttaaatacgtaagatttttcccaaaacctaagaacaatggaaacaagtaaaatcatcttctctttggttttctattcaaaaaccaaacgattgaaatcgaagaaacaatctatagaatagagagaagaaacactccaaactgaaatcgaatcaaaaaaaccaacctgtgaagaaacaattcggaggaatccgcaagtacgagaagaacaccagatatctcgcggacgataatgattttttttttctccgctcagtggagaagaatagaggagaaaaaatattggaaaatattaattatagatgggcctcttaaatttgacttgggccaacaaattttttaaggaatttgacatttgtttttggtaagtttaaggaatttgacattaattctagccagagtatacaatttgatttttttttaagagaaaacaattttaaaagttaattttgtttttggaaatttatcttcataaaatttttcatatgaaaatatttatttgaaaatatatttcgctcttgttgaataatttcaaaatgtttttcttactagagttacaaaatgttataattcataacaggaagaaaaaattcaaaaatttcatgtttgcataagtaaagttatttattgtatgtagtattggtatctctatatggaaggggaaaaaattagtcttaattaatatgaattcttgtagaaaatgcctttttttaaaaattgttacgaaaatgccatttttacttaaatcaattaaaaatttgtcattttaaaacttagaaatttacgtattttataccaaatactaaaaccgaataataaatagaaccgactaaacccaaacataacaaatacaacgtatgtttaatcataattgtgttgcttgaaaaaggccaaatccgcaaactattcaaaaaatgccaaaatcaacaaatacataaaatggcaaattcataattgattctaattaatatgctcaatatgttttcaatggtgctagaaaaaaaactaacattttttgtattttttatgattacttcattcaaaatccatataatggcattctctctcctctattttaaaaaaaaaatatattttccaatcattttattttcaaatgttagtttaatattagtttctatataaacacataaatatattcacatggtaaaatcaacattgtttataaaaaatataaaattagatctaaaatataatttaattcgaaatatataaaccaaaattcagctaaaaagcgtagataaaatcctcataacggtttaaggaagaagactaataaggaatataacagatttgataatctattagcgtgtaaggcttaccaaaaaaagcggcgtttaatcacttgtttgattgcaccttcttctttaaaacttaatcactttttggttatatgtgtatgtctaagaaataactatgtaatctttgtatcaattttaatcaaataaagcaagatgtaagacaatagatatatatcggaatcctcgttccatagaaaagtgaaagacattattatttgaataccatttaacaaaaaatacgaaagaaaagtgagattacaatgtttaccaaaaaaaaaaaaaaaaaaaaaagtgagattacaaatagaatgagttcgattatatataggagttagttaggacccatgccagatggcccacgccacacaggattagcccatggtcacgtcatcatctttcctagtgctgtattcgtgaagaactcctccatctatggattctgtcgtttccttacccaacacaagctttcccatgttcctcacaatattggatagatcaaagcagatgcagagccaactccaacaatctataggtttctcctttccttcaacattgtctgatgccgagtccaagctcactgtatgatcattgttgttgtcctcatcgacttcaataatcctgttatcccttggcaaaccaaattcctcttttagtaaataaccaatcatttttttctgtttccttttatgtaagcaagctt

SEQ ID NO: 237 - DNA, 93861 bp, Arabidopsis thaliana
gaattcttttgaatatttttcaggatggatttgtgtaacaaagttgatatgttcaaacaatctatttttgggtatatatatatatatatatgtaaagggtaatttgcaggccacaccctttgaccatgttttattttcagggattggcaaagtctgatgtggttttcacgttttgtcttttcagctaaaatttgaccattttacccttgctgttacagttgagaaactattgaatgtacagtttagttagtcagatttagttaggtacactgttccggtttagttggaaatatttttgtttcactttgaggagcgcggctgtacagttagaagggagatttttttctttaaaaactaaatgacatcaacatttaatggcccaaaaagtttcgacctgactcttgtcacaattaatgcaaaatcatcattacatattataatattataaaattattgataataattgttgagttaaagatgaacccagaaacaaacattaattgggaacgtacattgatgttgaagatgtgttgatcttgtttatttacgaagtttggggccaagacaagcattatcgtgtaagtaatgaagttttaaagatttgttttgttataatacactatgatcttcattgtgttcgaaatcaattttgttttttatagaaaaatccagaatttatttatttctaattttgttggttaaaaatggtaaatgtgtagatatttatgtttataagtgtgtatatcgaaattctatttgtttttgtcgatataatcatgttttcagttgcatttattgggtttctcctaaatttatgatgcagttgggtaatggataatctcgtatttactatggtcggtgagtggagatgcaaagaaaaaaaatggaaatttgaaccagaggaagacatgtttggtcgctgtgtacatgttaaggaaaacatgacgtacacggaatttgtatgtacactaagcgagactttcagtttgaagtccatagagatcaatctcataattagttaatggataccgggagagatgttagtgatgatagatactaaacgccctcctgtctacattgacagtcaagtgagggtgggatacgattttttttattcgtggtgggtatccttctctcaatttgtttgtctctttcattacaaccgtcaagacactcgggaataatgtctctaggactcatggtgacgatgctgaaagtgaccgtgtgtgtgatagtgttttaaatgttgatgaaaataatgaggccgtagattagcaagacgacattgaagacgataaaacagatgaggatgaagttggggggacaacgaagatggtgatgggtatgatgattatcagtgtgacgatggatctatgggggaagtaccatcgatcctactattgatggtagtgaaagtagtggcaaagatatgattacaagaagtggagcgatgaaattgtagaagaatatggaatagggaatgttgaggagaacgtcattctcacacagctgactgttcaacatccaagggaattcagtcttctgttggcagagtgtacgtacacaagtcaacgtgtacctggcggagataacatttctcacccgggtgaccgtacaccagctgtgactccaagaagtatgtgtcaacatggtttgtaccaatgtacgtacactatagattggagagtgtttttaagaacagaaaagtcatacaacaaacaatgtcttatctcgcaatcaaacaatctttttgctacaagcaacctaggtcatatcctacaagattggtgatggtatgcgttgatgatacttgtccatgacatttgactgctcatgtcgtcaagaattcagaatgtttcaaaatcacatcgtatgaacgtcttagaatatatctcacccactgccaatattggtttaatattgtatcaattaaattttcttaataatttaatttacaaacaaagatgtacgtatattattacacatgtacatacattaatttaccaacaaaaatatacgtacattattacacatatacgtacataactttcaatatgaggaacaaatattatttcaccatctatttctatttaattattttgtatgtatggagattattgagatataagaatacgtaataaaatagcttgagttattagaaatcgtaccatatacgttcgactaaataattttgtgtacgtacactgtaaattgaatatacgtacacagaagaaatttaataaagtgtataattgtaattttccagtcatcttcaacctgtgtatccttttctgcaaacctaattttgcggccatctttactagttttctcaaaatctcattttttatacgttttaattactatttatatataaatcttgtaaacctagaatatctttagtttaaaaagctaaattgtttgaatctctgagatttgttttttcaatttttgttcatctctgaaaacaagaaatttcttcctcaattttggagttcaatggagaggtgcgaaatatgaagaagtggataatgaagtttgaacttctttctacttctctttcaaatctctccatctctttctcttcctctttttcttcttcttcggtttcttcgtttcagttttttttttttttaaaaactgaaccatagaaactaaatcaaaactaactgctgtggggtttggttgatcccattaagaatattttggaccaaaaaccattcaaaagacaaacggtgaagaccacatctcactttgcaaaatcatgagagcaattcttttttcagcctgtgaaaatttcttttttataaatgggtttgtagtttcgaataaagttgaattcttctgaatatttttcttaggtttcacatgggtttttgtaatttttaactgactgtaaatatttttgaattttgaatttttttcagcatgggtttgtgtaatttctaacaaagttgaattctattgaatatttcgaatacttttccatatgtttccacatcgtttagtgtaatttctataaaagtttaaaatcttttgattaatatttcaatttttttaggtttttgctccgtacgttacctattgggtttgctgtgttcatggtccatttggctactatccccataactggaactggaattaatccagctaaaagctttggtattgctgttataaaataaaagactttatttgtactaaaataaagagacacaaccacattttgaactatctttaaaattatagaaagactcagactatttttatttatgctgatttaagcatactaacataaactagctatcaatgcaagagagatacaatctggtgaagtttcctcgtttggcatgggaccctcgactggcgaaccctcccccggtgtagattgtggtggttccacggtttctttcaattcagctggactgtcaatctgtcattaatctctggtggttgctgagacgactcgtctcgagcttctgccgtcgtctcctgcgccttttccgccaacaccgtctcaagagtagctaacgccggtttcaaaggaggaagcttttcatcggcgtagtaaaccctaagcccaatctcacttgcacaagattaaacaaactcttcttctcctaaggataatatatcaaagcctcttctcctttaccaacaaactgatcggacacaagtcggatcctacggagaaaattgttcttccgcgtgtgaccaaagttcttgtcatggtatattgaattaagcttgaagttaacttaagcctcaagtctttaaagagattaggactagtaactttagcagttatctaaagttatatttaggagttatctaaataagcgttctagtaggattaggatttctttatgagagactcttatataaggagatgctaagttgtagcataacttatgaggttaagagtttgagagattaagagagtttaggttttgagaggtttttctaagctaataaaagagaggttttatttgatctttgagttcttaatcttcttttaactatatttggtttcagagtcttgtagtgtgtttgtgagatcataagaaggaacgtgaacaaagaagatgtccgaacttaccgtcacaacgggaagaccgaaagaaggaggaggatcctcatcaatccagtgctcatgcttacctcgataaactacacatgttgggctataaagatgaagattgcactcaaggtacacaaggcatgggagatcattgagacagttgaaactgatagcgagaagaatgaaatagctatgcacttgcttttccaatcaatacccgaggcgctggtcgtaaaaattggagagctatatatgagttatgacaaagaaggtttgggaagcaataaaagcaaagcatgtaggagcaaacaaagtaaaagaagcgagactacaaagcttaatcattaagaattcgatcgcctcaagatgaaaaactccgagactattgatgccttctcagaaaaactctctgagataacgtcgaagtcagctgcattggggggaaatatcaaaacttatcaagacgtttctgaaaagcctcccgcgtaaaagatatatccacatcgtggcatctctcgagcaaattttagatcttaaaaccacaagttttgaagacatcgtcggacgtcttaaagtttatgaagaacgtgtatgcgataaagaagaaactcaagacaaccaaaaacaaactaaggtacactaatacgaaaacaaattatggaaaccgggactaccatggagatttttaaaacagaggacgcggtgatgggaaacgttgctatattatttgcaaacgatgtgagatggaagatgaaacaattaaacgattaatgtgggaagaacctcaattggaaccgattgaacttagcactactacggaagttttggacagccgaattcaatctataagatgcgggattcaatctatcatatccaactattcggagtggaagcgtttatttgggaaatgaataatatcctttcaagaaggattgattgtcacgtgtttgaaacagaatgttcagagttagtctcgatggttcgatctgtcacatgaagaatggcctgatttttcgaatctgctagatgattttggattgctacgacccgtctctctttatccttcttctcgcactcttttatttctcgtttatgtaatgttcatgtggactatttagacggttattctagagtgttatttttaaaaattattttggtaaactctattcttcctaatttggcaaccaatcatgaaattattttttaattaacatgtggttgacaaataaaaaacataaaagtgtttagatacttagaatttataataaaataaattagttatcaccaaatttagatatttagatatttagaatttataataaaataaattattttatagaaactgaaaaactaaactaaaatagaaatcatttattaaacaatatgaccaaaacaatttccatctctttacttgacatttacacgtaaattaatagaaaagtaaatataaaaatgataaggatttataattaattataaaacagaatataattaattataaaatagaaaaatattctattttatgtaattagatgattactttaaaaaactaaatcatgttagaaaaacaaaattatgttaccttatatgatttaatacattgtaaaaaaaaagtaataatatgtgtttgatttaaatttgaatatcaagagttagcaagttgtcaaaatatagacaaactcaacaaatttatactgcttcactgattctctatttatattacatacatacatcaaacatattagtgttaacgaaatgaaaaatgaatttcaagtatacaatttaatccgtccggatcctacctaatttttgttaaaaggaaaggggagattggagaacaaaaggcttgagaataaattgcaaaccatatatgattcggtttagactccatgcctagtaggattatgagattgtaataagataataacgttgtagaattcatattgggaagccctatatgattcggttcactggttgcgttgcaaatattctacgaggtgatttggtttgagacttgagagagttataggcaatgaggaatgaagcccaggccctgtgatctttttactatcttactaagcaaatctaagctaattgtaaaacaagaaaacattttagagagagaaattcatagatttgagatcccataaatagagataattgatgttcattttggtaataaaccccaaaaagaaaagtcataacgttccgtcaaagaaacaaaagtaaaggcctagtagtacggcccaaatacttttggcgggagttagaagaaaaataaaaagtcaagcacgaaatgtgtttgatggaatgccaaagcgagagagagacaacaatggttcaagaagaacctatgaaactgagaatcaccgaagttgttgacattgaaagaaggtggtgagctgtcattctttttttccttcttcttcttctctttctcctattgacattgttggaggtctcattcttcttcatattcttctttggccttcgattcttcttcttaggctttggtggtttttcttctactacattagctttggagtctaaacacataggcataataatttttgagtatataatttgttgatatgaatagttaaatttttgaatttaaataatatttgtattaactaattaataaaattattttattatcgttttctgaatttttaattacaattttcttaagattttgggcatataatccaattattccttcgaactcacaattatgattcataacacatgtataagagttaatcaaaattgtgatgtacaacacatgcacaattcgagtcattaacttttggcgtcaacttgctgcttctgtaagtacaaagcttaattgctatacaaaaataaattgaggagaacagataaatatcaaagacatctcgaccgaacctaatcaatccaacaaaattctacatactcgatatccaaatttagcaagatctatgcgattcaagtgtcttgaggcataaaagcaatcacagtgaataatcgaatttgaagtcaggatcaacaaacaaatactaacaaactagatctaggcatacctatatagaggctgggatcttcgttcttcaattcatgttaaagaatttaatagccatcatcttccaaaaaaagagtaactagggtagaaaaaataatcgaaaacataattcaaaataaaatataattatgaatctagaatttcaagtctattttaaaacctctataaattaatattcgataaattaataacctctataaattaataaattcttcctgtcccgagttgggaccagtgtataaatgtatacaaatcgataaattaataagataataatttttttgaaaatcctatgtaaatatatggtctcatcaatattatgtaaaacttagtaaaatatgactttagtattatttttcttcaatttatataatttatattaattctgtgtaaaatttaattctaattattttactacgtataaaaaagttttttttttgttttaaacataataaaggttttctacttgtaattgatttttagaaaaattattgagtgtatagagaaactaccttttagatcaaatttttgtaaaaaattacaaatttgtaaaatatctccataaattaataattattaatttatcgataaattaatatctctctaaattaaaaaaaattttggtcctgacattattaatttatagaggttttactgtagttacaaactgcgcatggtttgtcaaattctaaaacatgctttgtttattttgaaaataaaataaaatgatactagatgaaacaaatataatgaaaaggatatttaccaattgattattcttatatttccatatttttttattttagctactatttttgaaaacttccattaactctttcactaagagctgtgatagtacacaaaaaaaaaagctgtgattcaagtttttctactcataaaatatgtctttgattttttgtagtaattataggccgtaggccaatctttcaatatcatacacgtaggcacgggctagtgctggcccaaattggagatggtcttagtggttagaaacgaatgtttaaattcttaattaacttttgtaaaacaccagatagtttgtaatatacgacgagatagttgaaacttatgtccaaaaaagaaacaaaagaaagagagtatgttcatatagtaatagggaaaagaaagaaatataaccgttggtgattagtcatttagttggatgacaaatctctctcaccttcacatggaccaacggcttctatgtcccaccaatttgtactctcaatctcctttaccttatttattcattacaccaaagctacgacacgacatggcttttgttttattttcattatatttatgttatttaatgttacagtacatacaatatttagcttttatgtcatgcattggttattagtattttgtattactagtaagattgaaaacggttttaagaatgtaggagtgtgtttcacaaaattgagagtattgcaattacatgagagtgttcagacttcagagtattacaaacctaacaaacctggatattgtgatatgactggcttttaggttttgtaggtctcccatttgattataaacaaaatgtatttattacctatattccaaaagtacccttatgttccatgttctcttcttataaagcaacacacaagatgcaagaaatctccataactagagagagaaactaatctttttagtgagagagaaatcttagagctgagctaagaaaaatgtcaaaagaagtgagtgaagaaggaagacatggcaaagactacgtggatccacctccagctccacttctagacatggctgagcttaagctctggtctttttacagagctatcatcgcagagttcatcgccactctcctcttcctctatgtaaccgtagctacagtcattggccacaagaaccaaaccggtccttgtggcggtgttggtttactcggcattgcgtgggcctttggtggcatgatctttgtcctcgtctattgcaccgccggtatctccggtaaatatttccacaaaaaccacaaaaatttccataaacttcagtttcaagatcttaatatgaagttgtttagcaatgatacatttataattcaaagatacatttttagcaagtttttgtttggtaaaatacctttttagcaagttggtaaaatatttcaacaaaactttatcctaaaattactaaaccttaatcttcaacaacttaatatggagttgttaacttgcaggaggtcacattaacccagctgtgacatttggtctgttcttggctcgtaaagtgtcgctccctagagcagttgcttacatggtggctcagtgtcttggagccatttgtggagttggactcgttaaggcctttatgatgactccatataaacgtctcggaggcggagctaacaccgtagctgatggttatagcaccggaactgctcttggtgctgagattattggcacatttgtcttggtttacactgtcttctccgccactgaccccaaaagaagtgcccgtgactctcacgtcccggttagtaaaactttgcaaaccagttttgtataatttataattattctaaagctgaattttttactgttctttcatggtttcaaaatgtgattgtgtaatttctaaaaatagttattcttttctaaatttttcatagatttcatgatgggtttttctttactgttttttcatgattgaaatttttgaacatatttctaggtatttaggtttgtgtagttaataaacttgaatttttctgaatatttatcgtagggtttgacatggatttttgtaatttttaacaagttgaattcttttgaattttttttcttatgatttcacatgggtttgtttaatttctgaaaaagtcttttgaatatttttatttttataggttttggctccgttacctatagggtttgctgtgttcatggtgcatttggctactatccccataactggaactgggattaatccagccagaagctttggtgctgctgttatctacaacaatgagaaagcttgggacgaccatgtaaatatagttctctctcattaacaatcaatttacttatttttttgttgaataattactaattaagttttgggttaatggatttgaatttttagtggatcttttgggttggaccattcgtgggagcattagcagcagcagcataccatcaatatatcttgagagctgcagcaatcaaagctttggcttcattccgcagcaacccaaccaattgatgattcatgagacttcttagaacaatttgagatctttttttttgtgtgcttaatgagagatatttgtgtgttttaatttgatgtaatcggatttattcattttcatagtttaatttggtttaattcatctttgtccgttgctttctttcatgtagggcatcttatgattcacttttatactttagtacgaattaaaacatttgttacaagtttatatgaacccacatgcatgttcgtataaaacattccttggtgtttttgtcttatgttacttgattcttcttatccggtggtcggatcataaaccactcacatatgacatattgacacatgttccttagttagaataataatagactataatagctaaagccttggggcatgcaataaggattggagtttagcaataagcattatcacgtctcgtcttttcagaattgtagagacagagaagtgtgtgtggtccttctgataaagaggtcaaaaatttcgaaaagggctcgaaagcagacggagatgaagagaaaaagataaaggaccaccacactaaagggtccacactcttcaccatagaccactttacacattagtctatccatctcgataataaccggaattcgtacccaaaccttaaatttaagcagatttcttcaaaacattttcttttaccaaagttgtgtgtcctcgagtttggctacatcagctgattctatttttgacaaagaaacaaagagaaaaagtaaaaagctaaaacttttttcttgttaccgtttgttctctctagcgagagctggtacagaaattttgtttgaatttcaaagtgggctaaagaaacgttcattctacaatttagttctctcaagaaggataatttaaggacaattaatcagacaacagcatagtttactttcgaaccagaaatccattcccttgtttccaacatgtgagctcaagtagcttagtcgggtaatgcagttcctcgttccaagttgtttttgatctccagcgtgtatttcccaaacgcacgctcgattttcttgttgaaatgctcgtttctgtcgttgatggaatcgatatccttctcttcccggaacttcctcctcctgctaaactcttgtcgcttttgctctctgtctaagagctcttttgccatcttatctatcttatcttgcgaagtttttggagcctgcaaaagtttaacaaaggattgagcttttctatgactctttactttagatttgagtctctcattgaccaaaaacgacaaatcacaaacctttccatattgcaagcttgaggcctcacggtaaaactctggatcagctgctctcattctgttatactcctccagatcaacctgaatgttctttgtccgtttcttgtatgcgttgtataacgtcttctggttaaagactgaagataaatacaacatttcacacattagcctctcaataattgtgtaatcatcgaagtgaaacataacaaatgagaagagacaagagtttcaattcagtacgaatttcacgtaccatcccaacccgcaggcgtaggttccttttcccattttttgtattttgattcagctgcttcttgagtatcgagcatataagcctgtgtcatatctaaaccattagcatcaagaagtttcccaatctttttcttcctcccctccaaccatttctgttttgagattccttttgtctctgttggtgcttccattttcttcttttcactcccgacatccgtctgattggattttcttgcttcattctgaaacaaaagcgttatggaagagttacatatataaaacgatctttggattctttaaaagaattactaatgactgtacaaaaagacttaccatcttaagtctcaactcaaacaacttcttttgtctccctgtaagttgagttacatctacttgaggttcttggttatcctcttcctcctcttcttcttctgaactatcttcctctattcttttatcatcgagcggctccctcgtctgctcgtgaactttagctaatccttttggtacatgaaaaagaaaaacaagtctcagaatggtaattcacactcacttcttatcagaactacatgaacatttcataagacatgatatcacaatgacaagtaacatgtctctatctgtttctgcacatagtgggtggatcacaaaattgaaactaagttgcattgagacaacaccagctttatgtgaagatttactcataactctaataataaacctcaaaccgctacgcttacgcatcaaaaatcataaaccataatcacgggaaacaaattcacacagatgatacatacaccgcaaactagtattctacttctctctacttctctactggcctttgcttcagcaattttctcaaagcaataactactccttcactcatttttaaatagtgagaatcacagaatagaaactcagtagcattgaagcatcactagaaacttaatgtgcaaattcactaacagatctcctctaaacgaataacctagcaagtagcaaataatcattaaacctcaaaacagctactgctacacatcaaaattatagacctccatgagaatggacacagatgacagaaacatcaagaacagctaagcctcaaaaaatagaaaaagaacacaaaccagtgttctgcttctcgaatctggcctttgcttcagcgattttcttaaagcaatactcgacacactcgtgataaggatttgaagcgtttatacaatccggatgcactcttctctcactaaccatacttccaagcgttaagaaactgcaaaataaaccaacagaaacgccaataaagttatccaacagaaacgccaataaactgcaaaataaactcttctctcattgagatttaagaataatagcaaaagaggcacaagaagcaccaaataacaacaaagctcacacattacgatgatgtaaataaaaatcttaactgggttcaatgaaaaatccctaatttgatgcaaatttgtagctaaactatataacactacaagttgatgcaaacaagaacttaactggattcaatgaaaatttccctaatttgatgcaaattcacttaaatattaaacctaatctgttcaaagcctaaaacaggaggtaggaaattgtagattcatgacctcataaatcggaatcaatttcgagattctgtgtatttgaaacactatgttaaatacgtaagatttttcccaaaacctaagaacaatggaaacaagtaaaatcatcttctctttggttttctattcaaaaaccaaacgattgaaatcgaagaaacaatctatagaatagagagaagaaacactccaaactgaaatcgaatcaaaaaaaccaacctgtgaagaaacaattcggaggaatccgcaagtacgagaagaacaccagatatctcgcggacgataatgattttttttttctccgctcagtggagaagaatagaggagaaaaaatattggaaaatattaattatagatgggcctcttaaatttgacttgggccaacaaattttttaaggaatttgacatttgtttttggtaagtttaaggaatttgacattaattctagccagagtatacaatttgatttttttttaagagaaaacaattttaaaagttaattttgtttttggaaatttatcttcataaaatttttcatatgaaaatatttatttgaaaatatatttcgctcttgttgaataatttcaaaatgtttttcttactagagttacaaaatgttataattcataacaggaagaaaaaattcaaaaatttcatgtttgcataagtaaagttatttattgtatgtagtattggtatctctatatggaaggggaaaaaattagtcttaattaatatgaattcttgtagaaaatgcctttttttaaaaattgttacgaaaatgccatttttacttaaatcaattaaaaatttgtcattttaaaacttagaaatttacgtattttataccaaatactaaaaccgaataataaatagaaccgactaaacccaaacataacaaatacaacgtatgtttaatcataattgtgttgcttgaaaaaggccaaatccgcaaactattcaaaaaatgccaaaatcaacaaatacataaaatggcaaattcataattgattctaattaatatgctcaatatgttttcaatggtgctagaaaaaaaactaacattttttgtattttttatgattacttcattcaaaatccatataatggcattctctctcctctattttaaaaaaaaaatatattttccaatcattttattttcaaatgttagtttaatattagtttctatataaacacataaatatattcacatggtaaaatcaacattgtttataaaaaatataaaattagatctaaaatataatttaattcgaaatatataaaccaaaattcagctaaaaagcgtagataaaatcctcataacggtttaaggaagaagactaataaggaatataacagatttgataatctattagcgtgtaaggcttaccaaaaaaagcggcgtttaatcacttgtttgattgcaccttcttctttaaaacttaatcactttttggttatatgtgtatgtctaagaaataactatgtaatctttgtatcaattttaatcaaataaagcaagatgtaagacaatagatatatatcggaatcctcgttccatagaaaagtgaaagacattattatttgaataccatttaacaaaaaatacgaaagaaaagtgagattacaatgtttaccaaaaaaaaaaaaaaaaaaaaaagtgagattacaaatagaatgagttcgattatatataggagttagttaggacccatgccagatggcccacgccacacaggattagcccatggtcacgtcatcatctttcctagtgctgtattcgtgaagaactcctccatctatggattctgtcgtttccttacccaacacaagctttcccatgttcctcacaatattggatagatcaaagcagatgcagagccaactccaacaatctataggtttctcctttccttcaacattgtctgatgccgagtccaagctcactgtatgatcattgttgttgtcctcatcgacttcaataatcctgttatcccttggcaaaccaaattcctcttttagtaaataaccaatcatttttttctgtttccttttatgtaagcaagctttcaaaattttggcatgggacctgagccccctagagacggtcttcttgctgcttctctccggttcattagtcaagattcgtacaccacattcgagaatcttgaagttatcaaattgattcgaggcatcgatgcagaattcaaacaatgcctcgttgctgctaacttcagacacgctaccatgaaatatacacaaatgttcggtttgaattctggtcgattcatttgggtgttctacgcaaataactttattgtaactgcctacgatacaccgtatatcagtgtgttcccatgagtgttgttgctggttaggtgaaatcacgacgcatgctttaaacttgaaggatgcagaagaaagacgaatgttcaaggaattattaccgctagttctttggttgaactcatcaggcattactcttcccggtaagcatgcatacccgtcaagaaactgagtcgcgcatcgttggatgattagtctccttgattcttcaccaagtttgaagcagttggtgaaattgagtcgcgcacttggagtgtttaaagggtatgttattatctccagtgattcacaatctaaagccactaagagtccgagtgacatagggagctcaggcaatgatgtgagttttctgcagccggctacatcaagagactttagcccatgaaaacctttgatgcaatctggaatcttctcaatatcagtatagcttagatctagcagctctaccttctctggaaaatatgttaagctcttaagatcttcattgttttttatacaaaaatccgaaagagaagaccaatgcctgattgatgcaggcacttcttctaccgatgtgccgattagaaggagtctctcaatgtttgtagaaaaatctggaaatgttttcagtcgtgagcatccagtcatggtgatatgctcaagagatgccaagttgatgtgagttggtatgacttctagacttatgcagttagccatcactaagttctctagtttatgaagattcccaatagactttggaagctctaccaaagccctgcaatcacatagttccagtctctccaggtttgtagcatttgaaagatctgggagttccttcaaatgaactgatcttgacaaatccatcttcttaagatttgtcaacagctgaatgtcaaatcatagaagagagaaggaacatcagaacttcaaatgagaaacttcttatttcatatgttgctatttaactactgctaaaatgaaaacacagaatactatggtaactaacctgagttccttcccagagcttttcgagctggctatctttcatattgagttcgacaagattttccaggcaaaatccaagaggaagactcttgctcggatatgcttcccaatgtagtaaccttaggcgaggtggaaacttcatgtcctcaggtatatgcattatattattcccatcatgtcttgtcttgtaaacacttaggaatcggagattagacattcttctaagagctctattgcttaaaatcacttcgctaattcctgatgtatcaaatgatatgccagacacaactccagtaccctaaatcatgttttgaatataaagaaactgttagtaaaataggtaagattatttttaaaagtgtaaaggtttccttagaaataacttactttatcattttcaaggacataacaaatctcttgagcattagttaagatcaagcgtttccaaggctcttgtctgttaatggcttgtctgcccacttgttgtagcaacttgtgcattcttatttccccagtggtagatatatatatgagagatttgtttaccaagattttcaacccgtgtgcgatatccaagttatcgtcagcaagcatggctttcacaagatcaacatctttgcagttgaagaagactgcaatgtggagaaacagagattgctcattctcatgtaaactttcgtagccaactcttagtacgtcttcgatatctctatcaataatagtgtctagccttcgtatcacagatttccattcgtcctccttcttcccacgtaaagatgaaccaaccacacgtagacccaaaggaaggttaccacaaagccatgttaccttttgtgcaagatagttaaaaccaggacgtggagagctttgtttaaaagcatatccacataagatctccatagctttttcgtcagaaggaaagcccacatggtacatattatcgataccatgccgctgcaaaatctctttgttttctgttgtcacaataaccctacttccaggaccaaaccaagtagtgtcattagccaaagcctctaattgcttcacatcattcacatcatcaagaatgataagcactttcatgtcgcataacctctcttttaccgcacctaaatggcttatcctcataccatcttggttcaaaatctttgaaagaaggtgttcttgtaaacgcaacttcaaaccatactcatcaataccaatgggatagcttcctctaaggttatcaacaaaacaagtaagctgaaacttcttaaagagtagtagactatgcaaagctctcgcaatagttgtcttaccaatacctgcaggaccaaagattccaacaatcttaactccatcataatcaaagtctagcaaaacctccatctccttcaaatgagcttcaatcccaaccatgccatcaaaatcactagacggtgtcatattcagtttttccgatacatctcttgcaattttctcgatcatctccgcttcattgtccctaacaaaagagaaacataaatattgttcccatcaaatcatagaagtatcatttttgattaatcacaaaccagttaaggaagtgttctccggctatgtttcccacaacattcaaagcttggctccaatttcgcctctctttctctgttctacgagcacaagttttattgaaaactgttccaaattcaccggtttgtttgcggacatcagatggatctactccgtagaatacagtcatcacaatttgcccaatatcttccctgcacttcaaaatctccaggagctcattcaaacaccaagtagaagaagcatagttcttggagagaatgacgatcgagatcttcgattctctaatcccttgcgtgagtgaaggagcgatggtttgacttctcacgatcttttgatcatcgaacattgtaatcccattgcagatgaactgtttgcgaaaatgactcagaaagcttttacggacgtctggtccgtggaagctcgcaaagactcggtaattccaggtgcgagacgatgaagaagaagccatgagatagagagcagcgagaaaagttgaagctcagaagatgtacaaaaatggagatggcctattcattgaccgttgacgtttgagaaagaacgatgaagttctgtttcgagaaaataattctcaattggaacccaagttcggtttaaaaaacaatatcggtttatgtgggtaatttcggtttatgtttggtagttttgatatatttcggtagtttttggagaatttgtcacggttaggctcggttttaaacccaaaaatggaaacaattcaccaaaattataaaaaaaattcggtaacccgatcggtccagccttccgaaccggtcaccgattacaaaaaaggaattcagatcgtttttttctctcttttgttgtcagtaaaatattatacgtacgagtacacgacattttgaaagtttcctgatatgttaatacacaattttttaatcaatctaaacataataatcatcatcatcacataaaaactacattacaatgtctttctgtaacaagtaataagtatgctttgagaaaatcgaaatacaaaaaagaaaccacaaaaaaggagtttctccttcaactagtgtaagatctagaatgctcctttaatcttcctctactacaaagttcatctattacatctgaataagcaatagcttcagtgttaagttcctcctttgattcacttgttgctggatttttctctgtctctacctgtaaatcccgcttcatcgatccaaactttccggaaaatttctttaacaattcatctgtttcactcagcttaccatcttccataagcaaactgataaaactgttgtatgtaaaccgatcaggctctagtcctttctcctccatttctgatagaaggtcatatgcttcttttaacttcttgtccttgcagaaagccgagatcatcgtgttgtatgtaactgtatcaacctctctctcctctattagcgtgttgaagaaattgagagccttttctgtcataccttccttacaaagaccattgaggagaatgttgcatgtatagttatcaggcttgaaagagtgtttgatggattcattataaaactcgaatgctttctcaactcgtccttctttgcagtatccgaggatgattgaattgaaagtactgtcatcaggaagcaaaccactctcagcaagctcatcgaatttctccattgctagctcagtttttccatggtgacagagacctccaattaaagagttgaacgtgctcactgtaggagtaatctttaccttcttcatctcatcccacatctccaaagctttctccactttttcttccctgaagaatcccatgattaatgtgccataagtaacctcgtcaacaataaatcctcgtttgtgcgcactattcagcaaattgtgagcctcatcaagtttcctctccttacatagagcatcaagaatggtattaagggtaatagtattcatcttaatccctttttgccccatctcacgcatcatctcaagggcaccactcaaatctcctactttcaaatacgctttaatcagagtatgataagttactatatcaggagaaaacccgtgcatgtccaccaattccttaacctttctagtaaccgcttcccttttctcttccttacaaagccacttaagagagatattatgagtcacttggttagctttgactccatcattttccatttgctccatcaacttcctagcctccaaactaagccccaattcgaaacacccatcaatcaatgtattgtaagtaaccacatcgggctgtaacttcaaactcttcatcgcatccattaattcaagaccttccctcatactccccgcattgcaaagcccattgatcaaaatgttataggtacaaagatccggtaatacattagtttgcttcatcagctccacaatctgaaatgcttctttcaacgaacctaacttacagtaaccatacactaaattattataagtaaccctatttggcaccaatccattcttcttcatatccaacaacaattccttaagatcactcaaacgacctttcttagacattgctttcaaaatcgtattgtaagtaacattatcaggattaaccttgaattcactaaccatcctctctaacattcctaaagcatcctcaagcttaccttccaagcaatacccattaaccaaaacattgaaagtttgcacatttagcgaaacaccaatcttaaccatatcatcaaacacttctctagcacttgagatagagaagctagaagggtacctgactaaaccaatgagaagagtattgcaagtgagcagatttggcttaagctttaatcgaatcatcttctggaagatctgtaacgcaacgtgaggctttccctcatgaagataagcactaagagcaatgtcgaatagagctttagaaggtggaggtgatagatgaagattcgggtgaaggagagagttgcaaagagagagagatgcatcggaggtgcggatataggagacgagaagagacttggcgtcggcgaatttgtggtgagagagaagagaacggacgacggagataagtggaagaggtgaatccgatggaaatgcttcggggattgaagtttgagcccattggaagaaagatactagggtttctggtttcttagcgagtgaaggagaagagaggagagaggtaaggagaggctgtgtgatttgaggaatgtagggatttagggtttcgaggaaatgggttttctctgatgtgaggattgatgttagggtttttagtaattgagattcgggtggctttaaagtcgccatttttgttggcaatcaatggaaatttatctgatgatcatcctcgttgtatcgtcaagaagaagaagaagaaagctatgaagctttttcactgtgatggtttaaaactgtgaagcgtatatttaaccgggattacaccgaaccggaaattggagaactcgggttttcggcttaaaccaaacgcaataggaccctgtcgtttcatgatttttttttttttcattggtaaaaatcatttcattctcaaatgttttggtcatgctacatagtacatacgaattttcgcatgattatttttcttataatttatattttaaaaaaattggatcagtaaagtaaaacagatttctttttaaattaaaataaatttatttgttttaattattattgtttattcttaggtttactgtatgacattcatatttctccaaaaccttattttgcgtagctacagacaaatagaaaaaaataatttacttatttacaagttagaaaatatcttttgcgaaattgaaatgttgataaatgtagtgattatattccaataaaaaaactaactgttgcatttgtgttttcatccctaattacaatataacgtttaagaaatgttaagctataagttagtaaaattatattttatcactaattcacaaacacgaactctagtacaatagcactaaattcgatgatgatacgatagcagcacgaatacaaaagcacttaattcaaagttgtattaaccactagattataagtttggtcagtgataaactaatatttacattagatataagcatttgctattcaattattcagcaacatctaaatctaagtattgaaggagcattatatattctatgtcgacgacaacgaaacgagccaacatgacatgaagctaggatactttatatgttatataagttataaaatgagcttctagaaaaagaagtaagtgtatatacgtatctacagaaatatcttgtagataggtgttgatgtagtgcaaaaaagtaagtctaaagactaaaagtgaaaaggacaagaaacaaaattttcaaaatataaaactaagaaagaaaaacgaacggcgagacattgcctagaacgcgacattgtcactgcaagaggctgtggctagtacttggctctaatgcaaaagtggggcgaaacgatagaccgtcgtagtgacttttgtccatgtcaattgcatcatcatagtgtcctttctataaagtcataataataaaagaaaaaaaaaaaaaagatttatgatactacttagagtttgaagatcatagttctttacaactatactttaagtgaacaaatagcgtatatatacgtatatttattcagtgaaaatatgaatatagtgtatccaaattatcatcttttaatatatttttcctcttcgtcaatttttgtatttgtttatttgatatatagtctttctagagtattggtttctagaagaaacttctgggacattgcttgcttccgtgagaaagttatacgtaacacctgtcttgcccaaatctttgtgattctttttcttcttttcatctaggttttacgtttaaacttacgcatgcatgagtgatattgatacataaggctataagcattaatcattattaatatatgggaaattactcgaagtgtcagctttggattatcactttcttcttcttcttctttttgatttgaaatttgatttgaaggtgatttcactgatatgtaacaaatgagtattttaaaatgttaatctttagataaaaattttttttgtcacaaatataatttaatttaagtcacaaaatatcccacataccttatgatgtctattattaccctatatgtatacgtaatattaaacttttatttaccctagtgtaatggtttttgctatcatcatcgatgtgtctccactctctacctaaattcaactcgataactaagttcgtacgtaaactagaatcagttgaacttacatatacagataaagtattatcagatgacactgttctttcttaatattaatgttatgacaactccactcaaccaatatacttgtaacttaatatgaattttatgtatatttttttttttctgtttaacattaaagatgacactattcgtttccgaatttatcctgtcttgtagctgattaatgtttgacacatacttgtataattagaaataatggttccctcagtttggttttcaaactcgagttttagcttaacttgtgtcgatgaaaataaactgtacacgtatgtattaaaatatttatttaaagcaccaactaaaatgttatgctatttgataatatccaaataattaaatcaatatcacgattcacttcctatatatatagggcttgcggaccgaacaacatatcgtgagaactaagaaacacccaagaaaacaaacaaactttttaaaaaatgtccgtttcaacacatcaccaccacgtggtcctcttccctttcatgtcaaaaggccacatcatccctctcctccaattcggtcgtctcctcctccgtcaccaccgcaaagaaccaaccatcaccgtcaccgttttcaccactcccaagaaccaacctttcatctcagacttcctctcggatacgccggagatcaaagtcatctctctccctttcccggaaaacatcaccggaatccctcccggcgtcgagaacaccgaaaagctcccatccatgtcacttttcgtccccttcacacgcgccacgaagcttctccaacctttcttcgaagaaacactcaagactcttccaaaagtttcgttcatggtctctgatggattcctctggtggacatcggagtctgcagctaagttcaacattccaagatttgtctcctacggcatgaactcttactccgccgctgtctccatctctgttttcaaacacgaactctttaccgaaccggaaagtaaatctgataccgaaccggtcactgtaccagactttccatggatcaaggtcaagaagtgtgatttcgaccatggcactaccgagccggaagaatcaggtgcagccctcgaactatctatggaccaaatcaagtcgaccaccacaagccatgggtttttagtcaatagcttctacgagctcgagtcagcatttgttgattacaacaacaactctggtgataaaccaaagtcgtggtgtgttgggccactgtgtttgacagatcctcctaaacaggggagtgctaaaccggcttggattcattggttggatcagaagcgagaggaagggcgtccggttttgtacgtggcgtttggaacgcaggcagagatatcgaacaagcagcttatggaactagctttcggcttggaagattcaaaggtacgtacgtaacgtaccacaactaatccaatgaaatggttacaaagtttgatgtctatattcatctatatataagcacttgactgaagcgttcaaggaggttttcgacacattataattaggtttatacacttaagcagacagagtatatttgtcaacctaattgcatgcatgcctttaaattaatataataggtgtgactagctacgtacacacacaagttggctttcggtgtggttgaaaagtgtttacttttatgacgtgtttgaatatataagctaagtttcttgtggatcacaaaaaaaggcgtggaagagctaaattttagaagtatatcgatgcaatgaaatagttacaaaagagattaataaattttttattcatctactctaatatattaatagacatatcctgctttcgtctacctaattccttgactttaagtctagaattcgacactaaacaaattaggcattaattgtaaggtatggttataaatgcatgtcgagtaaaaagcaattttatatcatgacgtgtttaattctctaggtgaactttctgtgggtcacaagaaaagatgtggaggagattattggagaaggattcaacgatagaataagagagagtgggatgatagtgagagattgggtggaccaatgggagatattgtcacatgaaagtgtcaaaggatttttgagccattgtgggtggaactcagcacaagagagcatatgtgtcggggtcccattgttggcttggccgatgatggccgagcaaccgctcaatgcgaagatggttgtggaggagataaaggtgggagtaagagttgaaacggaagatgggagtgtaaaaggttttgtgacaagagaagaactaagtggaaaggtatcgaaatagaaaaacatatgttgagtttagaattatgtgacgagttagggttttgtttttgtcttctaagtggtaataagtatttttatttcacagattaaagaactgatggaaggagaaacggggaaaaccgcaagaaagaatgtaaaagaatattcgaaaatggcgaaagcggctttggtcgaagggactggttcgtcatggaagaatttagatatgattcttaaggagttatgtaagagtagagattcaaacggtgctagtgagtagagtgattaagaattgaataactgaaccagtctatacgtttactaattaaaacaagtattttcaatatacgtcttgtgtaagtcttggtttagttgaaaagatgttatcgattacaataactgactctctcatttgataatactgactatgattaatattacccatgaagctaaaccagtctcatgccattatgggcgtaatttcttgaaagtgagcagatttggttctttgatttttatatttatttcattaccattttttcttttgtcacagatatttattcatttatctttctttcttttttgtcaaagatactttttcatttatctttcaagatcattggtttctagaagaagttttgaagaatctataatatatggactctgccacttcacctgcccaaaatctttgtgatactcttttttcatatacttttatttatccaaattaccatttttataaaaatatttttcaaaagaaccaactctctttacagcatttctcatgaaaatatttcactaatgaaataataatattttatatttatttattaattaatgaaattctgatttgttaaaagttttgaacaaatcaacaagagacaaataactagaacaaatcatgcgcggattcttgcatgaaatgaaacttgtgacatggacacgaatattctaggcactaaactaacgatttgttatttttctagtaaattttttagtgatatgttatttaatatgtaattaatcttacattgtatgcccttaacaatgtcataattcataaatatgaaaaccttttgagaaaaataaatgtatattacatctatatatagaagcttgtgagccacgacacagcttagataacaagaaacaacctttcatctcagacttcctcctcttgtacacgccggggatcaaagtcatctctctcccttttccggaaaacatcacccgaatccgtccgggcgtcgagagcaccgaaaagctcccttccatgtcactttacgtacccttcacacgcgccaagaagcttctttgttcgaagaaacactcaagaaccttccacaagtttcgttcatggtctccgatggattcctctggtggacatcagaatctgcagctaagttcaagattcctagattggtcttttacggcattcactcttacgccgttgccgtcctaacctctctactttctaacacaaactcttaacggaaccggaaactgaatctgataccgaaccggtcactgtacttggctttccatggatccaggttaagaagtgtgatttcgaccatggtcttaccgatctgaaacaatcacgtccagctcaagaactgttcatggaccaaacgatctcgaccaacacaagccacgggtcaacagcttctacgagctcgagtcaacatttgttgataacaacaataactctgatgatagaccaaagtcgtggtgtgttgggccactatgtttgacagatcctcctaaaccggagaatgctaaaccggcttggtttcattggttaaaccggaaacgagaagaaatgcgtccggtattgtatgtggcgtttggaacgcagacaaagatatcgaataagctaagcagctcaaggaattagctttacggcttggaagattccaaggtgcgtactagaagtaaatatcagaaatatgtaattatgtggtgcatatcaaatgaaatttattgaaccgttcatctatgtatagaagcttttgatttaaccgttcaaggaggttttcacacattaataaggagttttcttttttccttgtccatgaccagccctgaatataatgactttaattatagagtgtaccactacgcaagttggtgttaacaaacacgtgttttgttaagttaggcattattgtgaggtatatatgcacacgtcgagtcaataatagagaaggtactataacaaaacaacaaatgaaatgtattgaccgttcatctatatagaaggttttgatttgaccgttcaaggaggttttccacacattaatttctttttgtcaatcaagtttaatttatggcatgactacacaagttggtattagttaataattgtgtatttcggatttaaaaaaaaaaagtgttttgattctaccgttacgtttttcgtcgacctatatcgtctagaaaacgaaactatacaatacaagttaggcattattgtaaggtatggttataatttataacttataaatgcacatgtcgagtagtaagtatttcataatatgtcgtagtctgattcatttcaggtcaactttctatgggtcacgagaaaagacgtggaagagattattggagaaggattcaacgatagaataagcgagagtgggatgatagtgagaaattgggtagaccaatgggagatattgtcagtttgtcacatgaaagtttcaaaggatttttgagccattgtggatggaattcagctcaagagagcatatgcgttagagttccattgctggcttggtggatgatggccgatcaaccgctcaatgcgaagatggttgtggaggagatacaggtcggagtaagagttgaaacgcaaaatggtaatgtgcaaggatttatgattagagatgaaccaagtcgaaagatatcgagaacaacaagaatgttttgttttattttatttttattagtaaatctgaaaaaattgttacactaaattaatggtaaccaaccacgtacgtattggcttttcaagacttattaatattctaattttacaggttaaagaactaatggaaagagaaacgggaaaaaatcgcaagacagaatactcaaaaatggcaaaagtagctttggtgcaagggactggttcgtcttggaagaatttagatttgctcttaaggagttatgcaagagtaaagagccaaacggtgctaatgagttgattgattgaagattggataaactgaaccgggtttaaaccaaaactaatgttcattatgtgtattataattctgtgatattgaataatgactccgacatatcaatcatttttttttattaactccaaaatgttgttaacgatgatatttgttaaaaaaattggacaaaaaggtgatatttcggggacaatcttgtatatagtctactttaataattagagctttaacccaccatgcacatactattgtaatttctcgatacttattcgacaaaattaacacccgagacatcttaaatggtaaaaatatttgattttaagaacctcaccacttgagagagtcggtgtaatgtgtccgttttttcattcacattctttctcttgttcaatcttcacttttccgacaaaagaggaagaaggtgaaaagaagaaaggacacacattgcgcccactcttactcacgtattgtctcaattattataaaatggttttcattgaaaggtatctgaattaattaaatattgagctacattttattcatgtaggtgcttctttctgttaagaaaaaagtaaaagaagaaaggacacattacgtttgctaaattcttctgaaactaaatatttgtgaaacagaatacatatcaacttttcttaagaattgtcatttatttgaagaatcaaatatgaatttaccattttaattgtggcatttatggattttgacactttagctaaaatcttatggatttatcaatttttagaatatataaatatgatttttaacgtattttatcctttttatttaattttagtcagttccatttattattagaatttattatttgttataaactatgtattataacaaaataatcatatatatatatatatatatatatataatttttcaaaaatagcaaatccgtatgatttaaacaaaaatgcaaaatccataaatatcattaagaaaaattgcaaaaaatccgtaataacctttttattgtgaatgtctgagtttgacgaataatacaaattaaaaaatactagtgaaagtggtatcagacatgttcataattttggaaattactattatcatatgcaaactatcactatatatcacatctcatgttgagtatagtgaaaatcaatgtgaacgatatatatcatataaaattgtccaaaataatagtttaaataataaatacaatgcatatattgtttgcgggtttgtgaatatttcaattttcagtcgttatgagtagaaacaatattaacttagatttattgtagagcatgtcacaacatggtaaaagaaacaacattatatataaaaactcatgtatatgacatatatactattgataaaacacaagaataaaagagatgatttttttttgtagtccaaaatagatgaaatttaatttgctttttgttattgacaaaaacaatatgaaaagaggttatttaatcatattaagttttcgcaagaagttatctcattgtaaaaagctgaaatgttaatgaaaaaaagaagttgattatgctcaaagttcacttgctgtgtttctttgattagccaaagattgcagtccaaactctcatctctttagaaaacacatggtacaataattcatatccctacttgtaaatattatcagtgtattaaatagcagaaataatacaagataaatatgactatatgagttattgatgcaaatataaataaataaaaagaagaaacaatttattatcaccaaaagaattaaacaagaaaataatactctttggtgaatcttcaccttaatgactcagatcaggttttgactattaaagaacatcttatatatcaaacataaactaaacattagtattaatcttctggagtattgtgtttactctatattaacaaccatcacagaagttcatcaagaaacgtcttccctttatatttctcgaccttaaatcccatctcctccatccgcaaccgctctgtctcgagctcagcgagctctgctttcatctcctcgaccctcaacctcgcctccgctacttccttctcaatccgagccaaatcagcttcttgaatctccatttcttgtttcttagacctcaccaatccttcttgtctctccttctctgagtctgtgttctcttgatactgagcaaactcctcaagaaccgaacgcatccagccaacgtcgatgttcacagactccaagtccttgagaaccgcgaccatctcttttacttttagttcggttaactgacccaccggggttgatccaagttcttgcatcaatgagcatagacactctaggtatcgggatcgcattgatgctgattctagcttgcagtttgctgctatgtctccgtgtttatcaatgattgactgtaggattgtggaaacacttgagttcacacggtattttccaaccgaaacacatgagtctgacattactgatataaggtctaactccactccctcctcgtaaccattgttttcatcatcatcatcatcatcatcattggcgcatgatcttggagggcttacaacattaaacaaactaatctcactggctgtgtcattcttgccactgtgttcatgcccttgaggtcgtggtgataagggtttcccacgatcagcctgaacaacattgaaaacaaaaccgaacattttaagatcaaactcctgcttgtaagaacattacataaaaccaagactctacaggtctctaatatatatatcatacacctacgtagatgataagtaagagagggtaactaagaaataccatgctgtttggggatagaggaacagttcgcgatggcttctcctgcttatggttaaaagaatcattctgaccgttgaggtcaatagagattccatcagacgataaagagtgtaaagatttgttcgcttctggaactggcgtcttcttcatagctactggtgaaggtcttgattgacgaacctttggggtattagcagcaccattctgatagttccttgtactcaggggtgacggtggctgtgactccgtctttttcttaccaaaactccccggaaggctaagaatctttgaacctgtaacaaccaaatcacaatgagaaaagaaaggaaacaactttgcagatccatcgaaagctaaaaagccttgatcaaactataactgtcataacagacaaccctccaagaattatccttgaagcaatacctaaagaaggacaaagacagaaatatccatcacaacagaagcatactcatagagtaacggatcaaacatagtgtgagaacagagaaagtaccttgcttctttgaattcttatttccacggccttgagagatcttctctaaacaatctgaagcacattcatggaaaggatttgaagaatatcgacaatccgggtgagctttccgattgacatccatagcttaatcaatatctagattcaatcagaaacaagaactgcaaacaaacaaccaaaacaagaagcctatcagcatgaataacaaaaaaagaaagaaccgagctcatcaagaacactaacaaatgtggcttctcgagttcaacaaagtcacttcagggtatgtcaaaaaaggtcaagactttagaacctcaaatcaataataaacaaaatggttacaaaaatcaaacactagcatatagttcaacaactccaatctggtttccaccaaaagagagagaaacaaagaagacaactttaccaaaacatatacataaaccactgtaccaaacaatccccacaggccacaacaataactcgaatcaaacaaaaaaccataactttattatggaacatcgttattgagaaatcaaagcagacccacaaaaaatctctgtagctagaacaataaagcaccgaattttacgatcaaagctataaactttttgtcatacacatgagaaagagagagttaccggaaaattgggaatggtgaagaaaggtctttagcagagaagatggaagtaaatagagattttgtaggagaggaagtatataagaagaagaagaggaggttttggtctgtctttgcattacatttgatttgaccaaaagctttaaaaaattgaagattcgacgagattgactattaattggaatattaaatgagcaggagaatggagatagaagttgcaatcaatcaaaggcttccagaagttgacaacaaggaagctgcagagacgagaaaagggaacaaaagcaaagctgatcctcctcctctctcatttgttcacacctactcattattaaccgactttttattttaatagttttagtttttatttcaattttatttgtggggactactaattttgttttctcattggtttaagatttttattagtaaaattgctaatttaatttgtagttgggtgttattggaagtatgtttaagatctgtttagtgattgttgtttgatggggttatcgagagaaaggttctcagcagcttaatatgaggaaatagaagttatcgttagattatccgtaggtatttttggtaaatctcgttggtactgtttagtgattgttgtttgatgggattatcttcgtcattgtatatttttcatgtagttagataaaataagttgctgaataatgtgtgaaagataaaaaggaaacaatatgaaatatggtataaatatttgaatggtgaaaggtataataaacaatacttgaaatatattgtggataaacatattgtaaatacaaatgaattaataattagacatgtttttaaaaagaaattctagaaattttaaaatatgtaagcttaaaacaaagctacctacacattctcatgaccatgaaatttgtttattagaaaatattgaaaatcaatactaacatagcattcgaccaatataaaatcttaaggtatatttattgttattttacatagtaaatatgttaatttgatttatttctaacatattaaaaatccaaattgatcattacattcaacaacagaaaaatacactttaaaacaaactacaaatcagcaaaaggaataaatcaattaaaaaaattcgtagcaaaaaaaatacattaaataagaaaaaacgttttttaaacttatcaagaaaaatacattatccaggagatataaaacttagaaaaattagagtttcaaattatcaaatttagtagaaaattttacgttagtcaattcaagatcataagcactcttcaagtttgcccacaagttgtttttctaagtaaagtaggtatattatttaaattttttaaatattatcatttttatgctaaacataaattgtagtaaattcttcttcatgataggttctctatagacatttttttatatatgaattgtagatattttgaatatatatagcagaaagcaatacaagaataaaagttcatgggtttgattgggaaaagctttacaaagctgtacactttgtcaaaagcgttacaaacagtttactctcaacttttttgtacagttttctcctacaactttttcatagagctttgcactatttcggtaaaacttacagcaccagctaacagataaaaaacttgtacatcttttttgaataaaacgttattgcctctactgaaatgttttggtaccttcaagttccaagacttttgcctttttagtctttaatttaatctaattactctcactctctccaatatcaatcataggcacaacaaaaattttctttaaaaaaaaaaagcaaagacatgtgttgacttcaaacgtttcatccacaatttgattttgaacattcaaatgcaaaacccaaatcaacttagttaaatagttttctagactcaaatcttgaccacttaatcactaatcattagtctaatcatgactcaaatcaactttgtagctttgactcaaattttgaccacttagtcttctttaatttaactaaaattctgaccattaacatatcacaacaaagaagtatagagatacatacccgagcagagacgcattcagctaaagccgtaggaacagtatacataagactagtagtctgaatcaaaattccagtggcagccacaacaagcttaggattctccaagtatccacccatcacaatcacaatctcataccaccaccactccaaacatatccccaaacaactccaacatagatgacaattgagccaccaccgtagtagacccaccatcaccatcaccactcactctcttccgcaacatcccactcatccaaacataaccaaccaaaagcacaaccatgatcaaattcgtcacaacagatgcaatagccacaccaagaacaccccaatgcttcaccatcacaagccaataattcaacggcacatggaacaccatagctactaaagtacaccacatcattggtttagtcactcgctaggaccttagataaactcgtaacggctgaagcagagtattggtaaaaaaaataggaagtgcataaagacagtactcagcggctgtagccgttatctccgggttttgacccacgaagagcatgatgggtccaaggttaatccaaaggacattctcatgaccataaagtctctcattagaaaagttgatgaacatcattaatgacatatatttcttaattcatattcattcgattaatataatatcttaagattccttttgtttagtttattaaaatatgttaattataaaaagttcaaatatgtattaaaaaatcaaatcaatcactacaattgatcaaacatagaaaacaacaacaacaacaaaaacaaaataaatgcacctataaacaaactacatatcaacaaaataaatgcataaattaaaaacaaaattcaaagcaaaaataaatactttaaataaagacatattagaaaataaaacttcaaaaagtacaaatttgatgagttgaacaacacatcacatatttcattcaatggtagctcacattttgtcatcgttctcaaaactcaatatatatacatacattttgtttactattttgggaaaatatgtaaattataccttgatgagtttcttggaaattataaaaaaaaaagcgagaggtaatatgaagaaattacaaccttttgctttatttagtttgatgaacattttcaaactaaaaacaaaagatttcaagtatgaaacaaagtatggatatgtgtattcatggatagatgattaacctaattcatcaatcacaaccaaaactcataactaaacaacaatcagttctacatttcttcttcttcttataattatctcactctcatcaaattcgaagaccaactatttgaatgggaaaatgatgttgttttggtgtgatcatcgtttttaaaatcgtgaatttgtttttcttccgaaaaaggtattcttgtttgtatcatctctgctctaaaacttggaaagagattacttagagaatacataaatgtaaaacttgaaattcagaatttttttttggcattaggaaagtacatactatttgtaggttaaccagtgtaaaagtatcctaaaaacttttaaattatgaaactgatcagttgctttcacaatctttaaaaacaaaagtaaataagaaataacatagaacggaatgacacttggactaaattttttaatatgtatatttttctttcttaaatcaaaaactttacaaaccaataattaatgttttaataaaaattgttaatgacacaagctgcgatttgagctgagctaataagttaaaatcatatttttctatcataccattataacatatgcttaaatatattctcaacatatttttttgccatccttaacacttaaacttccaaatgatataaaattgatattttattgaatattataatacacatgttctttaagaaaaaaaagatatcaaaattaccaacaaagcttataattaaaaattgtactagctgagtcataaaattctttattttagttctgttttccaactatttataccgtaaatatgtcagaagaaaatcatataaaaaatttggagtggtgttgtaacaatactaaactttaggatgtaactggtatgtaatctactatcttttccaaccaatcgagtttgaagaggtagaaacccaccctaaaactcacaattcatagatagtataattctaataatataatctattttcttcttctattatgaaaagtgatttatatcacttctcctattattagatttgtagttataaaaaaaaaaatattggttccacaataagtaattctacctgcaacatacttttttttaaccaatatatacctttcattaaacaagaaaccgaatacaaagtcctgcctcctataatgaataacacctacaacataacaagcaaacagagcacattatgaattacaaagagcaaagcaagttgctagaaatgagattccatggaggcctaatctttgagctcttgacaaaggatctaaatgacaccgaatgatgtttttaatctccataacgagattgtgtagcagagagtgtctttctttacagatgatatacatagaggcttggtaagcaagtcgaatttactaatcaacaacaacaacatactaatcaaatatcctaaaatgtgtttattacttattaaaaatttgattcttccggaatcgaatttaaaatccatcatacaagcattaaactcttgatcaatgtgcatgggtagatctatgcaaagcacataatataactattgaagactgaagaggaacatgcgtgtagatatgtattcagatgaagaaacttacgtccgactatgggagtggtttgttacgtaatcatgaatttcagcttcatgaaaggtggacagttgggtctatggatatttattaggagacaaagctagctcagcttttgctagttgctacgcataacaatatttatttgtcgtttattctcaactcaaatatttgcatatgtcttcacacaattatttctgtaaatttttatcactctataacatattttacgtcggaactaaagaatcaaggaaaactaaaatcgaataataagaaaatgacaaagaagggaaaataaatagtagttgagacaccgaaagaagaatgaataacctaaacgcaacgaagagaagctctcaacaaagttagttagggttttacacgttatcttagctcatgcaatctgcccctttcatcattctaattctttttataatatatactttttatactaatgtgtttagttacattccacatatattatacaaaaaatataaaagtaaatacatacatatacatgatcgtcatgcatgtcctgcacttaacctaccaaaaacaatctctcctaataagagagaagaaagaaaaaaaattataactcagatattttcacacatatataaataaagttttgtggtgacgttattttacacgaaaaagctcaaccttgtatggaagtaattagctgctacctattactgattattcttcttcttcttctttcttccaatttcttgtcttcttttggtacaatttcttggctttctcttgtcaagttttcaccagtcacaagatttttgaggagccttgttttttccgagaatcttgtgtaagttcttgttggcatattttcctcatgatattttagctctatcatcatgaaaaattatacattttgtcccctctagttattgtttctaatctcttttttttgttactaacaaatccattaaatattgacgcaatagatttgtgcttttgtcagtaatcatattgagagattaatggagagtaatatgcaaaacttgttggagaaattgaggcctcttgtgggtgcaagggcttgggattattgtgttctttggagactaaacgaagaccaaaggttgatttgattcttttaataagtagttaagctttaaagagtttttatctctatctatccatctttctttctctttcgtcacaaatatttgttattgtggttttggaggagacaggtttgtgaagtggatgggatgttgttgtggtgggacagaactcatagcggagaatggaacagaagagtttagctacggaggttgtagggatgttatgtttcatcatcctcggaccaaatcttgtgaatttctttcccatcttccagcttccatacctcttgattccgggtatgatcatctataatatatatacaagctacatatattctttcataagaaacgcctagagatggaaaaatatggattttgctataggatatatgcggagactcttctgactaaccagactggttggttgagtgagagctcagaaccaagttttatgcaggtactattacccgattcttggagttttgagtaatcacaatctcatgaacaagaagtattaattttcggtttttcttatatcctgtaggaaacaatctgtactagggttttgattcctataccgggaggactagtggagctctttgcgaccagacatgtatgtttatgtctcaataatgttaagtttatggttttttgtattgtggttgtttgtgatgatgtgtgcgcgtataggtcgctgaagatcagaacgtggtggattttgtaatgggacattgcaacatgttgatggacgattctgtaacgataaacatgatggtagcagacgaggtcgaatcgaagccgtacgggatgttatccggtgacatccagcaaaagggttccaaagaagaagatatgatgaatctcccttcgtcttacgatatctctgctgatcagatccgactcaatttcttgcctcagatgagtgattacgagacacaacacttgaagatgaagagtgattatcatcatcaagccttggggtatctcccagagaatggtaacaaggaaatgatgggtatgaacccatttaacacggtggaagaagatgggattccagtgattggagagcctagcttgcttgtgaatgaacagcaagttgttaacgataaggatatgaatgagaacggtagggtggattcagggtcggattgcagcgaccagattgatgatgaagatgatccaaagtacaagaagaagtcaggaaaaggatctcaagccaagaacctgatggctgagagacggaggaggaagaagctaaacgataggctttatgctctccggtcgcttgttcccaggataaccaaggtatcttggttttcgtctctgggtttacttcttggtttctgagttataatgcgttctctgaaactagtttttgtggcatggaagttggacagggcgtcgattcttggcgatgcaatcaactacgttaaggagttgcagaatgaggcaaaggagcttcaagacgagcttgaagagaactcagagactgaggatggatctaataggccacaaggagggatgagcctgaacgggacagtggtcactgggtttcacccggggctttcatgtaactccaacgttcctagcgtgaagcaagatgttgatcttgagaattccaatgataaaggacaagaaatggaggttagagcatcataacaagaaactaactctcacctttcttctaatctgaactctaaaatcaaaacctcatgatatcggtttatgttgggttgcggagtttcagccacaggtggacgtggctcagttagatggcagagagtttttcgtaaaggtgatttgcgaatacaaaccaggaggcttcacaaggctaatggaggcactggattctcttggactagaagtcacaaatgctaacacgactcgctacctcagcctggtctccaatgtcttcaaagtcgaggtatgatctaaaggacctgcggaatggagaaacaaaaaccaaagcaaaatatacaaaaactatatgtttctgttttcccatgttacagaaaaatgataacgagatggtccaagctgaacacgtaaggaactcgttgctggaaataacccggaacacatctagaggatggcaagatgatcagatggctacaggctctatgcaaaacgaaaagaacgaagttgattatcaacactatgatgatcaccagcatcacaatggtcatcatcacccatttgatcaccagatgaatcagagcgctcatcatcatcaccaccaccaacacatcaaccattaccacaaccaataaggaccaattccccaaagctataaagatgtctgctttacaagcaaaagaaacattctgcatcaacaaactttgaagatcttttcatttcaagatatataaggataaaaggaatgtcagttcgagaacagttcctgtatccaataccaggaataaaccaaagcgaaacaactttacttaaataatctttgttagaaaagtaatttgacaacccatgacaaaagaaacaggtgttgaagtgcacccctaaaacttttaagtaggccccaaaacatgaccaaccaaaacaaattcatttgtcgatattgttcgaccagatggggttacaacttagtatcgcttaattcttgtataactccaaaaaaactctactacacacgtttcagaaatatctgaatttgaaacttgtaatagtaaagaagccgcaaaccttcacttggttcattggcaacgatcggtgtatccagctccttttaggattgtgttattgctgctgcagatgctggaattcattgcagtcagctcctacctcgctcagtgctgagaaaagctttggtgctatcttagccagcataagcttaaaaccaactgaagttgaattagcgctgctgcgttcatcgataaccgaggcatctttggtgagggaacctatgagatatcctttcatgtaggcgtcacatgccttcaaaatgtaatatccgcgttttctgaaatgatctttgatgagttcttcaaaatcctacaaatttcatcacgaacttgagaagtgaaaattgtgaaattaagaagaaatagcaacagagcttcaaaattacctttggtggtttccgcataagatacatcatggttttacaatttagcaagaaagtattctcgttgtatcccagtgagtttttttctccttccgcagttccgacctgcttatcatacccggcttcattgaaataaggctttgaattcaacaccaatccctggagtgaaacaagaacttgaaggatgctagatgatttgggatcccagacttcatttcccctgcctgtccaggtattgagaaggctaagacagactttgccttcttcgtacagattggggtttaacctccatccaccagaatgataatatgccgactgcaacatgtcagaacattattttcatatcatagctggattcaacatttggttgggcacgataataataataaaaattagaaacccataccggtggcacactagggtagtcagatggaaggtgaaaatcaaaaaagaagagaccatcttggtatggtgttccaaatgccccgactattactgccctcaagagatccattctatcttcgtaagctcgaacaaagattccatctgccaaagttaaatcaaaattttccaataagaagttaccatcatgagatactactgaacgttttaactgtacaacttgacattcttacctggaagattgttctgaagtattttccagtcttgatcaaccttcttgaaccactgtctttctttggttttctgtaagtttattatatattttagtattttgcaccaacaaagaagtcatctaaagtacaagtccttgaactacctgcccatctacgccaaggaaatggtggtccagaggatcttgtgatatatcaaagcgtctgaaactgcaactatcaccttcagaaggtactggcttatcttcatcttctaaaaatgtagaggtttccccgctcaaaatattcttggcatttgcttgagtgccctttgactcgcaattatcagtcacattaacttttgaaggactagggtcatcaagggaatctgtttcatcggacgggttggtcgattcagcttgcttatatacattttcaaccgtgtaatcagaactggaagaatctacagatttccttgcacgcgaaaagattccactagccagtcgagtcacaaattcgattgcagccagaggaagagctagggcaccgttcctcccagaatcattctcagcgtagatatctgcatcagagtttccctcaatggaactactccttccaaggtcctgaaaatcaaacattcttattaatttgcagacagatggcaatgcctatgctaaaaggaattaaatcagtgccaccttttttaaagctttttggttcaaggagatatataattaactatttacaaattatgtaactttttataaacggaaacaaacctcttcaggaatctcaggagcacccctatcatcatcgtttaaagtttcccaactagcagcatcacttgtttcactttctccagcaactgattcatcatcatcatcgcgtccaactacataaactgcatgagggccaacctaggaggaagagacaattataaattaaaattaaagaataacaagccttgttcacaggtaaagtgccatcagattcaagagatttctaactgtttcttgcatagacagtctcataacgaaccaaattgcatatatctctcaggtcattaaaatgaaaaaacaactgctctccaagttatttcttaagataggtattaaaaactcctccaacttatgcaacaacggtctttttaggccaaaccatctaggaggagacaacatttatagtttggcctctcccctaactccccgatctatgaaataaaaagcagagtagcaagaacataaacaaccctaactccaaataggtccgggacatacattgagcatcccgaataaacactattaaaacactcaaaattttcgtagatgttgcaataataatgagatcagacaagggattgtaagtgaaaaagactagttgaggttgacgtaccgttgatattgttccatcggcccatgttacttcaatatcaccatccttgaggccagtaatatttccaacccatgagagctttgaaaggtccgtactaggctcgttttcttccttatccacaaggattttagcttcttgatgggattctgaatcttggtatccattgtcttgctgtgttgcctcctcaaaagagtttccgggagaagatgctggtaacgcaacggcaataggtgataagcgaacaacaacatccccataacagtagtcataatctggatggccctctagctcatacacactgacaatttcttccttttcaaactcacggggttcttctgcccttcgaagtggatttagccacctcacagaagcagtacgatcttttgcattgacattttttacaacgccagcacgtctaggttcagttgtgttatcaccatcatcagaggtcttctctaccacatactgctcagagacaaattcatgatcaccaggagtctcaattggaatcaatgttatcgcttcccgtctacattctattgtaccatcctgccaggatacatcaacgcgtgttctgctattaactaccaaaagagcttgttcaaagctttcctcttttttcttaacctttttgtcctttctgataacaagtttgcgaatcttcttccgatggagaggccaaggctcatgaacaggctcctttgaaacagaaggatttctttgaggaggatcgtcactagttacttttggcaaagcttcagcagtaataccagctggttcaacttttccacttacttcatcttgcacatcttctaaatcacgcccaattttctgttgccgatcagcttgggaatcataaagtcttaatttagatacatgcttgtgtaaggggattgtagcagattgattcagagatggaagaaggcaccagtcacccacttgccaattggcatgagtgaaacatgacaacaatgtcaaattacttggattctgctcctcaggtggggaaacagaagaatctggaccaaagccagctgaggcaatccagtagacaaaaattgatcccgcagtaactttggtcaccgtaccttctaaacgattaggcttccacagtccagataaccaccgcgaattcttaaaaaccgaagaggagcttgctttaacccgctgccctgggtaataaggaaaattagcatcttcttcaagattattcttcggaataggtttaagtcgaagaggttcaacacgtagaactttacacatggaaccatcatcaaataagacagtcacattgtccaacacatcatcgattctacctagccatggaccatgaaccacataatcaccaacagcaaaatccctgacgcgtttcaaattcttggtagagatgtccttgtgaatagaaccatcaggagccaacaaatcaactgatatgttaacatccacaacaactcccacctgaccagtaggctcagaagcagaagcaacataatcaccatgtaagaaaccacggtctataacagttacatcattaatatcttgaacaggctcagtgttatccatccaaagcacacgaatctgatctccctcaagtgcaccacatttataattcccatcagcttttttctcgccatctccattaacaacattttcttcactagcctttttcccttcctctacatcctcatcatcatcatcattatcttcgtcatcatcatcatcttcttcctcatcactaatatcactatcagagtcagaatcaccagctacttcgctgacaacaccaacactaccggtctttttgtttttgacaatatcttgtcgataaatattaggatgctctgaatcacatatagagagacttgccattgaatcatcaactgacgagtcaacccctacatttgttgatgtaccagggtcatcttgctcatgctccatctagaaaaaaaaatgccaaagcaaaagttttgatgagagagtagtgcaaaaataatgaaaataacctacaagagagtaaggatctaaaactatgatgcaacaacaacaacaacaacatcctccaagctaacacagattaataaagaaacaattctcaaagcgaagacattccatgccaatagaacattacattccgattaattcatcatcgaaggaaaaaactaacaagatcatcaaaaactattacagagattctacgcgaatatataatgacattgagctggcaacgaacagatttgtgagtaccgaattggaaccttggagaagaagtggtgatcggaggaagatttcaatcgattacgttttttgatcgtctatgaattgctttttctttatcagaagaagaagaagaatcgaggagaaagattgaacaaggcaagaggaaggaggaggagctcagcggcgtcaagggtatagtcgtcattattgtctctaattgtttctttttttttatgacatcccaccaggccactcaccgaatctcagccgttggatctgcttaccaagtcgccggattcaggttctttttttttttttgtatctatctgattattataaaaaccaaaattgcataaggtaataagaattatattcgttaaaatattttgtaatcaatttcgaataattgaaaacattgattgatagcactcttctgttcaactacgaatgtgacaaagatagttaactttctcttgatttctaggctaaataattaaaaaatgttactacattcttatgaaatctaacagatattgagtcttatcaatcacgcacaatatcgagaattaaaaatacaagaagctggttaaaagcataaacatataacaattggcatctgcggttgaaaaatgtgggcctgtgttccaaacgtggcccaaaataaaataatcccagcccaaactaatatggacgtggcaatttcgcgtttaattacctgacgctgttagcaattttggggtagtgatttttgtggtaaacatattttattaccaaattaactccaaaatttgattttaaaaataaataaaaaactgtagcctcgttttatttttcttaaagatcaaatccaaatccaaacaagattttcagaaataaaccaacaagaaacactgattcttttaaaaaaaaaaagaatctctatagaggagtattttggagtaatctcatctcataaaaactagtgacttgatcagcaacaggcaacagcccacataatggcttgtcctggtggaatcctcattagcattggaaacaatcctctccataaggccaataatccttcctctgcataaatccttctaatggcatcacccatccctttatatctcaccccactttcacagtctcaggttggtttgagccatcaacctcgttttgaccacatcaaatggttcgagcaaaatgtatggctcaactttgaatttgataatatattaaattaaacaaaaaattcaaatcagaattttaaattgaataatttatatataccataaatctatatatacatttttgcagccattttgtgaaataaatcatgtagttggacttatttacaatggctgccactggattttgatgtttgtttttgataattagaaagaaaatcttcgaattaaatatttgacatttaacaatctttccaaaatctctccacattaactacacgattattttctaaaataaaacttccaacatttaatatcatttaattactacaaaattatcatttttgatattgcttttctccatgactataacaattgagttataataatcaaagcagaaatataatttgatagcatttaattactacaaaattacaaaatatttagacaataattcataaacatatcataaataagatcaacattaataaaataaatggttttgttttacgggacgggttgacggaacgagtttaataggacgttacttaataataattgtaaactataaaataaaaatattttatagttagatacaatttgtaaacttttatatactaacattaaaaaataaattgtttccgcggtataccgcgggttaaaatctagtatatttacattatttacaatattattaatataattaattaattaattaattaaatatattgggttatcgaaaaccgaaccgaacctacctatttgggttgagaaaaaatacaaccgaatggtttggtttggttcggttcggctctcttttctccaaacgctttttctttctctctcacttgaaaaatctcccggagacctctctccttctctcgcagccgacgatcccatccaaaaaccaaaactcgctctccggtgatcgtctttcggtcagattcttataagcgtgcttgattttcaaatcaagtttgtttctttatctccagagtttatcatctcttatgtgactgtgttgtatagcttcttctctataactcctttgtgctccttctctgggaaatttctctatttagagtgctttaggattcgatttcgtgtggatctgctttcaattcgtttattcgttgcgttccactgaattgagtttgtatagagtattaattctacttgaatgcttaatgtttgaattgatctctgttgcttgcagaaaatgaatttcttaaactcagctgcatccatttgcagaagagttagtctgagggaactcatcactgaggttcctgcttatactggcagcagcatttccggtatatgttttcaaaatctcttgtctatattttgatctggttaactcatttgtgtaattcttgttcttgggatgttaaagatggttcttcaagtgggttgagtttggtcttgaagcgttgggctactaagaaaaccgctggttctacaaagaacggtcgtgactctaatcccaagtttcttggtgttaagaaattcggaggagaggtaagaaaccaaacattgacctacctagataacatttgagatgatcaaatcaatcttagtctgtgtgtgtgtgattttgcagagtgtgatacctggaaacatcatagttcgtcaacgtggaactcggtttcatcctggagactatgtcgggattggtaaggaccatactctgtttgcattgaaggaaggacgagtcaggttcgagaaaagcaagattacaggacgcaaatggattcatgttgatccaataggtggtcatgttcttcaccctatctacacaaaagccgcagctgcaaaatcgactaagttgaacacagcttcatagcaaactcgacaatctaaacgtgtcttcgtttcttcttttagattatatgatctctcgagtaaaagatgatggtatcttagaatatcaacactcatttcaattacagctgctgttttgtttccctctagtctctgtttggattcaacaaatcaaattttttattcggaagtagatgttaatcaaatctgaaattctctcatacgtgttagacaacatcaaatggtcctgtacccaacagacctctgactgccatggctgtaagactttaccgtcgccttcatgtttgttccacaaattcttctctcacgatggtttgagcacaatgtatggttacataatacttgaaaagctctggactgcatcctttccaaatcgatataaccggttatagataaacaaaattcccggtttcatatagctccattatgacaaacattttagggaagaggtgtgatgtcgaccggtaaagtaaaaggagtagaggcaaatggaatgctcaaacagttaatagcccatataaaaagtcaaaagtcaaaaacattcttatgaaatctaaaacatgttcgcataatacaaatactgaaagtgaaaggtgtcaaagtttccgtcacacacattaccgagacttacaaatacaagaagcgggtaatctagcataaacataaatttgactcaatattggatttgtcaccgcagatgtatcttcatttatgctttaataacgatactaaaaactttgtctcggcacctttaaacgaccttactctcggggaatttggcctcgtaagcctctgtagtctgttaaaacaaaggacaaatcaagcaagattgttagtaatataattgaaatcgaaaacaaatcgaagaaactgagacaacacaagtcatgttattttttttggataccatgtaagtcgcagtaatcatctttccagcaaaccatcttccatggagagcacgttgtgcacctatggctgcttgcgcattctcaaatctcaggtagacaaaaccaacgctgttcctgttttagcaacagagattcaaagtcgtcagtcagagaccagtctagtctactcttttcgagatgagaaagttacaagaccctgaagctcactcacttgtcaacaaagatatgattcagttttccgaatttggagcattcttctttaacatcttcttttatatcctcatcaaaatcatcttcagtctgccaaacagatacaagtgtatagaagaaatagcttgaggtacgaattgttaagccaaaagaaactatttagcagaccactaacctctgtggatggatcaaacatgtttttaagcagcagacattcgctggggacaccaattgggtcgaaaccagctggtataacaccgggaataatgccggaccctgcgagtccagcaacagcaggaaaagacccttgtacaagagcaggagctgccaacgaagagattgttgaaactccaccgttgaaagatgcagctgtagtaaggccagtgctgcagagaaggttggaagatttagtggaacataaatgaacgaaaacaaactgcaaaaacagaaattagtaacaggaaataaggaaacctcgatgcagttccactgcgatcgagcttttgcatgagaagcgcccgcgattgtgcattcagagactgcagaataagcaaccaggtaaggctaagagaacaaatgcatttaatgattatgacagtgttgttggaaactggaaagataactccatgttctcctactacaccatggatcttacacatagtaaaattgtctattaacacccttttcttaaagttggtttatcttctgttcatattttatctataccaaatcctacatcatgcagtaactatatacatcatgtaaaacaggttacttgagttctccctatagatccatgaaatatatccacttttggaagttatgctagggagatgaagacaagtactaaccaggccacctccatcatcatcatccaaatcaccggtggtttgcgtctgtccagcttctgggacttcagtttgatcagttacagctgacacctaatgaaaagtaaaactacatcatcaacagatataatgtggtgttacatgcatatttagaagccactgagacagatttaagatagttgactgctcaaagtatcagccaaaataattcactgctcatagaatttgccttcatacaaagtaataatgtaacatcactaagcacaaagaacataaatgtctgttcgggaattatatcataatttcaccacagagagaaagaatccgtctagaaagtacttaacacagcttaagctctctactaccttctatactaccgatatcagttgaaaattataaaaaaataagttcgacccctaccttgattgcacgacctgcaatttccaactgcccatttagattcagtgcgtttctagcatcctccagccgggcaaacttgaaggttttgaaaaagaaaagaattctgttaatcaaaagaatacagtagcaagaacaagacaaaaaattaaaactgacaccgcactacctacctgaacaaaaccaaatcctttgcagagaccagtttcatcacgaggtacttgcaccagctccacactcccaaatgattcaaatacctaggaatgccaaaagaaagcataatatgtcacctgaacgcgaactatgatccgaaaatgagcaattgcaaaacagatctatgattaataagtatatgatttgtagtatacaggaaaaactctgctcttacgattttctgacatttattcaaataaaacttcctctttataaaacataaagcagctgccaggaaaagaaattgtttacctttcgcaaatcatcttctgacatgttaatgtggaggttaccaacataaagacgcctagctcccccggagtaggggcccaacatcccccctgctccagcagcagcagttgttgactgaacaagattcttctcagcttcagaaggttttaccataacaggctgaccaagaagaggttgtccagatagagcaatagccatagggacagacattgtatcataaaactccacatacctgcaagcaagaacagctcagaatccagaaaacagtactcaaacaagatactacatagaatttgtacaatttatctgctcagaaactatttaaagcttattactgtaccgacagtttaaaattcttaagcataaagaagaacttgctctagccacataagtcttagagaaagtcttagagagtcaaactgtttgaaactcaccctattcctctggaacgcctggaaattcgatccattattatccgtacatctcgcacctaaaacaatatttaggaggcaatgtgttaaaaatattcaattgaaccagccagcccaacatttatatggcaacatgaaaccggcagaggaatggacaaacctttccagctctggaaaagaactcatatacatccctttcagttgccctcaaagcaatctgttgtacacaaaaaaataaatcaattactgatcaagttataatgtttcaagggaaccatagctataaaaacaggcatacctgatatgcaaaaactgttctctgatctctttcaggatcagcctcaggctctaccttatcctccttcttatctttatggcgtctgcataataacaaataagtaagcttgtttaatttgatactagaaactttctcatccatattttacaagatgtcgcaacatctttcgaataggccagagacaacatatcagtggccatcttctggtataagcaatatgttaataatataacaattcaaaacagataaactttctccaataggcgtacacacatgaagcacgagaagtccctgcagggaactatgcaaagtcaacaagggatgaacaataaactaataattaaaactttagatcttttttcatttaaaatttagcacgggaccaacctgaaggctaaccaaaaacatgttaccttctattacaatgataatcttaaacggaacgtgccccatcaagttgtacagaaggcaataccaatggacctaatagcattagtatgaacctgttaacacttatagcttacatcaaagtttttgtaggataacccaaaaagcataagagacgggaagcactaggagcccgcatcctcaatttcagtcacaacatcccaataatattctgaatttaccatgaagaactctatgcgaaaaagatagaatggcaaagcagctactaaacacactacataaatttaagacacagcttctaaagtgtgaactagcaggcaatacatagattatgaagtcgatcaccaactcggatgtatacctctcaggaagtatgtaccaatcataacaaaaaggtatattgatcaaatgtagtagacatttttgagaacaagtttcaaataaatacaagagagagagaaggagcacctgcgatctctatcccggtccttggtctctctttccttaggttctatttccaagctcttttctctttcctgactccgatgtcgctctgatcgacttctacttcttcgtgaccgatctttttcatggtcacgccctttactgtctcgatccttatctctgtccctctctctatctttcccatttctttcttctttatctacatccttttcacgatctctatctctgtgctccctgctacttctatgcctatccctctctctgtccctagaacgtgaacggtgatgcgatctcgaccgcttagaacgccgaccatcctcatcttcatccctctccttcttcttgtcacccctatgccttgagctcctactcctctctttcccttcagatttgactttctcatcaccaccaccattaccaacttcattctccaggtgaggattttcaactgtcttctctaagtactcatactcatcaaagtccattctataacttcaatacctagaatctagaaaagaaaggtagattagtagaataacaagcacaacctcaacatcagtcactcccaatggaaacattattcatacggcaactgtctaattcggttccacagtcaaattcctccgatacggcgaatttcagattgaaattgaaaaggcgaattggcaactcggtacttacctctctggcaacgaaacttgaagaagcgaaaaggaacggcgaggagagagagactcgaagctgctctcaatctggaatctcccgctcggtatctctagggcaagaataaagctctgtgaaggagacgaagaagcttgtgaggtggtcgctaactctctgtaggtttacttacccacttgcccagattcagcctaaaaccctctttcgggtccaaaggcccaatccaagtttttattttattttttatattataatatgttactgtgttttactatataatattttctctacttcctattgttttactatataatcaaagttttcatcgttcaatctggagatgtcaaaatcaaatttaataaatgtgctaaatattttaaattaaatatcgaactatataattccataaaataacacaatttttagtttataaataaatttatatattaaaatctcaaatatttaaatgatttatatattatacaaataacgttatatttatgtcatttataagtttaaatttaggtttcaacttaaatcatatatatgaaagttgcccaactttttccatatgagtgacacatcatcacacaataaaatgacatgtgtcattctacattaattaattaaaaaattagtaaaactaattgagaaaaaatcaaaagtctattgttgtgttaaattctccattaatctcacttttaaataaattttctaaaaatattaataaataaaaaatcataataatgtatcaagtactacttttattctattctacttattattttttatttttatcgatagtcattgatccataatgcctaaaaagttacttgtgttgtagtttaaatgtttactacctaacctcatattaatttagtaattttagttggatatttttttattattacgttttgtgaatttgatttatcatatgacattcattctgtatatttctgtgggttctgataactttgtaacattgatatacaatttttgacgtaatagtcatccaagacattagacataccaaaaaaaaaaaacatgagagtctgtctatatatacgactatatggtagagatgagaattaaagtgttgaattaaattactagcatattatgatgtgattgtgtactagatgacgagagaatatatagaataaaaaattgtttgttacaataagttagacaaatttctaaacacataagtaatataactacatacattgtatcagtatatcatatattgttgttgtatgtgatcatgatagtgaaatattagaataataaatatataaatattcatattgtactagatttgatagttcgagttatagatgaatctaatcataaaaaataataattatattaaatagatgaatttatcaaaatgaacataaaaatcaacaaaaaactatagtcatatttttcaacaattttaaaactatagttcttataaatatttgaaagaatttattggtgttgaaacgcatatactttaaaataacatcatgcattaacataaacaaaatgtcgaggtgaaagaagaaaatgtcttatgggaatccaaggggaagccccaagaggagttctcacagtacaaggattacaactactggaaggatctgtttgatccaaaaactcctgaaaaaacaacacgacaatatattaaaagaccacttagctcgctcttgggaagagcagtttggtcatggtcagatctggcctcatgtggcagggacgaaccaatgggttttgtaggtagcaaaacaagcggagttgtttttggtaatcctaatgatatcggagatcgattaatggcaccagatacatagaaaaacaagttttcagagacgtaggcttaatcatttggattttgaggtcccgccatcatcgtcttcttgagggagatagatcaatcatgatcctagatcgtcctagtctgaattctactcttggcaagctccactttctacgctgctgcataataaaagaatataaggctcctcatcaacctcaatcttgagttacctaggtggagatctttcaggttaagaacagtgaggcagatgatttttttcctcaagggtctcagtggtggtttaccggtctcgccacccagtgccgctactggtttcagaggtagcccattccattcgtcttctgacttctttctctacttcgttttctttgacactgctttattactatcttggctctttctttgaacactgctttattattatattggtttgtaatcgacctttttctttaaacacttcattgttgctttattattatattgttttgtaatcgatctgatcatgacatttaagttccaagacttttagggtattttggataataacttttttttttttaaaagtctaattactaaaactgaacttcaaaaccaaaaacaccccacaaacttgccaaatggatttgttaatgatgaagatagaaacgaactcccgaacatagataaacaatactcaaactagtatcaaacatctaaaagagcgacagtaggatttgaaatcatagcgggagataaatttaatcaatattttctccatttctttttacttattttattcagttaaataaattatattaagctagtatttgattttagattcaatatggattttgggtgcaaactcgccttttttccaactgactttgtggtaatgtagcatgtaccaacctacatttagtacataggatatttcattttaatataaatcactcaatgtcttttattcaacacactctccaaaaactataaattagtaaaaacggtgaccataaaaatacatgtatgcatttgttaaaccggcaaaaacggtgaccataaaaaaccttcaatttttgatattcagttcaatttttgttcaaaatgaattttttgattggtttatttatacgatcgaattttgggaaatatcacgatacctcataaatattatgtagaatatgacaaagtgatattcaaagtcactttagaagaaaaattttggtaagaaaatgaggtgaaattgcatgattattaaatagtattatacatttatgtagagaagtgaacgcaaaatcaatagttatattaaaaaagtattggatataaagcatgaagtaacaaatcaatgcaactattttgatcttggttaaatgaattctacaatttagattgatttgtctttgaatgatagagagataatgaaatgtaataaatttaacaaagttaaaaattatgacaacattagatcagatgaactataatataaaaagtaagtaaaaatattagaaaatagtatatggaagagaatactacaataatcaataaaacaaaatatttaaagaaaagtacaagagagattgatagtcgaattgaagatctattcaatctatatctacattttggcacccattttaacaaataaatcctgaatttggatttatttacaactcaatgccattagcattaaatcttttctccaaaataattaattttactttaaattcttgatttaaattgtcaaccacattatcaatcaaatttaatccaaacaaacttcaaatcaatcccttaaaattagcataaacatatttgttaacaatattttaaaacaaagttttttgttaaaacaaatattattcttactaaacgttttttgtttaaataaataaatcatgtatttgaacttatttacaaggtcatgacactaacattaattatttaggaattaaagatttaaatcttttaaatccttgcttttagagttattatatcattatctaaaaggctcaaaatataaaaaatttaaatattattatttatatatttaaactttataaaacattattaatatttaaacttataaaaggtttaatatatcatactttttaacatcattatataatatatggagtttaaaaaaatctcaattcttccgtcatattttgtgactcaaaattttaaaaatgaacatgtattaaccaattggcgaaaaatgtgtgagtttaacgtcccacatcgactaaaatatttagacaatgattcataaacatatcataaataagattaacatgaggaaaaaaaaaagattaacattaataaaataatggtatttttacgggacgggtttggcgggacgggtttgacaggatgttacttaataactattgtaaactataaaataaaaataatttatagatagatacagcttgcaaaattttatatatactaactttaaaatataaattgtccccgcggtgtaccgcgggttaaaatctagttattttcttatatgtattaataatttaacacatattaatttttatttgcgcttacaagaatttttaatttcatcacaacaatttcttttaaattagtaaagttaaatgattttattttttattttatttttatttttgataaaggaagatcaaagctattttttacttttcgtgattaatcacaatgattttctttgattcattatgattggggctatcaatttgaaagcgagagttaattagtgatttggaattgagataaagatatttgaagctagagagcaaaaatgcatgtatcgattcagagtgatattgatgaagccctatataattgagagatgacctatattattatttggaaactacatagtagaaagtaatcttgcctttgtaaataattacattagaaaaaaaattaagagtaaattaattcacctcatacttggtaattatgaacaccaggatagtagcaccctttgtgatgtataaacgttttgcactgagcatcttttttggctcgggaagttggtctttgttttctcagttcgtggcacatgcttcgttggcttatgcctctttcccagcaactccattttctctttgtggacgacgaaatccgaggcccgatataaggcgtcctgaatttcaagggtttggataagttataaacaagccaaatactaattttgcaatctaattaatttaaataaattattaaaaatgaaaatacatttttcttaaagaatgattgatcaaaataaacatatgaattttattttataaattatgtttacaagccaatgctttcataaatctagattcgtgatccaagcaattctatttcttaaaacataaactatacaataaaaattattttttgataagacaactcaagttttcatattgagtacatttatagacgactttatgttttttctcctatttttttttgttggacttaacatcatattaatttttttctatttttttatttcctcctattagagttttgaaggctgttctataagtctgtagagtgtcatcgagtttggtggaccagtatattcttgaagttccaaccattctattcaagatagtttttatctgtttgttgctgacttcaccttgaccactagtctagagatggtaggctgtcgcaaccttatgctgcactccatacttctttagcaagttctcaaacatcttgttcatgaagtgagatcctccataaccactcttggtataccgaagatggggaatatgatactcttgaatagtttcaaaactaccttagaatcattggttggacttgcaactatttcaatccacttggagacataggctacgacgaccaagatatacttatttccctaagaagatgggttaaaagttccatgaagtcaatcccccagacatcaaacatctcaaactcgagtataggattctttggcatctcattttttctggtgatatttcttatccttcggctataaacttatgaacattcttgaacatggttggccattagagcccaacttgcagtatcttctgaacagttttgaaggttgcaaaatgtccttcataagcagagccatgtcaatgttctaggactccttggactttttcttcaactatgcatcttctgaataaaccatatacgcctttcttgtatatagaaggctcatcccataaataatggttaatatccctaaataatttctttttctgataaacatcaaggctttaaacaaatcaaatactaatttatgcaatataattaatttttaaaagttataaacaaaaatatattattaattttttaaaaatgaccgatccaaatgaacatatgaattttagtatataaattgtgtttacaagccaatgctttgataattctagattcgtaatccaagaaattctatttcttaaaacataaactctacaaaaaaacatattttttttatgggacaactcaggttttcatattaactacatttatagactaaattttatttttctcctatattctttggacaacattaattaatattttctctattttttcaagctaatggttgacaaaaaaaaagaatatttaggagacaaatgaaatttacaaaaacaagaagaagttactattttgcaaactctctcttttaattaacagctttaaaagaaaatagataaactcataaaaagcccataagagaaaacttgaacagaacaaaaaacccaacaaaacccaacttagtagcgtctctccattctcttcttcttcgtcgtcgtccctgtcttttccaaacttttttgctgtgcgtttttttttgtccaaagaatcatattcttttgccctctcacacgagtcatatttacctttttgccacaacaatcatggcggcgacggcggtggtctggcaaccccgagacgatggtctcgctgagatctgttctcttctcgaacaacagatttctccttcctccgtcgttgacaagtctcagatttggaagcagcttcaacacttctctcagtttcctgatttcaacaactatctcgtcttcatcctcgttcgcgctgaggttttggaacttttctctactctctcttcgcttcctgagattttttttcttctccgtattgactcaatctatttgtcgaatgagttcggatcgttgaattttcgtttgcttatcggattctctttgttgcttagctttagttgaatctacgtttcctttgaattgcttaagattctcagactttagaacattgcttctctcgttatgagtttctctgttctgtaccttaatggatggatatatctccttttgatcatatttgtctatgtcaatagttgatgtttctgttgtatgagctttttgattcaattgacttgaagtttacttgtatccaaataacataaatgttgtgtagaatttgtggattgtgtcttcttcacttgataactcatatttatttgcattggcaagaactagccttgagtttttatgttgctgttgctgtttgattaggttttatgcatttatatcttaattcactcaacattcgtctatgtctccttctgaataattcttctttgtcaatagtatgacctttgtgattcaattgacttgaagtttacttgcatccaaataacaaaaagtgttgtgtgatttttagtggatagtgtctttctatcttgagaactcatatttatttcaatttagttggatctacatagtctatttgcagatcctaggcaagaacaacctggagtttttcatattgctgttgtttgattaggttttatgcatttatgtctgtttgttaaattgctgatgtgtgcttgtacaatgatcagggaaagtctgttgaggttcgtcaagctgctggattgcttttgaaaaataatttgaggggtgcttatccatccatgactcaagaaaaccaaaaatatatcaagtcagagttactgccttgtctgggagcagcggacaggaatatacggactacagttggaactatcatcagtgttattgttaatattgagggagtttctggatggcatgagcttttgccagctcttgttacttgtttagacagtaatgaccttaatcacatggatggtgctatggatgcattgtcaaaggtatgtagcagctatgtgttctcttttctgtttcttgctcttttcgttgaacctttgatttatgaaccataagcttgtgtaatccaaagttgtgattgttggttttgatgatatatttggagtttttttcaaagtttttctaatatctacatgtcgtattcttatcaatcagatttgtgaggatattccgcatgtcttggatacagaagtgcctggcttagcagaacgccctatcaacattttcctgcctaggctattacaggtaaacatctcttattcctacacagattttggaactcggttgtagcacttgtttaggttctagtttgatttctttcgtcctgttggattggttgcgttaagattgattacctctctttttttgagcagttttttcagtcaccccatgcttcactgaggaagcttgccctgggttctgtgaaccagtatatcattataatgcctgctgtaagtattgcgaagactacttgtaagcttcgtttttgttttatatgttattaaggaccgtaaatggtaacaatctgagtttggcaggctttgtacaattcattggataagtaccttcaggggttgtttgtcctagccaatgatcctgtaccagaagtcagaaaattggtatgcctcttatttaagcttctgtcaattgtttcttatttttgtcagtacaggagagagtgatttcgtgttgaagaattttttctttagatgacatatgattcaatcagattcctatctcatatcggatgttcttatgcttctgtaataatgtcttttcttcttttgttaaaaggtctgcgcagcatttgtgcatctcacggaagtactcccctcatctatagaggtatttttctttgtggttttagtatacacattgtttcaaatctattccaaagtttccctttttttttgaggtacttcatatgtgtagtttgagcatttcttctaccttgcatctctgatttgtcttcttcccttattttctatttcagccgcatctcaggaatgtcatggaatacatgttacaagttaatagagaccctgacgaagaagtgtcgctcgaagcatgtgaattttggtaaaatgctattctctttattttctctatagatgacttttttatacctgttttttctcttatgttttatccttgtcctcatttgataacataaaagttatattgttgtttggcaggtctgcatactgtgatgctcagctacctccagagaacttgaaagagtttctgccacgcctaattccagtatagtgatacttttccttttcttcagtatattcatgggcacttaataatttacataattccagtttgtaatgttacataaaatatatctgttttaggtgttgctcgaaaacatggcttatgcagatgacgacgagtcacttttggatgcagaggtttgtttttctgttgatattatatttttttgtcaactttctcgatataattgtcatttatatatatatatgaaaactgttcacttttgcaggaagatgagtctcaaccagacagagatcaggtgcagttgtttgttcttgtgtctttgatttttcttatagtttcttccccttcaattttcattcattttggttcccttacaggatttaaaacctcgttttcacacatcaagacttcatggatcagaagattttgatgatgatgtacgtgatttactttttgtgtcatttgaaacctgtacagaaatgcatgtgttatatgatacatatatattaattctatagatccctctttaatgactgcctctgggtacaggatgatgactcgtttaatgtgtggaatttaagaaagtgtagtgcagcagctattgacgttctctctaatgtttttggagatgaaatccttccagcactcatgcccctaattcaggtaaatgttattcatcttggtctttttgaaatgaacacaattagctaaaccctgttcttctaagctgcagaaaaatttatcagcttctggtgatgaggcctggaaacaaagggaagctgctgttttggctctcggcgctattgctgaaggctgcatgaatggtctttaccctcacttgtctgaggcaagtttggttttgatccacatcatctcatatatatgatttttctttgctcagttgatatacattaacatgctaacgccttatttctgcagatcgtggcatttcttcttcctcttttagatgataaattcccgctcatacggagcatatcttgctggacgctttctcgatttggcaagtatcttatccaggtatgacttgaacaggatatatcacactttaactgcttcaaacgatttttagatgattcactgtttttattttctaggaaagtggcaatccgaagggttatgaacaatttgagaaagttcttatgggtcttctccgcagactcttggatacgaacaagcgggttcaggaggctgcctgttcagcttttgcaactgttgaagaggtacctgttggctttgcaatgtggtttttggtggcatttgtcaatgttggttgaccatgtaaatcttctatgaacgtgtaggatgctgctgaagagttagtgccacacctgggtgtaatactgcagcatctgatgtgcgcttttggaaagtatcaggtcattatattcccttaaagttaactgctttgccagactaaatctcagtggtggctaatatctaccaaccattgtttctatatgtctacctaacatacaattttcatataccagagacggaatttaagaattgtttatgatgctattggaacactggcagattcagttagagaagagttgaacaaggtataacaattgggtttgtacaaggttaatctgatcttgtaaatttagctccttgactagtgtttttcaaatccatatactggtggtagtataagtttttttctttgcctacttaagtttcctctctcatgcagcctgcttatcttgagattctgatgcctccactggttgcaaagtggcaacaactttcaaattcagataaagatctatttccattgctagagtgctttacatccatttctcaggtatgggctacttgtcaaggtcttaagaatatctataaggtcttgatacagttgaacgaatgaaactatccttaatgatcctactctgtgaaattatagtgttggtagtttaaagatctctgaaaaagtatcctgggggtggttggtcagctaaatatccaaaacttcctgcattggatcaaagattagttttggaagcctgaaagggctattaatactaggatataacagttatgaatgtcggactagttcatcttgacctaaaattagactggttgcagcatgaaatctctatgtctaacaaattgtgttttcatgtttcaggctttaggtgtaggattcgctccatttgctcagcctgttttccagagatgcatggatatcatccaattgcagcagctggctaaggttccattcagaattctgcaatttcatctcatttaagatttagagtgacttttccagttttccttcgtcgcaggcttgcatgtacataactattgcatgcttttgttttccgtttgatcaaagttcgtttctgttgtttgtaggttaatcctgcttctgctggggctcagtatgacagagaatttattgtttgttctcttgatttgctttctggacttgctgaagggcttggcagtgggatagagtctctggtacttcctttttttgatgtcttgcacttactatttattactcataagttcaccaactgaataaattttataattgctctggccattgttgttcgtataacatgattgagttgatggttatgtgtctaatttatggaggataacacaattgagttgatttcctaaaccagatatattcttattttatcgctctatgcaggttcaacaaagtaacctaagggatctgcttctcaattgttgcattgatgaagctgctgatgtcagacaaagtgcttttgccttgatgggtgatctagcaagagtacgcttcatattcttttatacttattttcctttaacataaagaaacagcaagggaagtgacaactcgtagttctgtgagattatatgttacaatttcgactcccttttgccagttatagtagtgaagtaatgtttttggctactaccgacaggttttcccagtctatctacaaccccgcctgcttgatttccttgaaattgcaagccagcaactggttcgtatccaagttttgttgatactataccaatttgcttcttctatggcactgatcatatatatgctttgtacagagtgcaaaccttaatagagaaaacctttctgtcgcaaataatgcttgttgggccattggagaattagcggtcaaggtaataccaaaatactatttcttctgttgtagcttgaagttcctggttaaaagcagactcgtgactggtaggaactcaatgtttcaggttcgtcaagaagtctcaccaattgtggccaaagttgtctcttccctaggcctgattcttcaacatggagaggtgatttcagcagcctataaaattgatctcttggccacgtctaagtctatcaaataactgcggtatttgacagagtatgcctaattttattctcttgtgaagcagggtgtcaataaggcactagttgagaacagtgcaataacccttgggagactagcatggattcgtccagacctcgttgcaccacacatggaccactttatgaagccatggtgcatggcattgtcaatgttagtgaacctctttgttaaatttggagtcttttcccaacctctgctccagagaacaatttcttatcatactttcttttcagggtacgtgatgacattgagaaagaagatgcgtttagaggattatgtgcagtggtaattctctctactctttgctttgtgctcgaaacatgaaaaagtttgatatttataagtgttctccacaaattcaggttaaagtgaatccatcaggaggtgtcagctcacttgttttcatatgccaagccattgcgagttggcatgtaagtgaacagaaaccaaactgtgctaaattcaatattgttaccgagctttggaacaattgattgatacacaaataacaaccttttttttaatcacaggaaataagaagcgaggatgtccagaccgaagtctcccaagtactgaacggttataaacatgtaagctatgctggatttaagttcagtgtttaaccatcttaagcgcttacttgcatacattagaagtaatctgagatcaaatgattaatgtcttttaattcatcttttgggttcagatgctgggaaactcatgggcggaatgtttatctgctttggatcctcctgtaaaggaaaggcttgcgagatatcaagtgtaacattgatcatacacctgctagtatcagagagatctgctctagctttttcattgcaaacaacaaatagagtcacggagtttgagcaaaaggcgcttgagacatcatttttttttgcaagattcaatgaagggcaaaaatttctcaagagaagacatacagtacagagtttgtgtgtgtgtgtggggctcttcagattacatggttcctgtctttactattttccctatttctacatcgattcttcgtcctcgtttctattgcgggcaacgttgtatggtggtttgagcagttttggtaaaattattaaaccgaaagagcaaagtcaaaatttattgttcttcagctcgtgtgaactattggacctgtggataccaataagaaaaatgtgattgggattttgtgtattttcttccaagagtaagctgcaaaatacaaagtcgtgtatattttaagtattttcattgaacataaacaacaatagaagttatgcgagattatatgttataattttgactctcttttgctagagatattagtgtgtgtaataatgtttttcgcgacgctgacaggtattcccgatatatttataaccccgcctgtgtgaattcctcgaaatcgcaagctatcaattggttggtatccaaattacatttaaccttcttatattgtacgtataattgtatctatgctctaagcagagtgcaaacattactaaaggaaaccttgatgtcacaactaatgcttgtgaggccataggagaattagcggtaaaggtaataccaaatactatttatgctaattagtgcttgaatattctggttagagacgatcatgtgagtgataggaactcgattgttcaggttggtcaagaagcctcaccaacgttgtctcttccctaggccatattcttcaaaatggagaggtcactctagctagctgcttataaacttaagattttctaggccatgtctaagtttatcgacttttgtatctgacgagtatatctaattttattttcttgtgaagcagggtgtcaataacgcactagttgagaacagtgcaattaccctcgggagactagcattgattcgaccagacttagttgcaccatacatgaagccatggtccatggcattgtcaatgttagttaacctctgtgttggatttgagtgtccacactcttacattttgctccatagatcgatagttacaatacttgcttttcaggttatatgatgtcaataagaacgaagacgcatttatttgctttgtgattcaaacatgtaaaccaagtttgacatttatatataagttgtctgcacaaattcagtttaaagtggatccattagaagtttttgactcactttatttcatatgtcaagccattgcgagttcgcacgtaagtaaacagaaaactaattctgaccctcctagctatatttcaattcaaactcgatactgagatttggaaaaattggtttacacaagtgacacctttttttttttatgtcaggaaataagaagtgaggaaataaaaattggaaaaattggtttacacaagtgacaatttatttcacttttttttacacaagtgatccaacatattttctgtccagtgtttaaccatcttattgctcatatacattagaagtgattatatgtcaaatgattaatgtctttgatttaatctgtcttcaaatgatgggaggaaacttctgagagcaatgtctctctttatgtgaaggaaaggcttgcgagatattaagtgtaacaatgattttacaccggttagtctcaaatcagagagatgtgatctagcttattctcattgcaaacaataactagattgacagagtactttgagcaaaaggtgttttagaggtatttacatttttgaatccaaaatgtgattgtttggatttggatccatggtttatacacaaaccaaattggattaatgagaaagaactctattaatcaagttgcagttttattataaataatagatttcttttatcaacaataagatttaattgttttagtactgacatacagatcgtttcgtaaaaggtcaaattaagtttttgatagaagagaattttttgtcttaaaagacttataaatctgaatccaagccaaaacaagtaaatcagaaaaaaaaaaattaaataaatttgaaaaacttctatagtaaagttccgttaacaaaataaaaataacatatatcgatctatatgtactatcgtcaaaatcctaaggatgtcattaaattgatactttacatttttggtttgttaaaaaacgatgcatattttttttctggaacatacgagaaagcgatgtttgttttaaaataattttggatgaatcaattgagaaggatcaattaatatattcatatcagtatcacccctgagttttcttaaaataatgaaagttgaaaattctatgtagaatttaaggagttaaaacaaacatggaatttaaggagtcaaaacaaacaaatctcttgaactcgttaattgcttaaacaccatgttgtgtagcgtgtcttgtgccggcgagactcgaggctgtggttttttctccaacgtcatcatgtcttttgacaatgaccaatcttccatttcccggattgtccatggtcgtgtctccgatctaccatcttctcgcatatgacattgcgtcttacaacccttttgctccttttattgtttttaatcttgttgtatcaaacattgagaatagtattctcccaaaccttgtactacatttgagttattgaatggaaaaacaagcttttgcccaaagaaaaaaaagacaaacatggataaaagagaagcatgagaaagagagacgctagctttacacttttcacaattttaggattttgaataaacataaaagattttgaaaatttagggttctataaacaaacatcacaatgttttatgtaagaaaaatgttgttttctaacaaaccaaaacaataacatcataaaatagaatatcgtttaaacaatatatgtttaggcaaaattatagaaaaactattttcttatcttgatacattttttattgataatttaactaaagggtttaaaatggattaaccgacatttgggaagttgttttattaaactaacttacttaagggtttaaaatttagttggaggcttaaaattagataagtcaatagttgaaggttttttcatgaaagtctttttattttgagaaaatactatcatacccattaaaattaatctattaataaacataccattttaattttttttttttggaaaatataaatcttaacaaactaaaccctatttacattttatttttctttctctttaaattagtcgccgcctcctctctccctcgggattctcgctctgattcgcctgtcactgtcagccgtatctttctctctctttcatcctttttctcctttctttcaccccctttctctcctttcgtatcaactgtgggtaaatatattttcctttttcgttcattttcctctcaatttgtaaaatcttatacaagtttgtttatgtaatagtgtttactcaaatatttcatgttattttggtgttagctttacattttttcaatttattaatgcttaaagattgtttaatttaacattagtagaccaaaattggttaactggccttattttgtctatttcagttgatctccagaatttcatggcatataaggcatatgtcttaaaaaagctcaatgaagaagtatctcttacatcatgtaaattttggtaaatgatttttttctgttgttctgttttttttttaatcaaattattttctagcttgtaaaattgcttaactatactattgtttgccaggcctgcatattgtgatgctcagctggaaccaaaggacttaaaggagttattgccacgcctgattccagtaaaatgatacttctctttttcttctactattttttgggcacattctagtagtttgacattttaataaaatttggtttggatttattagatgttgctctcagatatggcttatgaagatgacgatgagacacttttgaatgaagaggtttattttcctttggtattacatgttttgtcatcttttttcaaattatataacgtacgaaagaatttcatttatgcaggaggttgaatctcaaccagacatcgatcaggtgtagttgtttgttcttgtgacttcaattattcttacaaattacttttattcacattaacttttttttaatattcttatatgatttgaaatctcgttttccattaatagggtcatttgatatatgcacacaagttgtatatgatagtctgagttatacaatataaatatattaagtatatacatcatttcttaatgactatctctaggcacaaaatgataaggagtggaatttaagagcatgcagtgcaaaatttattggtattctcgctaatgtatttggagatgaaattcttctaacactcatgcctcttattgaggtaaatattatttctctcggtctatggaacttaaaacaattagctaagaacatgttcttccaagctgcaggcaaaactatcaaaattcgatgatgagacttggaaagagagggaagctgcagtgtttgcttttggagccattgctgaaggatgcaatagttttttttaccctcatttggctgaggaaagtttgtttatgatcttttgtctattcattattctttctacgtgaattaacttcatcaatatgctagtgccttgttgcagattgtagcaatccttcgtcgtcttttagatgatcaatctcctctcgtacgaaggataacgtgttggacactttatcaatttggcacatatgtttttgaggtatgatttgaacatgatatttttttttattcaacttattaaaacaatctttagatgattcgatactttactttttttataggaaagtaatttggagaatagtaaactctttacaaaagttcttcatggttttcgtttcaaacttttggattcgaacatctgggtccaggaagctgcatgtttggctttgacaacttttgaagaggtaactattgtctttgcattgttgtatattatgtcatgtgtaaagaacttttatagtgttttttccacacaattgtttttatatatatagtgtttagcaatagcttatttattaccatcatacctgaaaaacttgagagaaactgaaagaacctctactcttgaagaagaatttgaaagaacaaagatgcttgaaagattcttggtaaaatttagagaacttcggtttaggaacacttatgattaaaaatggaaaggaagaaactatttataagatccaaaagcgtgtagcaataactaaccaaccgtgtcttattctttagaatagtctaccatagtatatgtatatataggtacaaaatatactctatcataatatatacgtcgaaccatttactgtaatatctagatttttattttgtaattgttaattttacgtaaatatttaaatatttgtcacatatcattagtatgccttgaaaaagaatagaaattggacctatttagtctaataagataattccatcatgaagccaaagttaagtttcacttaccccaatcaagttttattttaataatatagatgattgttgacataaagtgatttttttgtgaacatgtaggatgctggtgacaaattagtaccacacctggaaaaaatattacaacagctaatgcgcgcttttggaaagtatcaggtcgttaaatcttcttgtagttgactacattgacatattaaacaatttttatttgtgactacctaacacacacactatttttatatattcagaagaggaacttaaaagttcttcttgatgctattagagcactagcagattcagttggaatcaatctgaacaaggtataatgattaggtttgtgaaaggttaatttgtttcttgtgaatttaaatttatatatagttcttaaaatattttctacctacttaaaactcacccgttatgcagcgtgcttatattaagattttgattcccccactggtttcaacgttggaacaaatttccaattcagataaagatgtaattccattgctgaagtgcttcacatccatttctaaggtatgttactacttttcaagctccttaagatttttcatatattacacgaatgtaattagtttaaataatcctagtaagtgaaggtactgagattttggtactctggaagtccgatattgctactaatattgggagatatgtgaatattagacaagtttatcttaacaaaatattaaaatgtttgcaacatgaactatcaatttacaactagttttgtttccatgtttcaggctttagaagtaggattcgctccattttcttggtatgttttcgagaggtgcatggatatccttcaactacaacagctagctaaggttcaattcagaattcatttcattagaaacaaatcttcattttattagggcttatacataactatttcacgtttctgtttttcgtttgatcatagcttgcttgtgttgttttaggttgatcatgattttgccggggttcaatacgaccaaaatatcgtcgtttgttctcttgaatttttttctggactttctaaagggcttgtcagtgggatagagtctctggtactccctttcttgatgtcttgttcacatgattttctactcataagttcttatcactcagtgaataattcaatatatcaaagttgtttgtataatacgaccgagtcaattgtcacaactggatggatactcacatcatcgctcttatgcaggtttcacaaagtaatctaagggatatgcttcttaagtgtttcatggatgaaactccagatgttagagaaagtgcttttgcccttatttgtcatcttacaaaagtaagttgtatattcttttatctgccaaaatctttacctttaacataattgttaaatagcatggaaagtgagagctactcgttatatgtaaggtaatattttttggctacactaacaggtactcccggattatctagaaccccgcctgcttgagttcctcgaaatcgccagccaacaactggttggtatatccaaattataatgctactatacatttttttttctattgtgtttgattgtatctctgctttgtacagagtgcaaattttagcggagaaaacctttctgctgcgaataatgcttgtaaagcaataggagaattagcggtcaaggtaaaaccaaaatgatatttctctatttattgttgaagtttctggtaaagaacaaactcgtgaatgatatgaactcaatgtttcagtatcctcaagaagtctcaccaattgtgaccaatgttgtctattcattaggcatgattattcaactcggagaggtgactctaacagccttataagttaaagattttacttgccatgtctaattatgcctcatttttttgtttgtgtgaataagacactagagttgaagagtttaactacactagttgaatacaatgcaattgaactagctatgaacagtgcaattaccgttgggatactagcacggattcgtccagacctcagtgcacgatccattgagaacttcatgaagccttggtgcatgagattggcaacgttagtgaacctttttgttggatttggattctttacatactcttccaacctctgctctataaaacaatttcttatcgtactttcttttcaggttagatgatgacagtacaaaagaaaatgcatttcaagggttatgtgaaatggtatttctctctttactttttgctttgttaatatataacattgaataacgtttgatatttttcaagtttcttcataaattaggttaaggtgaatccatcaagatatgtcagctccgttgctttcatatgcttagcgatcgcaagctggaaagtaagtgaacaaaaaagaaaatcctaactctattagacttttttactgagctttgaacaattggttgatacataaataatgaatttttatcataggatatggaaaacaaggtcatccaaagcgaattctccaaagtgctgataggctataaaaacgtaagatttattgagtttaagttcagttttaaccatccatccaacgcgcttgtttgtgtacaatagaaatggttaatgtcttttactttatctttttgggttcagatgcttggaaaaaactcatgggaagaatgtctctctgttttggatcctcttgctaaggaaaggcttgctgcgaggtatcaagtgtgacattgatagtaaatcgattagtctcaaatgagagagatctcattgcaaacaatattcagtgtttttgcaaaagacgtttcagttgcattatttttataaacaaaatttgattatttggatttggatccatgatttatacacaaactaaattggaacaatgataacttttccaatcaagttgtgtgaaacctgctatgaaaaaaatataaaaaagaaacctgctatgagctattttctgtaacagtataatacatttatacttagtattataagcaacatgcttttgatgattaatccatagatcatcatttaaataaaaatcatttacttttctttgttgttgataaactaatttaaattccgttgtacaaagaaaatggccatacagccgccagggtgttacactcagcctaactatttataatctttcacgaattaatatatgatttaccacaaagaccaatcaatatattaatattagcacgtggatcggatggaaacctaacgaagacacattgatacatttgcaagacaacgtataattaagaattagaagtggtttaggagaggagagagaagagagagatggaggaatatagacttggagagctgagacacttgctgacaacggttttcctgtcgggattctccgagttcttggtgaagccagtgatgactgacgtcaccgtcgccgcggtttgctccggcctaaacgaaacatgttctctcgccgtctatctcaccggagtagaacaagtggtatccacctctacctatatttgtatatatgtattgtttactgtcttctttttactctttgatggctcttttttttgggtcaatgtctcttcaaatcctttggttataactgattctcccaaaactcttcaatgttttcaaattagtaacagagaactcaaatcattatatataaaactcaaataacctaaattaaatgttattaatggaatattatatgacgacgttttttaaaaaataaaataatagatgaagacgtgttaaaatacatatgcagtgaatattacatgaaattttgagttactcactatataatgacataatgagttttttggtacataatactctctctattcctttttgtttgatcttttacgaaaaaacataaatattaaaaaagcatattaaatgttatttttaaatgaattgttctttgtgatttacaatttttaataactctaaactaatgatcttcaataatttatattgaagtttacaatttatcaattataactaataactattgcattaaaaacctaaaaaatcaatattattgaaacaatttttttcttctaaaaaatcaagcaaaaaagaacaaaatgagtatattttgtaccaacaactaagtcgggaaggttttgggataagttttagtaaaattataattaaaaaatttggttggtcctcacagaaagtcagttggtttaactgaatcaattattttcaagttgttagttacttcttctttagaacaacttcaatattataattcttaagaaaattaagttaattaatgtaaacatcttttctaacggtgaaaatggtaaaaaaaaagacggtaggactggggacaatggtaatgatgccggtgatcgggaatctatccgatagatatggaatcaaaacattactcactcttccgatgtgcctctctattcttcctccaggttctttttcctcttagtttatatattgaattagtttttttcgaaactcattttatcatcaaaacaatgcttttacacaatgtataattctagtttttctctaatatttaaaaactaagaaaaaaaaacactgagtaaaaagatttccatgaaaagccaatcactaattaggacatctccaatagtgatctctatatttttctttatttatagaggttattctattttacagatattgtgctctaagaccatctccaatggttatctctattttttcctctaaatataaagaaaaaatagggttctctattttcactccaatggttcttcaaaaataaagatctctatttggtagaaggaaaaatagaggaaaaaatagaaatccctattttttgtctctatatatagagaaaaaaatagagatctctataatagagatgagttggagtgaaataaaggtaaaaatagagtttagggacaaaaatagggatgggttggagatgtcctaaagtaaagtttcctctataatagaggaaaaaatagagatatctactttttgtctttataaatagagatctctacaatttatctctatttttttctctatttttgagaaaactttattttagaggtgaccattggaacacaatatctctaaaataaaatcagttctaaaatagagaaaaatatagaagtaactattggagatggtcttaattatagaaaattgtatgtaccaactaccacctactaataattgtaggtatttaacgtttcagaaactattcaattaatcgcatagatataccaacaaaacgaaagatgccttgattatttatttgtttatctgcgtggacacctcacaattccatgagtctacaatagtgtcaacgtaaaaaagtactactttttgaaagtattatttcttttgtcaagtgttaatcttggaggactacaatttcgatgatgaaatcaaatattttagaaatgataaataatgaagaacaatttataaacacggtcggtatcataatattgaggaaacgatgaataatgaattgattggctgaaacgaaaaagtttttctttaatttttgttatttcttgtagagctagtttaatgcaaacataattctagactacaactaaaacttcttttaattcgcagtcgccaaaaaaagcctaaccaacactagcatatatgtactttcatagagaaaaccaatattgaaatttttttgaacaatgttgatgtaatgagagaaagaccttactctcaaaattaattaatttgagccataatgaagaggagttacacaaatgtttcttctgcaccataaattaaatagatgtagtgtcggactgtcggttacaaaaatcataagttgatgcagaatgggttcttgcccttgatataacatgttttttgtcttatactttaccatacatcaggatcatataaccttcataaattaatatatacttcgattaatcaatacattttaaagtctcaaattaaatataaacgtcaattattatactcataaattaataattctctaaattacgacaaaaatatcattactattattattatcatataacaattttgaaagcaagaaagtatagaatagtatctacagaactaatatacgttcaaatatgtttgttttctgttagttgctataatgttgtaactttttgcagcgatattagcgtatagaagggatacgaatttcttctacgcgttttacataaccaagattctattcgatatggtctgccaaggcaccgttgactgtctcgctcatgcttatgtggtaaattttgttttctttccaccattattatatttaaagaaagtttttgaactcaaagcatttatacgatatcatttcgcttaatcctattttcaggcgaaaaatgtttgtggcagaaaaagaatatcaatgtttggagttttagcaggtgtcagatcaatttcaggagtttgtgcaacattctcagctcgtttgttacccatagcttcaatttttcaggtatcggaatttcatacctattaaccaaactgaaaaagtaaaaaaataaatcaatttctcattttctgaagtgttatttttcatacctttatatattggttacctacccacaatattcaaaaaaatatataagaaaattataataattaggttgcagctatatcatttttctttggcctcgtgtacatgagagttttcctaaaagagaggttacatgatgatgatgaagacgactgtgatgaagatgataatactagtggtagaaatcatcatgatggtggtgatctaacgatgttagcagagcctattttaagagatgcaccaactaagatacatattgtcttgaacactaagtattcgtctttgaaagatatggtcagcttgataaagaataggtacattgataaatatataatatttgcatggtttcatatacataaatatttttatatagtccttagttactgatcaatatgggtttttataacacagcaccatactcgtccaaacattggttgttactttctttgctaccttcgcacaaagtggaatgcaatctgctttcttggttaatttcatctccacatcttaccattcttaatttttacttaaaaatatagtattaaaaagtgtaatgattttttttttttttttaaataacgcagtattttctaaaagctcgttttgggttcaacaaaaatgactttgctgagctcatactgttggttaccatcattggctccatctctcaggtaaacattgaaaaagaatatgtagttttcgatgctatcggaataaattctgttcactaatacgtgctgaaatatattttctcagctctttatattgccgaaattggtttctgccataggagaacgtagggttttatcaacagggcttcttatggattctgtaaacgtaatattttctaaccttttttactttcaatttcttccaatgaacctacgataccatatatatagctaataattttggttatatgcttggggtgcaggcagcttgtctcagtgtttcgtggtcagcatgggtaagtttgatatgaactattacaaaataataatacctatttttcaacttctttttttggacgttcaaactccacatttttagaagtttaatatgactgatatttaattaaaagtatgattgagcttacattgattgaaacttccttcggtagaaatctttggcccaagagagttggtgagcgattagacctgtaaaatattacaaattcagtatgattgcttagttctttttgttcgaataatacaggttccttatgccacgacagtgcttgtacccgtaacaatgttcgtaatgccatctgtaagattttttaattaacttcatgtggtgcttactaataatgatttttacgtagtcttgcttaaacagaacttaaatttggttctaggtttgtggtattgcttcaagacaagtgggacccggtgaacaggtgagattgtaaaatattttttctcctgccaacaatcaaccaaaccattgttaatatcagcaaggaaaaaaaacaatgaaaaaaagaaaaaaattgttaattttacttaaagaacaaagaagattatagtataatatgttataaaaaatttattcactgtcattaagttttgatataaaagctttcagaatttaacttgaatttaacatatgtgttaatgaagaaagttagacatcgaaagttggataaattatcaagtaccccctctgttcctaaaagaatgatgttttggatttttcacacatactaagaaaagtaacttttatattatttttattatttttctgttaaatataagtgttacttctctcatctcttcattggttactaataaaaataataataatattaacctacaacatcaatatttataaacaaaaataaaatctaaaacatcaaatttcatagaacagagggaataatatataaagagttatggccactccacctaaaaccaattggttttaagttgaaagcctacaatctatcaatatgctaatctaatatgcatcaaaatcgatcagacctaaaaaaatagtaggattgatccgatatggatatagtttagtcaaccaatattcataattaggccgaccaattcccatatcaattatagatttgtaaatgtgtataaaatattagatttaaaataaaatgaatatcaaaggcacacaaggttaattaagttattgtagatttttttaattttttcaactggatttcgtatgcagaaacaatcatagtctaccgaacaaattttttaattaaatcacgacaatgacagatattttttgtcatttcattgcaggggaaggtccaaggatgcatatccggggtaaagtctttttctggtgtagtggctccatttatatatagtccattgacaggtacgtgaacacattaaagtagagtttcaacaccactcattactattttaacaccattttaaaataataattatagaccaatataatggagaaaaataaaccttctatagccttttaacaaataactaaattttgtttgatttagcgttgtttctctccgaaaaagccccgttttattttcctggattcagccttctatgtgtgacattctctttggtattcttcacacttgcaaccatctcactatgttcattgttgtatgtgtaattatgcatgactaacatttgttaacatgcacagatgatcggattttttctgagtcttcttataagagatgttccttctccgtcgatgaacaaagcaatcaacaacatttcaagagaagaagcttgattcatgaaggaaatctattttaaatcttttactgattttcttcaatgtatcatttgcaacgaacccttagctaaaataaaaaaatatactcctttcgtcttacaaagataaatttttagaaaaaacattttttttacaaagatagaagttttatatctccaatgtaaattttaaaactttttacttgttttatccttattaaataattatgtatatatttattattattttcaaagtgtattaagaagttaaaattgttattatatattattttttaaagaatgtaaaattctaaaaaatccatcttcgtggacggagagagtattaatttgtgctacttttctcttgaaatgttaatcgttattacagcctttttgaaaaaagttgagtaggtattgtaatagtatactttccacgtatgattgagaaaactcaaggtgaggcagagaggagccggtggggatctctcatactctctctttgtttacagagatccaattatcatatcgagccatgaactgattctgattcgatttggcaataattaacatttatcgtctttaaacgattaaataatataaattacattttaaatgaaaaggaccatgcatccaccaaggtgatactgactgcctaattataaatgtcatatcaaaatttattactatatggtttaacaaaaattcttatctgaattttttttctttttcttatctgaatgctttcattctaattaaagattttaatatatgaatattcgcacgtggatatttgtataagatatgcattaatctccgaggctatgtatagttcagaatttgaagtgaagtttaggagaggaagagagatggaggtatttagacttggagagctgagacacctactggtgacggttttcttgtcggggctcgccgaatacttgataaggccagtgatgactgacgtcaccgtagccgcggtttgctccggcctagacgattcatgttctttggccgtctatctcaccggagtacaacaagtggtaaccatatctacttatatatatacacatacatgcatataatattaaatctgttattgtttttacgctttaactaatctcttttcgttgggtgttgattactctttaaactttttatctttttatctgatggtgaaaatgatataaaaaaaagacggtaggaatggggacaatggtaatgatgccagtgatcggcaatctatcggacagatatggaatcaaagcaatgctcactcttcccatgtgcctctctgttcttcctccaggttcttttgttttctttttaaggttccattttcccagtgaaagttattataccatcaacaatatttgttcttatctttttaccattttatttggcagagaacttattataagtaatataattctgatacaattaaataatccatgcaaagccaatcattagctattataccaatcaataattgtagagctaacgtttgaaaaagtagccatgcgtatgtgtattgtgtaccaatagaaggaaagataccttcattatatttatcagttcttatgatcgtggacacctcatgattccatgagagtagtgccaacgtaaaagagtaagtattcttttattgggtacaaacaaccgttcggcgccatcagaaatttagaaaataaatttttaatatataggcaaattaacctccaactagtataagttttgtttggaaaggagtcctataacaaattagtgtagattttatcatttggatcgaaagtgaataatatcatactaaaatggagtttaaacggtttggaaaacccaataaatgatatcagagtctagattgaaaaaaatagacttagaattctagactatataatcggtgtgagagaaccctctatgtgccacaaataagaaggtgtcttaagaatctcgcgaataaggtggagtcatggtgtcaaaattttgctcgaggagaggtccaatgttcgtagtctttggtttgaagaagagattgttgggtataaaccaacgtctcacatcgaaaattttaaaaaatagtttataatatataagttaagttcaactttaactaatatgagacttttaggaaaagagctcaataacaaatatgtgcgagctttactacttaaacccgaaacgaataatatcgtactaaaatgtagatgggataagtttggaaaacccaatatctttcccacgtatatctcgttttgcaacaagctggtaacttctgtttgcatgtctctttcgtttggcgtaattcttttttgctatatttacattcttgttgctatatattatcctagtattattaattaatgcaaattactataaaattaaactcatggaatgcatgattaaattatcaaagtaagcaagatgatgattcatatgcatacatgtttgaacaacgtcagccaatcttgttggttttagcagcttttcgttttggatatgtgtaattaacgttttttaaaataaaattttgatgtgaagggaaaaatttgtgtactaaaatgttgtacattttgcagcaatattagggtacagaagggataccaatttcttttacgcattttatgtaatcaagaccctattcgatatggtctgccaaggcaccattgactgtctcgctaacgcttatgtggtaaattttttgtcttttcaccttgatcatattatagatatttcgttcttattaaaaaatagaatatttacatgaaattttttaactattttttcaggcaaaaaatgttcatggcacaaaaagaatatcaatgttcggaattttagcaggtgtcagctcgatttccggagtttgtgcatcactatcagctcgttttttatccatagcttcgacttttcaggtatcatatcattatacatactagcacaaaatcacaaaattaagagacaaactcaaaacattatccaatattataaaatcattttcttaattaagaatcggtttttaataacttaatatattgcttgtcagttgaaaattcacaaaaacttttgaggaaaaatgatatgttttcaagattcatatttgtttctatatttaaagaattattgttctcataccatttctcgtatatatatatataagaaaattgcaatttactaggttgcagctatatcattattcattggcctggtgtatatgagggttttcctaaaagagaggttacaagatgctgatgatgatgatgaagctgatagtggtggttgtagaagtcatcaagaggttcataatggtggtgatctaaagatgttaactgagccgatactaagagatgcaccaacaaagacacatgtcttcaacagtaagtattcgtcttggaaagatatggtcagcttgataaataataggtacgtttcatctaagtagatatacatgacacataaatatacataactcgaaatgatcgaaatggtttctataacacagcactatactcattcaagcattggttgttacattctttgctaccttctcggaaagtggaagggggtctgctctcatggtttttttcatgtccacacttttacattctttattttactcaaaaaaaactattaaataaaccaaaataaatgtttgtaataacgcagtattttctgaaagctcgttttgggttcaacaaaaatgactttgctgagctattcttgttggttaccatcattggctccatctcccaggtaaatattgtaaaatttatgtaaaattatcgtttaaaattaggaataaatattgatcattgatacgtgctgctaaattatcattctcagctatttatattgccgactttaagttctaccattggagaacgtaaggtgttatcaacggggcttcttatggaattcttcaacgtaaacatatatatttttggttgttttaatcatgatacatatttttgtagaggtaagaattttttttatgtgcttgtaatgcaggcgacttgtcttagtgttgcatggtcaccatgggtaagtgtgctgagaactatcaatagtttctagaattattgatttgacttcggtaacttccttctatatcgagatctttgatccaagagagttcgagtgtcattaaaagattacaaattcaataggattgtttgtttttgttgaaaaatataggttccttatgccatgaccatgcttgtacccggagccatgtttgtgatgccatctgtaagattttaccgcatcattgtccttagtaatggagccttatacttagtattgtttaaatatatcttgaatttgagtataggtttgtggtattgcgtcaagacaagttggatccagtgaacaggtatgaccgtaaaagttattttcttcttccaacttttcattgttttaacgtttttcaagaatttttagaagataataaggaatttagagtaatatataaatgataatgagtcattccatttgttataaaacgattttgaggttgaagctcaccaaacttgatatagtagaagagtttaaacaaatgctagctcaacttgaaccgaatttgatctgaacgataaaatatcaaagttatcatataatcagttttcggatgagtggctagaagaatcatcatccctcaagaatgttagaaatctcacatttgaagtaagaaaagatctagagtaatataaaaaggatatgatcaatccactcttggcttgattttgaaattggaaatccaccaaacttaacaattaaattgtacggcttttaagatatgtattctgtcttgcctaacaattaacatattaaagaagaacaagattaactacttagattcactttttaaaatgtgccgaaaacaccttatatttaaacacgatatttatgcctttatttttgattaccatctcgttccaggggaaggtccaaggatgtatatccggggtaagggcttttgctcaagttgtggctccatttgtatatagtccattgacaggtaagtgaacacagtatcactaagtgaccaatgaacaccattcattaataactatcattaataaaacgttattcatcactaataagttttatagcgttcattggtcaatatcgagaaaataaagttttatttcctttaacaaatatttattttggtttgatatagctctatttctctccgaaaatgcaccattctatttccctggattcagcattctatgcatcgccatctctttggtattctttacatctacaaccatatcatcagttatcacaattatatgtttattattaataatgcatgacataatgacattgctttacatgcacagatgatcggattccttcagagtcttctgataaaagatcatccttctttgcccttagtgaacataacaatcaacaacccttcaaaagcggaagcttgacaagaaatatatcaagaagcaaatgtaactgtaatattgtacaaatttgcttcaaattaaaagttcatttaaaacgaatacatagctagaagctgtaaaaataacttagttttcttacaaagattgtcattgcaaatgaataaaatcacttgtatagtagttgttggcaactaagtacaaccggtcacatcaacatacatcaactaagtaaccaaacaaatataaccgtaaaaacaaacaaccgtaaatattttagagaagagatgcgataaaaagacaaccgtagaaaaataaacgaaaatatttcaacaaaagaattagatgaaaagacacaactgaaaaattaaccgtaaatattttaacaaaatgttgcattgacacaaccgttcataaatgcaaaaaggattgggataaaaagacaaagctttttatatttcaatgaaaagatgtaataaaaaagacaaaacaaaaaaaaacgtaaatattttagtaagaaattgcgataaaaagacacatccgttcgtaagtaaaaagacattacgataaaaagacacaaccgtaataaaaaaacaataaatatattaacaaaaaattgcaacaaaaaaacacaaccgtttagaaatgcaaatgacattacgataaaaagatgcaagtttcggggagaattcgcaaaacttcatgaaaatacgcgataaaaagatataacaaaaaagatcgtaaatatttcaacgaaaatttttcgttaaaaagatacaaccatttagaagtgcttacgaaagaaacgacacaaccgtaaatattgcaacaaaaagttgcgagattaaaagaaacaaccttataatctctttgatcatatgaatggaaaactaaatctttgcacacaaaaaaattcaggattttcatattattttcatgggatttttgtttaaatgggcacatttcagccaaaaaaataatgagagggtacattcttgtgggcttataagaatgagtacttatttggctaagaaaagacaatcttgtcaatactctttcttctttctttttttttttttttttttcttttttttccaaatgcttcatagatctttttctcccttattaattcaatagatccaattaaataggtttgtatataaataaatctatatcctaagggaataatgcttagggaacccaaagatttcaagacgcagattaaattaattttacatttgatcgataaatatattggtcggtggattttgattcggactgaaacttgtcaccagtttaggagtcgaggaaagagatgaaggcagtgtcactggtttttgattagcaaagactgaagatggaaggcgttaacggcggaaatgaggatcgacggtaggatatgttttcgatttgatagaacgatgtctaataatcgctaagtaattcaaaaacagatgttcgatggtgtatgtgtcatgttgtgatcagtttacgaattacgattagggtgaattgagagacaaatcggaactggagattgagggtgaattgtagagacaaattagacggttaaatgcgaataataaaaaagataaaaacgtcaatactgtgagaaaaatacctaattgcagtagcacatgattttgtgcctatttctacaacggcatacacttttgaagtgctttatttgtaactgatccttattttcatgcatgtgagtgatatcaagttgtactttgttgttttgaaatgcctagaaatgacaaaagcgtgtgggaatggacataatcgtttttacaaaattgtgggaatggacatgatccttatttatggtttgtacgcgacggataaatttttatttaattacgtaatcgtctggatttatatatctttaatgcagattgaaatatggcagtaccaaattttttgcatagtcttaacttcaaatcgatcgtagttattacaaaatgtcacataattcgtaatgtgtaattaaaaggtactccctacacaagagatggtgactaatgatcgagtcggccagaaaataccaaaaaagtcctcaaaagtctgatgtgatctcccatgcttcaaccgaatttttggaataaagaatagattggaaaaatatctgccacattgtagtattttcaagtaagctttctttgtttgttcaataatcaaaagcaaaaacaaaaacaaaactctcaacactttttgtgtttattttctgttattttgaatcgaagtcggcaagcataggctaaaaggtgatggaggatggaattggagggctgagacacatgttggcgacggtttttctttctgccttcgccggattcatggtagtaccagtgattactgatgtcaccgtcgctgctgtatgctctggccctgacgactcatgttctcttgccgtttacctcactggttttcaacaagtggtaccaacctagtctctctttgatttccatttcttgattgttagaagatttttttgtttgttttctttacttgaaacgaaatttggcatatgcttccaaatgtctgaaatcgaaaacttgcttttaaagatgatcggattttgcttttcttaagcaaaaaaagattataaagaacgggaaaaaaagttttatagaatatcatcctattttgttttcaaatctaatcaagttttttgactagtaacttttaacagagtaaattttctttgtatttaggtttactctgcatttgtgttttcacctataaatagaaaatagaaagaaaaaaatccagttttaaatatatttttctctctactttctttcttgtatttttatttactagcccggacattttaccagtaacggtctaagttgccgaccaaaaaaaagtaacggtctaagtttttttcttactaccattttatcacgagtttaattatattatgcaattctaagaaaaaagtaattattaatttcctttagatggttttggagaacaaaaatttctatgtagtttttttccgatcaaaacttgttttccaattaaggttttctatacaaaataaaaggttaaaaccatataatataaattagtatataatttgatgtaattaatatgctaaagtttttttaaagattttattactaaaaacaagctaaaaacaatttaaaataaataaatttgtttgttatgatactgatgaattttatttatgaactattaaatgaaggcaatagggatggggactatgataatgatgccagtaattgggaatctatcagacagatatgggattaaaacaatcctcacccttcccatgtgtctctccattgttcctcctggtcagtttcttgttttctttttttagttctttctttttcttacttttagagtcactaactcactaacgcaaataaaatgactcactaactatattaaagtatatgataatgtgtacgtcaaaaatgatattgcaatgtgctgtgtgcattgaaagtaattgcgtggaagtaaagaaggtttatgccccacttcaacacgcgcatgcatatatatcgtcatttgccctaccacatgtcttcaccgaacaagcaccactactttatttgccaacgcaaaattatgatttaaactaaatcgatctatatcaacttcaaataacaactttaattaatcttttttttttccctgtgaaactactttatcttaaatgttattaactatgcaaataaaccaacaaaataaattattgagtgacaaaatcttattttaatcaagtggtagtgggttagtgtttcttacttggtttgtatgtagtatagggaagagaccaattcatcgaaatagtaaaatcgtaaaatcttattttaatcaagtggtagtgggttagtgtttcttacttggtttgaatgtatagggaagagatcaattcctcgaaatcgtaaatttatttaatcactctcacttggccagttaaaatagtatcatgctttatgtatattataaataccgggagtgacttactcaatggctacattcatatcatgacgtgattagtaaaatgataatattgtggatcacatcctggttactaaaaacagaagtcttattttttggccatgcatgatgctccgacgaccgggttgcacaatgataacccatgcttgaattaaagattaaaagaaaaggttaaaagggaaactgaagtatctatagccatatataaaacactactggttagtggaatattgttagatgactttctaaactaactcattaacaatatgaccatataaaaatgacatgtgttaccaaagaaagttgtagaagtattacatggcatttattcgcattctcacttttttaaatattttgcatatttcatttgtttccttttctcttttaactttataaaatcacttttgaaatattgtctcatatatttatttttctatatattttcttattacgaaaagaaactttttcaaaaataatatgtggttgattctgtgatttaattttggcagtaattttaggatacagaagggatataaaattcttttatgtgttttatataagcaagattctgacctctatggtatgtgaaggcaccgttgactgcctagcttatgcatatgtggtaattactttatttttactttattttttccacaatgatttatttataattttaataaaatgttatgaaaagataacctcatttcatattatttttttcaggcagtaaatattcatggcagtacaagaatttcagcttttggtattttagctggtatcaaaacaattgctggactttttggaacattagttgctcgttttcttcccatagctttgacttttcaggtacatttttgatttttcatcaccaatattaaaactaactcattaaattaaatttaattctgatgcatgtgattccaaaatcaatgattttcattttcggattaattaggtttctgctatatcatttttcgttggcctagtgtacatgagagttttcctaaaagaaaagctaaacgatgatgaagatgatgatcttcatcatggtacgtatcatcaagaggatcatgatagtattaataccacaatgttagcagagccgattctgaacgatagacccatcaaaacacaagtctttcacaagaagtattcttcattgaaagatatgatcagcttgatgaagactaggtatgtttatatatatatgcttttatttttatttatgttctcatatattgttattcaaaatgatggttatgggtttgataatgcagcaccatattctttcaagcattggttgttacattcttcagcagtttttcagatagtggaatggagtctgctttcttggtttagctcataaattatataatcatcattttcacatattgagtttttcgttatattaatgaaataatatacgcatgacttttttctaaactatgcagtactttttgaaagcacgttttggatttgacaagaagcagtttgctgatctcttgctgttgattaccatcgttgggtctatctctcaagtaaataacctacgagtgattatgtgtaaatagtattgtctaaacatagcatttatactttcatatttgaattgatttcttacgttaattaattgcgatcaatatgttctctcagttgtttgtactgccaagatttgcatcggccattggagaatgcaagcttttatcaacagggctttttatggaattc

SEQ ID NO: 238 - DNA, 94636 bp, Arabidopsis thaliana
gaattcttcaacgtaaacatatatatttttggttgttttaatcatgatacatatttttgtagaggtaagaattttttttatgtgcttgtaatgcaggcgacttgtcttagtgttgcatggtcaccatgggtaagtgtgctgagaactatcaatagtttctagaattattgatttgacttcggtaacttccttctatatcgagatctttgatccaagagagttcgagtgtcattaaaagattacaaattcaataggattgtttgtttttgttgaaaaatataggttccttatgccatgaccatgcttgtacccggagccatgtttgtgatgccatctgtaagattttaccgcatcattgtccttagtaatggagccttatacttagtattgtttaaatatatcttgaatttgagtataggtttgtggtattgcgtcaagacaagttggatccagtgaacaggtatgaccgtaaaagttattttcttcttccaacttttcattgttttaacgtttttcaagaatttttagaagataataaggaatttagagtaatatataaatgataatgagtcattccatttgttataaaacgattttgaggttgaagctcaccaaacttgatatagtagaagagtttaaacaaatgctagctcaacttgaaccgaatttgatctgaacgataaaatatcaaagttatcatataatcagttttcggatgagtggctagaagaatcatcatccctcaagaatgttagaaatctcacatttgaagtaagaaaagatctagagtaatataaaaaggatatgatcaatccactcttggcttgattttgaaattggaaatccaccaaacttaacaattaaattgtacggcttttaagatatgtattctgtcttgcctaacaattaacatattaaagaagaacaagattaactacttagattcactttttaaaatgtgccgaaaacaccttatatttaaacacgatatttatgcctttatttttgattaccatctcgttccaggggaaggtccaaggatgtatatccggggtaagggcttttgctcaagttgtggctccatttgtatatagtccattgacaggtaagtgaacacagtatcactaagtgaccaatgaacaccattcattaataactatcattaataaaacgttattcatcactaataagttttatagcgttcattggtcaatatcgagaaaataaagttttatttcctttaacaaatatttattttggtttgatatagctctatttctctccgaaaatgcaccattctatttccctggattcagcattctatgcatcgccatctctttggtattctttacatctacaaccatatcatcagttatcacaattatatgtttattattaataatgcatgacataatgacattgctttacatgcacagatgatcggattccttcagagtcttctgataaaagatcatccttctttgcccttagtgaacataacaatcaacaacccttcaaaagcggaagcttgacaagaaatatatcaagaagcaaatgtaactgtaatattgtacaaatttgcttcaaattaaaagttcatttaaaacgaatacatagctagaagctgtaaaaataacttagttttcttacaaagattgtcattgcaaatgaataaaatcacttgtatagtagttgttggcaactaagtacaaccggtcacatcaacatacatcaactaagtaaccaaacaaatataaccgtaaaaacaaacaaccgtaaatattttagagaagagatgcgataaaaagacaaccgtagaaaaataaacgaaaatatttcaacaaaagaattagatgaaaagacacaactgaaaaattaaccgtaaatattttaacaaaatgttgcattgacacaaccgttcataaatgcaaaaaggattgggataaaaagacaaagctttttatatttcaatgaaaagatgtaataaaaaagacaaaacaaaaaaaaacgtaaatattttagtaagaaattgcgataaaaagacacatccgttcgtaagtaaaaagacattacgataaaaagacacaaccgtaataaaaaaacaataaatatattaacaaaaaattgcaacaaaaaaacacaaccgtttagaaatgcaaatgacattacgataaaaagatgcaagtttcggggagaattcgcaaaacttcatgaaaatacgcgataaaaagatataacaaaaaagatcgtaaatatttcaacgaaaatttttcgttaaaaagatacaaccatttagaagtgcttacgaaagaaacgacacaaccgtaaatattgcaacaaaaagttgcgagattaaaagaaacaaccttataatctctttgatcatatgaatggaaaactaaatctttgcacacaaaaaaattcaggattttcatattattttcatgggatttttgtttaaatgggcacatttcagccaaaaaaataatgagagggtacattcttgtgggcttataagaatgagtacttatttggctaagaaaagacaatcttgtcaatactctttcttctttctttttttttttttttttttcttttttttccaaatgcttcatagatctttttctcccttattaattcaatagatccaattaaataggtttgtatataaataaatctatatcctaagggaataatgcttagggaacccaaagatttcaagacgcagattaaattaattttacatttgatcgataaatatattggtcggtggattttgattcggactgaaacttgtcaccagtttaggagtcgaggaaagagatgaaggcagtgtcactggtttttgattagcaaagactgaagatggaaggcgttaacggcggaaatgaggatcgacggtaggatatgttttcgatttgatagaacgatgtctaataatcgctaagtaattcaaaaacagatgttcgatggtgtatgtgtcatgttgtgatcagtttacgaattacgattagggtgaattgagagacaaatcggaactggagattgagggtgaattgtagagacaaattagacggttaaatgcgaataataaaaaagataaaaacgtcaatactgtgagaaaaatacctaattgcagtagcacatgattttgtgcctatttctacaacggcatacacttttgaagtgctttatttgtaactgatccttattttcatgcatgtgagtgatatcaagttgtactttgttgttttgaaatgcctagaaatgacaaaagcgtgtgggaatggacataatcgtttttacaaaattgtgggaatggacatgatccttatttatggtttgtacgcgacggataaatttttatttaattacgtaatcgtctggatttatatatctttaatgcagattgaaatatggcagtaccaaattttttgcatagtcttaacttcaaatcgatcgtagttattacaaaatgtcacataattcgtaatgtgtaattaaaaggtactccctacacaagagatggtgactaatgatcgagtcggccagaaaataccaaaaaagtcctcaaaagtctgatgtgatctcccatgcttcaaccgaatttttggaataaagaatagattggaaaaatatctgccacattgtagtattttcaagtaagctttctttgtttgttcaataatcaaaagcaaaaacaaaaacaaaactctcaacactttttgtgtttattttctgttattttgaatcgaagtcggcaagcataggctaaaaggtgatggaggatggaattggagggctgagacacatgttggcgacggtttttctttctgccttcgccggattcatggtagtaccagtgattactgatgtcaccgtcgctgctgtatgctctggccctgacgactcatgttctcttgccgtttacctcactggttttcaacaagtggtaccaacctagtctctctttgatttccatttcttgattgttagaagatttttttgtttgttttctttacttgaaacgaaatttggcatatgcttccaaatgtctgaaatcgaaaacttgcttttaaagatgatcggattttgcttttcttaagcaaaaaaagattataaagaacgggaaaaaaagttttatagaatatcatcctattttgttttcaaatctaatcaagttttttgactagtaacttttaacagagtaaattttctttgtatttaggtttactctgcatttgtgttttcacctataaatagaaaatagaaagaaaaaaatccagttttaaatatatttttctctctactttctttcttgtatttttatttactagcccggacattttaccagtaacggtctaagttgccgaccaaaaaaaagtaacggtctaagtttttttcttactaccattttatcacgagtttaattatattatgcaattctaagaaaaaagtaattattaatttcctttagatggttttggagaacaaaaatttctatgtagtttttttccgatcaaaacttgttttccaattaaggttttctatacaaaataaaaggttaaaaccatataatataaattagtatataatttgatgtaattaatatgctaaagtttttttaaagattttattactaaaaacaagctaaaaacaatttaaaataaataaatttgtttgttatgatactgatgaattttatttatgaactattaaatgaaggcaatagggatggggactatgataatgatgccagtaattgggaatctatcagacagatatgggattaaaacaatcctcacccttcccatgtgtctctccattgttcctcctggtcagtttcttgttttctttttttagttctttctttttcttacttttagagtcactaactcactaacgcaaataaaatgactcactaactatattaaagtatatgataatgtgtacgtcaaaaatgatattgcaatgtgctgtgtgcattgaaagtaattgcgtggaagtaaagaaggtttatgccccacttcaacacgcgcatgcatatatatcgtcatttgccctaccacatgtcttcaccgaacaagcaccactactttatttgccaacgcaaaattatgatttaaactaaatcgatctatatcaacttcaaataacaactttaattaatcttttttttttccctgtgaaactactttatcttaaatgttattaactatgcaaataaaccaacaaaataaattattgagtgacaaaatcttattttaatcaagtggtagtgggttagtgtttcttacttggtttgtatgtagtatagggaagagaccaattcatcgaaatagtaaaatcgtaaaatcttattttaatcaagtggtagtgggttagtgtttcttacttggtttgaatgtatagggaagagatcaattcctcgaaatcgtaaatttatttaatcactctcacttggccagttaaaatagtatcatgctttatgtatattataaataccgggagtgacttactcaatggctacattcatatcatgacgtgattagtaaaatgataatattgtggatcacatcctggttactaaaaacagaagtcttattttttggccatgcatgatgctccgacgaccgggttgcacaatgataacccatgcttgaattaaagattaaaagaaaaggttaaaagggaaactgaagtatctatagccatatataaaacactactggttagtggaatattgttagatgactttctaaactaactcattaacaatatgaccatataaaaatgacatgtgttaccaaagaaagttgtagaagtattacatggcatttattcgcattctcacttttttaaatattttgcatatttcatttgtttccttttctcttttaactttataaaatcacttttgaaatattgtctcatatatttatttttctatatattttcttattacgaaaagaaactttttcaaaaataatatgtggttgattctgtgatttaattttggcagtaattttaggatacagaagggatataaaattcttttatgtgttttatataagcaagattctgacctctatggtatgtgaaggcaccgttgactgcctagcttatgcatatgtggtaattactttatttttactttattttttccacaatgatttatttataattttaataaaatgttatgaaaagataacctcatttcatattatttttttcaggcagtaaatattcatggcagtacaagaatttcagcttttggtattttagctggtatcaaaacaattgctggactttttggaacattagttgctcgttttcttcccatagctttgacttttcaggtacatttttgatttttcatcaccaatattaaaactaactcattaaattaaatttaattctgatgcatgtgattccaaaatcaatgattttcattttcggattaattaggtttctgctatatcatttttcgttggcctagtgtacatgagagttttcctaaaagaaaagctaaacgatgatgaagatgatgatcttcatcatggtacgtatcatcaagaggatcatgatagtattaataccacaatgttagcagagccgattctgaacgatagacccatcaaaacacaagtctttcacaagaagtattcttcattgaaagatatgatcagcttgatgaagactaggtatgtttatatatatatgcttttatttttatttatgttctcatatattgttattcaaaatgatggttatgggtttgataatgcagcaccatattctttcaagcattggttgttacattcttcagcagtttttcagatagtggaatggagtctgctttcttggtttagctcataaattatataatcatcattttcacatattgagtttttcgttatattaatgaaataatatacgcatgacttttttctaaactatgcagtactttttgaaagcacgttttggatttgacaagaagcagtttgctgatctcttgctgttgattaccatcgttgggtctatctctcaagtaaataacctacgagtgattatgtgtaaatagtattgtctaaacatagcatttatactttcatatttgaattgatttcttacgttaattaattgcgatcaatatgttctctcagttgtttgtactgccaagatttgcatcggccattggagaatgcaagcttttatcaacagggctttttatggaattcataaacgtaagcatatttattttcttacttatgcttctatttacaccttacaaaaccttctttttataaagaaataatgaaatggtgcatattggggtttgtgatgtagatggccattgtcagcatttcttgggcaccatgggtgagtcagtcaaaactaggtacctcattctatgttttctctcaatatgatttgcttcttgttttttcttcgattttcgcaggttccttatctcaccactgtgtttgtacctggagccttatttgtgatgccatcggtaatttgacatttctattaattgatcattaatattactgcttttgctacttaataaaatttgtgaagaatcttacattgaaaatgaaataaggcctagagtaatgtataatataatgtataggaaataataatatctcacatctaaaattaggcaagaattttaagtgatatataatgaatggattatattggcctatataataactaaagatggacaataattcattttcaaatggtttgaatctgatgtctataaaatttaagagtttgaacatttttggctgcaggtttgtggtattgcctcgagacaagttggacctggtgaacaggtaaaaaccagtttcttgttatcattggtttttgatttttgttgtatcaacatttatacaaaaaagcacacaagttaactattgttaatttgaaatgtgtagggaaaagttcaaggatgcatatctggagtgaggtcctttggcaaagtggtggcaccatttgtgttcagtccattgacaggtttgtaaagccgtaagaacacaaactatatactaccaagtttcattcatttcttttgacacattcaataatttgattccatgtatatagcgttgtttctttcaaaaaatgcaccgttctatttccctggattcagcctcctttgcatctccttgtcctcggtatatatgaatatctcatctatcaagactaactttgatttgattgtatacgaattatgatggaccaataccttttgcatgcacagttgatcggtttctttcagagtctactgattaaagatgtccctactccaccattgaacaaagcaatcaacaaaacctcaggcgaggaagtgtgattatatgaactcatcatgtataaaagagaagagtgtatatatagccttttagcttgtgacaaaaatatatatgtaattgatctattcaaaatatgatcataacttcatgtgattatttgtttcttctaaacttgtttaagcccggcttaaatgagatcacaaattgcaatgattcagaaaaagtttagaactttatttaatttcaatttttatagaaaaaaggttttcaaaaattgaaatggtctataatatagaatagaatatagattagaaattaaagggatgaaaccggtattaggcgctcttaggggattctaggcgcttctacctcaattattatcttatttataatattttatttgtttgagtctattttccaaatttttcactatataaatttaaatttataaattttgacttcatacatgctataatgttatgaaatgaatgtttttgtctaattcttattaatgatttaacattttcgtgtttttcaataaatgtttttttttgtctaatctccatctttttctttttaaattaacaatcttatttgtaatattttatattatgaacgtataaatagtctaaaatcgtgtagataccgattatgcgttctaagtgctactgcgcgttaggtaacaacccgcatatgatatgctagtatccatcaattgtgggaatataaaaaactaagataaatggcaaagtgattagtttagttttgaacatctttaaacaaaattaaactttactagatttgttaaattctcgatattctttcaaaaacatgttttgtgttttcgctttctatgttttctgaaacattttcataaatttaaagcctaagtatactatttataaattataacaaaactttaaacctgctgaaaaccatttaataaaacctaaacatacctattataggttaaatattaaaattcataaaaaatatagatctttattcaaaatatgctgcatcattatcagtcgtaaaactagattaaaactaaattattttaaagatgacactgtaaaatgatctggtaatttggagaacatgtagatcgaagtaaaattttatgttattgaaactaatgatgttggaattaacattcaagaagaataattcgcctaaaaaaaacattcaagaagaaaaaaaagtgaatttgttttcgaagtttttctcttctgccacacaaaaaataaataaaaaaatacctcattactaaaaatatcatttgtttctatttcataaagtttctataacacaagtttatgatcccactctttgctttcaccttcatatatatacaacaagcggtttactaacaaagaaaaaaaaaatacaacaaccaacctcatactaaaacacagtttgctgtctctcatgcacttaagagttaagataacacacttaacaccaaaagaaaaggcacacacatcttctctataattaccttaaatcagggttttgtgaccaggcaggtggaactctgctcgagacaactgttggcatggttttaacattgatgtcaagtggatgaaaccggtattgaatgtcgagttcgaggaggattttgattacttcctcgatcaacaacgctcttcttgtaaatctctctcccatgttttgatggttaattttatgacatagccatattgctatcctcacaatgttcaaatcttccacatcctttacaatgacatcagcttttggataccaatactctggcttgctatcaatgtagctgcggttttcgcgaaaaaacgatcatattatcatcctgtcataatatataagcttaagacactagaacaagggcatgattttttaccttgatattctttgtttgattgcagcaatcttttcaggaggagtagtaatgtggacacagcatgtaacttcatctcccatatccggactacggttgtaattgtggatcgctttctgccatagaagaatatttggatacacaatcttcagattgtcagctctcaagaaaactgttgtgagaatgttcatttcctccaccaccatctacaattttgatcttgttaaattagcctatgtataaggtttagtaaatagactaaaaacaaacacattttggttttttagttacctctacagtgtcgatgagtaaccgatcaccaacatcgtaagggtgaatgatgaagaggaagatgattgactcgaagacggtcttgagagagttcccaaacatgaaggctaagagtacaacttgtgaagttagaaataaaagatacttggaagtagcgatttcaagaaggatcagccatatgactatgatgacaatggcagtgagaaaactaatcatgtgatggagtttgttcactgctgttttggtgtcattgagtgttaaggcaagtgctcttctctctctgaaagcatttacctaattaagcagaatcaatactttagtgacatatatacataatcataagaatcaacattttctatgaacaagaagtagtaccagccagttcttcaaggctgatttagtaatctttttggtcactaaggcgccttcgaagagacacattgtcttcatcgcctcgtctactcgcaaaaatctcatcaagtcctccagatatatgtgtctatttatatacattcagattatggatttattaggtcctaggaaagaaatctttttaaagaaagtagagaaattgtatactcactttgtgccaggttgagctacgttcttgaaaatcttccttgcagctgctttagcttctttttcgctccgtatctgtcgagtggattcatcttcacacgtgttttgaagcgcttgttcgtccaacgtactcagggaaacatttctcacaatcttcatcagtctcttcatgttccaagctgaaacgtttttctgattcatcttgtgtaaatcatccattgtgattccgttatcacttcccgtctttggaatgattggagagaacttcatgttcattgtacttccacttttttcctgaggaaacgcagcggaacaaagttcaggtgataaatcagctcctcctttctgcatcttgtagatctcatcttgcgtccgatcttcctcttcctcaatcctgcttaactcaagcattggaggtccagataacgtctcgatcaagtaatgatgaaacagagcttcttgaatccgatcaaagtaggtactaacgtggaacgaagaggctagaactttcaccaccagtgtcttgatcagccataagaccgtgctcaacaaaaaacacactaatattttagacataagaagaagaacatcgctttgtgtttccttttctactttcttgtcaaacaagaaatgccaagcgagaagcacgaggccgagccagagacagttctgaacagcagtcttcacaccgtatacgaagtaaagaacccgtttcctcaaaaggaagtttctttcgataaagaagacgatgattcggattccgcatcccgaaaccagcctcccacagatgagaaccagcaagaccacttcccatttccacagatgaaggctccatagagttgcatttctccaagtatgaagccctagactcaacactaacgcaactacgagtgcgattaagctcatccattgaagcaacgttatcgcatccattttcaactttcgatattccactggaacatcttcttcagccgaagaatcatcttcttcctcaatatcatcggagtgtctcccaagtaaacctgatcttaactgatccgatgtcccgatccagctcgagtattgttgttcctcttcttgtggcggatctatcaacctcgatctcgccttcgccctcgaaactagctctgttttcctcaccgatgaacatcttacaaccacctctccttcatcctccaactgctgctctaaatttaaccgcattgtggccgatgaaaacgaagtcgaagatgtacaagaacgtacagaaccagacatattattagttcctgaactgtttattttgaaaaagactctcgtttctttagaaccggacaaattgttgttgttgctgacatcctctgtttcctctgtttcttcgtttacatcgagtgtgatctcctcacggtattgcgggaaatcgaaactcccgctctttgtataatcatctgttgcaatgtcttgccagaacttatagctgtttccatcgaaactagacccagagctctgagttttagcaatgtcgccatcgtcaagattcgccagtttcttcttcttctttgtcttctcgttttgatctccggtgcttataatctgtttatacgagctatgagacttaaagggtttgcggaattccatcagaaaatcaaaaataatcgaaagaaaaaggaaaagaaaaacacaaaatttagaatctttagaaacagaaacagaaactgtgaagatgatgaacaaaagttacgttatagtttggaaacaagagttacgagtattattttgttctctgttacttaacttactaacaattataatttggtttaggagtttttaaaaccactatgagttggataatgacttaatatagtaattaatttgtcatttgataaaaaacgatcactaaatttaatgaaggtgttttacacatctcatgttctaagtttggactttgattgttttcgttttagggtgggcacatttattaacatttaacaacacccaacacaagatttctcttagtcattgcgtgcatacaatattgttcttgtttcctttcgttcttatcttcatcattaacaaggttatacgttggttttgattcttttctttgttgtttattaatatctctgcttaacaggcaagaactagcttggttattgaataatgatttcaatgggtagatgagattaggcttaagtttgaattagggaagattaatttagactttagagattatagttgctacttaatcctaagcacatgtaatgtaagagtagagtcatagatacttgattgattcgggaagaactcttgaattgtgattaatgaatcttgaaaaggtcaaaattgtggttatatgaactaattaattagattaatgtttgtttggttacaaaattgttgactcctttgaggcaaaatgaaaagtgttgtgttgttcatcaaaatttcaggcaggttggttttgtgaccagccaggtggaactctgctagagacaacggtaggcattgttcggacattgatatcgagcggataaaaccggtgttgaatgtcgagctcgaggagtatcttaatcacttcttcgactaagacggctcttcttgtccatctttcagccatgtcttggtgattaatcctgtgacatggccatattgctagtcttactatgtgcaaatcttccaaatcttttacaatgattttggcttgtgggtaccaatactccggcttgttgtcgatgtagctacattgcggtaagttagttagcatatcggtataaaaacgcgcataagcataaaaatatcggtaagtcttacttcgatattctctgtttgatcacggagattttttcaagaggagtagtaatgtggacacagaactcgattgcatctcccatatccggactgcggtagtaattgttgattgatttctgccacaaaagactattcggatacataatcttcagattgtcgtatcgtaagaacacggtagtgagtatgttcatctcctccaccaccaactggatttcatttcattaacatttggttagccagtttacaagattcttgcgggttacattgcaaaggcgcatgcacatacctgtacactgtcaatctcacaccgatcaccaacatcgtaagggtgtacgatgaataagaagatgatggactcgaagacggtcttgacagtgttcccaaagatgaaggccaagagtacaacttgtgaacttacaaagagaagtaccttggaggaagcaatttcaagaaggacaagccaaatgacaacaatgactatggcagtgacaatattaatcatgtgatggagcttgttcactgctgtcttggtgtcgttgagtgtcagggcaagagctcgtcgctctctgaaagcattgacctaatcaaagtcaacaacggtgtgatatatatacacagcagaaattaatctggtgaatctttttctaataagaccaatgcagaaaaatcaacaattaccagccagttctttaaggctgatttgctgatccttttattctccggtgcaccttcgaagaggcccatggtcttcatcgcctcgtcttcccgcaaaaatctcatcaaatcctctaggtaaatgtacctttagtcattcagaggagtctattagtgaaacttaaattggattcttttaatgaaagtaattgaaaatgtagactcactttgcgccacgttgctcaacgttcttgaaaatcttccttgcagctgctttagcctctttttcgcttcgtatctggcgggtggattcatcttcgtatgtgctttctagcatctgttcgtccagtgtggtcagagaaacatttctcacaatcttcattagtctcttcatgttccaagcagagatgttcttatgattcatcctgtgaagatgttccatgctaattccattatcagttgttgatttcgggattatcggggagagtttcggattcattactctcccgctttttcccggtggaaacgcagccgcgcaaagatctggtggtaaattagcacctgcgttctgcatcttgaatatctcgtcttgcgcccgctcttcctcttcctcaatcctgctcatttcaatcatgggaggacccgataacgtctcgatcacgtactggttaaagagcgcttcttgaatccgatcaaagtaagtactgacgtggaacgaagaggccagaactttaaccactagtgtcttgatcaaccacaagatagtacttagcaagaaacacaccaagatcttggttacgtaaggaagaaacctgctccttgtctccctctgtactttcttgtcgaacaagaagtgccaagcgagaaggactaggcctagccatagacagttctgaacagctctacgcacaccgtaaacgaagtaaagaacccgcttccgcaaaaggaagtttctctcgatgaagaagacaacgattcggattccccaacccgaaaccaacctcccacatataagaaccaacaagaacacttcccatttccatagatgaagattccaaactctaactttcttccaagactgaatcgacaaactacacgctaatgcagctataatagcgactaagctaagccactggagcaatgtaatggcgtcaagcttccctcttttatactcatctggtacatcttcttccgctaatggatcatcctcttcatcaatatccgcaagtaacccggatttcaactgacccgatctccaacccgagtaaggcgtttcttcctcacgtggcggatcttgaagcctagaccttgtcttcactctagatataagctctgatttcctctgaaacgacatgttcgaagtacatctcacaacctcttcctcctgcagttgcggctgatcctgattcgtccgcattgtcgcggacgaagaagaagacgaatgggaagacgaagaaggaaccgaaccagcgacaaacgcaccacccgctctacgaacgttaaaagagactcgcatttctctagacgcatcaaacgaggttcgagccgttgatgtaggcgtaggcattgtttggtgacttacatcatcattttcttgatcaacatcaagtgtgatctcttcattatttctacctctccattgccgattcacaggctctccagcgaccattttcgttggagattcatcaaccggtagcttcccgtgcacgaaatcgaaactaccgcttaatctatcgccttttcgactaatagcgattggatctttatcacttgttctcaccgccgtgtgatccgttgacgttccagtagtgttgtcttgccagaatttgtaactggcatcacgttctacaggcgcgttacgaccatcgtcgaggctagaacgagtgctgtcgggtttctggtcatcgaccaccatgccggaatgatcaggatggtgatcgtggagaattggcagatgttcagggcttggctcgctttgatctccggggcttcgaatttgtttgtatgagctatgagatttgaaggaatttctgaaatccatttgaaaattaattgttattattaaatctaagaagaaaaatttgcttaacaaaattacgattttttagaaaaaagaaacaaaaacttcgccgattgttgtgatgcatggtacaaaagcttacgttaattaggaataaacgttacgtgtacataatggcatgagattataaacaaattacaactattatattatttacgataatgtttttttaacttactatgatcaatactggtataagagattcaaatctttatagtatagcaaataaaattcatattaaattgaaccaaaaatgataattaaaatccaaaactatttcaccttaaatattttattttcttttatcaaactctaattattacaaaaacacacacaacacaatctctagatatcctttattcaaataatcaagaccagagttaaagaaacaagagatgattagaacaacaacatcaccaacaacaacaacacaacactaataacaacaataaccataagaactaagaaagaaaaaaagaacatcaaaagaattaaaacctcaagtaaagatgacgagaattggtatttacccaaatagcttcagaattatcagtcttcttcacttgcgtcttcttcactctcgtcttctgcatcctccatttcaacatcaccttcgtctccaagaatccactgttcaagctcatcttcttgtgcttctatgtgttggtgtatgtctgcagagtcccagtcgtcttccccatcatttccaagctcttctccacggcaagagacctgcaaatgtggtcgtctccttgccaaagcatctacgatatctctgtttacacttcctgtgatccctaaccatttaagcctcgggaaaaacggtttctttagccatttgaatgagagttgcgtgatgccaccacagtcgtaaagatccaacaagcacaggctacttccaggacattcgtcttcgtaaacccgggtggatgcaagagccatgactgaggcatcacctatgagtctacattctcttagttgcagttttgtgattggggctccagattttgctagagcaaaaatggcagcatccgttagattaggaagattagacaagtcgagttcccgcaacgccagttttgaggatccgtcaaataaggtagacatgaacttatcggttaaatttctgcaccctctgacagataaagaaactagggagtccaaaactccctcttttaggtacgaaagccctgtgtcgctaatatcagcgccatcaagaagtaaaaccttcagttttggcagatgagatacagctgtcaaggtttcatccctcaggtttctgcaccctctgaggtcaagattctccagcttgagacttgatgccagcttttgaattgcgtggtcagtaagaagatggcaccttcttaagctaacatgactaagcgaaagagtagttgctaagatgtcatggaagacaagatccgtcaatttaggtccatgatatatactaaacttggagaggctagcgcaagagtgaagaatagtcttgaaaccagcatctgttacccgacaaaagccaccaagacaaatggtttccattcccaagcatttgtcagcaagaaaaagcattccttgatcactaactcgccggaagtaagtagggtgaaactcctggctacggattagagacaggtgcttcagcttaccattctgattgatctcatgaagcccaaaatccgtgaggtctgatacttgtcttggatcctcaagaggcgcgtctcttatgtccaaatctatcaaagatggaagagatttcgatatcgccttaaccacagcatcagtaatacaatccactgagaggcgcaaccgctggacattttgtagcacagtagatgtagtaactcggttgctgtcttgccccgagatttcagttgatgtgagtagctgagtcatcatccttgacgtgatgtgtcctagctccagatgagtcaatctatcagataccaatccaaaaatgcgaccatcaccaggacgcagatacaatgagaggtcaaacatgagtgctaagacctgccaaatacaacacatatggcatgattccattacacagacaatcaacactagataataagatcaaaagagaatctattaaggattcaaacctctaaatgggagcaaccattaagtaaatcctccaaagcacaacggctaatacttcgaccaactttctctgctactgaacccaaacataggagcctgaagtttaccaatccgtcagacacagcaacagaaagattcctcatattatagcagatgcatcatcacacacatacctcaaatccttgcatttcctaccaatttcggagatgagatctccgctgaaatcccgacaattgtgaagagaaatctccctcaaagaaggacgtaccaatatatcaatagctgaattaccaagccttccacaatcaagcttgagactagaaagttgttgattcggaaacaacaatggtctaacagtttccattgacaatgaaacattctgaaatccaaaaagactaaaactttttatacagtttcagtttgaaatcgaaatccaaatcaaacccttaaagaaatgtggagacttacgaagatgtggaagttgggagtgaaggtgagaacacgagtgacacagctcttaagtgttttgcaagtagaagccaacgagcagagagacgcaacatcgagtttcgtcataatagtctccaagagagccgccggtaacagatccaggcttctctcgccatcgcaaccctcaacatctcctcctccgccgcatacgacggtggtggtagccatcaacggagtctctctttcctgatcaagtaaattgcggaaattgtggcgatctcgggttgtgtccgaatctcatctttaaaaagtccgaatttttagatccatttttcatggacattaaaatattgatatcagacaaaacggtaacggtttatttcggtttgttcagttagatttggttcggttatagttaaatttgattcggtttgataaaattatggctcggctcggtattagattcgggtcgggtcgggtcaaatctcaccgtcgataactgttatcgagttttcatttctgaagttcaaagctattcaatttcatcaatggtggattggtctacactaccgaaggatcttttagacctaatttcaaaatctctagaatcttccttcgatctcatccaattccgttccgtttgttcttcatggcgatccgccgccgagccgaaaagtcctcttccaacacatcatctcccgatcctccccgataacggggggagtctcttccctgattccgccgttggtttccgtctctcgcagcggagtatcttacttatcaagcctcatgaaccgtgtatcgaatcggattcgtttggatggttgatcaaagtcgaggaagatcttaatgttcctcgtaaggtgactcttttagatccgttatgtgatacaagaaactcaattcctgagaatttccctcgtgttctcgatatgtccaagtttaaggttcgagaattgggtcgtgaattcaagcttcattatttcaatactgttggtgatattgtagagagtttgtatttggagaaagctgttgttaagtatctagattgtgatggagattataaatttgtgttgcttacgattcatgtttcggggaagttagctgtgtttaggtcttgggatcgagcatggactgtgattaatgacatgccttctccttatgatgatgtgatgttgttcgatggacgtttctttgcggttgataacaacgggaggactgtggttgtggattacagttccttgaagttgacgttggttgcgagtcctgtgtttggtggtgataagaagtttttgattgaatcttgtggtgaaatgttgcttgttgatatgtacttgagcttagaggcagtggaaggggatcctggatttgttgaggagattttcgagcatcctgcgttttatatgaatgagagaacagtcaaatttaaagtgtatagatttgtggaaagagaggagagttgggttgatgtttacgatcttgaggataagatgttgttccttggtgatgattccaccttttctgcttcagcttccgatatattacctctatgtgatggaagctctgtgttcttcaacggtaatgtcttcaatggggaagacttgggtgcgatgcaagatcgagatttgggagtgtttgacttcaggagtgggaaaatagagctagtgcaaaaactccctgaatatgctaagctgttttggcctccacctccttggataacttctcatgcggtcagtagtttttaatctgttaacacctgaaataccgtttgtttaggattgtttgtttatagttgtgtatacactaccttgcaattgcatcttgtggctatggaaactctgtgacatattcgttgtatcaatcaatcaacatctttcatatttgccatattctcttaacatgcattgggtttctggtcagtttcatgacttttgatgatggttgaacagtcaaatccatattttgccttactgccattctgcgtttcgttgtatgttagtcacactaaattttgctcattgctaatatgcgaaacatttactgtctcagcgtgctgaagatcatattggagaaacatcatcccaatcttgaaaaacatgtgtataatccaaagttgaagaagattggagatgctatggttaaacggtcttacggaggttaatctctctgacatagaattaagaatagagagactacaacttgaatcacatgtttatgtttttatcgattctaagcttttcactagcttgacgtctgtaaattagagaaccgttctttgtaatcttttttcaccaaagaatgatgttcgtcggagattccaactcatgttatctccaaaacaatttgcgacacttacggtaagaacaaatttactttgtaaattcatctttggttatcacagtaaatcaatcttttgaaattctagaatttctgaacttgaatttgacgatgacagagctgtaccattaattagtcgtcacactaatccaaattgcttaaccggtaccaaattatttaaccgaagtccggtattcggcgatgcggtctagtgtgttcggatgagtcataacgaatggataatgagtgatggtggataaggatttacggcaaagaaaaacagaggcaaattcgttaccagtttaaaaatggcggctttgatccagaccatccatggtggtaaacccaacttgtaaactctcttgtgttcttattgattctttcgatttcgctatctagtggtttaaaagttttccccttttttctgattactgttgtatagacaagaaactagaattgttgaaaacgaattccggtttaggttcttattgggtaaggtagaatccctaattgcacagtttctctcttaagttcacatctcgtgttaaagtacaattttttattcagtttctcagtgtagcattagtttctctaattgattggaattgaattgggcattttggcattaaacgtatgtaatttagcaattggttctcagtttctgattcaattcatcgatatgggttgatttcttggtctgtacttggttattcatattgagcactatacaatgcaggtgtggttgttaccagaaccttgactcttgtttatccttctacctttacgtccagacacaaagctctgaaccagatgacaagtagcagtaacagcggcttgcgacggttcctgttcactccgcctcagcggctaagccaaggtatctgttactggggagcagagctaagcaacaatgtgtcatggacttacaaaacgaaaatggttgttcgatccaaggccggagcagtgcctctgatgaagcatggcgaccggtttctctcctctctctcgtctccagccttagctggtgatccgtcagcgataaaccgacacattaagaagtttgtggctgcttcacccaaatcagttgctctcaatgtcctctctcatctcctctctgatcaaacttcccatcctcatctctccttctttgctctgtctgtgagtctttgcttttttttcctgtttctctcaataaaatattgatgaaggtaaatgactttatattggttgttgttttcttctccagttgtattcggaaattactgaagcgtcgtggtttgattggaatcctaaactcattgctgaacttattgctttgctcaataaacaagaaagatttgatgaatcagaaacgctactttctactgcggtttcgagactgaagtcaaatgaaagagactttactctcttcctctgcaatttggttgaatcaaattctaaacaagggtctatacaaggtttcagtgaagcatcttttcgtttgagagagataatccaaagatcatcatcagtttatgtcaaaactcaagcttacaagtctatggtttctggattatgtaacatggaccagcctcatgatgcggaaagagttatcgaggagatgagaatggaaaaaataaagccgggattgtttgaatataagtctgttctatacggctatggaagattaggattgtttgacgatatgaacagagtagtacacagaatgggaacagaaggtcacaaaatcgacacagtttgttcaaatatggttctctcttcctatggagctcatgatgcattgccccaaatgggttcttggttacagaagttgaagggttttaatgttcctttctccataaggacgtataactcggtcttgaattcttgtcctaccatcatatcaatgttgaaagacttggatagctgtccggtttctctttctgaactgcgtacttttctgaatgaggacgaagcacttctggtccatgaattgactcagtcatcagttttagatgaagcaattgagtggaacgcggtagagggtaagttggatttacatggtatgcacttgagctcatcgtatttgatattgctgcaatggatggatgagaccagacttagatttagcgaagaaaagtgtgtaattcctgcagagattgtagttgtttctggatctggaaagcatagcaatgtaagaggagagtcaccggtgaaagcgctggttaaaaagataatggtgcgtactggaagcccgatgagaattgaccggaagaatgttggtagttttattgccaagggaaaaactgttaaagaatggctctgcaaatgaagatttataactgtatattttgatcacaatttgcttaagattgatcaggaataagttttgcttggaatccaaatcaactcttggtgtcaaattttccaccagaactaatcaggtgagtcgaaattttctctttacactcttaaaattacctgcgtggtagtaaaattctgaatagctggttttagaataagagaaatctgaacaaaaatcatttcagttttcaagtatgtatgttaaaccctagagctctgtgaaattttaacaatagtttgtttgtttctgtttctggtgtatctttagctatattccatgaagtttctagtcttgaataatgtgtatagtttatttcaagcaatggctctggagctttagtttgtttaaaagtgcatctgctctagtcctttgatttggatagcaaataagtgaaagttcttgtccctataaggtttcttcagattaatggtattgatttctcttttgtcttcttaagatttttattcaagagagaatcttggatgtctgcttttctcattcaaaaatttgtcttcaaaaagtgatttttcatgcttgaccttgtccacctttgaactctattaaagtcaaccgatcaaatttgaagaaaaaaaaaagcttttcgtttcacccatgatggattgggcaacactgccaaaggatctcttagacctgatctccaaatgtctagaatcttcctttgatctcatacagttccgttctgtatgttcttcatggcgatctgccgcggggccaaagcgccttctctgggcacataacctcccgttcttcccctctgatgacaaaccctttctctccaatgtaatcctccgcgtcgcgcaccagagtattttacttatcaagcctaatgaaccgcaatgcgaggcggatctgtttggatggattgtcaaggtttgggataacatatatgtatctcgtaagatgacccttctcaaaccgttgagttcttcaagaaactactttcctcagcatttacctcgtattttcgatatgtctaagtttacggttcgtgaattgtgtcgggaagtcaagctctatcatcctgattactactgtgtccctggacacacagctttagagttggagttggggaaaactgttgtcaagtacctaaatgatgacaaattcgtgttgcttacaattcttgaatatggaaagttagctgtgtttaggtcttgggatcgagaatggactgtgatcaatgattacataccttctcgttgtcaagatttgattatgttcgatggacgtttctttgctatcgactacaatgggaggactgtagttgttgactactcttctttcaaattgacattggccgctaatcctttgattggcggcggtgacaagaagtttctgattgaatcttgtggtgaaatgtttctggtggatatagagttttgcctgaatgaaaaaccggaattcacagggggtttctattcgtattttaatgagaccacggtcagttacaaatttaaattctttaaattagtggaaagagagaagagatgggttgaggttgaggatcttggggataagatgtttttccttggtgatgactccaccttttccgcttcaactgctgatattatacctcgctgcgtgggaactggaagcttcgtgttcttctacacgcatgaggaatccttggtggtgatggatgatcgaaacttgggagtgtttgatttcaggagtgggaaaacagagctggtaaacaaactccctgaatatgccaagttgttttggcctccacctccatggattactacttctcatgaggtcagtggtttccaatctctcaaccacccgaatagagtgtatttacatttgcatcttactacttcttttttaccgcttgtctcactaacttatgctcaaatatcttttgtctcagagtgttgaaaattatactggagaaacatcatcacaatcccaatcttgagtttaagaccttggagatgacacttcaacttgaatgacaatgtttatatgtatttttccaactcttgttttttcctaaacaatttgtatattcatctttcaaaagttttcttatgtctaaaccgaagtccgctatacaaagattttgaggaaaactggaaaagtgattttgtgttaaaatcgaattagttacgagaaataagtcccaactaaaacaagaactttatttcgatgaagcctgctttactttaagatggtgttgattggtgaaaaactgtaaagattggctatgcaaatgaagttgtaactgtgaatttaatcacttgaattcacaagttctcagtgaaacagagaagagtgcattaaaattttgtatgatatgacacaaccagtgaaatacagtcaccttgcagtaaaaaaaagctttatcatgtatgtggtgattttttttttaataaccaatcactttaatggttaaaaagttcattttacaatttacaagtttggttataaagtgtatattagatgcttcttattttgggaagtttcgttaatattgctgtgttctgtttactgaataatgttcggcatttgaagacaaaaaaactaaaagaaagtagctttttctgaagtttccgagaaattttcatatgtttgtcatatatattcttcctagccccactagtcgaactcacttgtttttattggtgaattgtttggtcttttggtaacaaagaaaacgatttaaaatctataaattttatatctacatatatctactttacatttattgaaaatacaagaaatattagagtttttttttcttagttgtaccatgaaattgaggtttgagtcgtgttgagttctttaaatggaggtgctccaaattaagaaaatatatattgggagtctctcacttagaaagtagtatgggaaaacatatctattattgaactgcagaatgttgattcaatgattaaagattccaacattaaaaccaccttaaagaaaaataagaagccggtgagataacaacacaaactattggtactacaagatttggctaaaataaaaaacacgttagtacataaccttataaaactaatgtaagaggctaagagttcatgcttttcttttagattacacataatatttaaaagctaaaatgaaatcattttaaagcctgaataattgtttttgtccattcatattattgataaaaaatgatgttacattttatttaattatatatatccacatcagtttttttcttagttttgactacaacaaaaaaaatagttaattttatagaaattttttaaaatatttgttttatgttttaggttgtgtccaacaaagacaaataacttcaagtctttggaggagacttcccaagtcaatctgagattaaacaaaatggtggaagtcccacaatcaaaaaagttatattcatttttcacactaaaatatgatcaaactaattaattacaaaaaaaaaagaagaagaaaaaaagtggagtaaacagaagaaccaagctctggtccaatcctcatatgaccatttctaattctcttaagataaaaccgtgtgggttccatccactttgatcaagacctttcttcttctttcaagtaaacatcacaaacctttaagaaatatgaaagaaaataaaacacattataaaaaatctcacaagacttcaaatttcaatatgttaaatcattcatgcctccacatacagtatttttatttttctctcttgacttagtcttctccatcaaagtattgccccacaaagaaaatctttcacaacatattcggtcctagttgtatataaatgtgtattgattcacctaagtgataaccaccaacaactttttcacttacacagctttaaaaagaaccaaacctttataagtgttttttagacattgggagagatgggaaaagatattgagctcccgggttttaggttccacccgactgaggaagagcttcttgatttctacctcaagaacatggtttacggtaagagatcgagtgtcgaagtcattggtttccttaacatataccgtcatgatccatgggacttacctggtaagtacatggcttcttcatttccctaaagattcttttttcctctataagccgtgtattgaaagtctgaattttgatcacaggtttatcgagaatcggggagagggaatggtacttctttgtaccaagggaaaggaagcatgggaacggtgggaggccaagcaggacaactgaaaaaggatattggaaagcaactggatccgatcgtaaaatcataagcttgtctgagccaaaacgtgttatagggctcaagaagacgcttgtgttctatagaggaagagcaccaggaggaagcaagactgattgggtgatgaacgagtttcggatgcccgataattgctccttaccaaaggtaccttaaaaaccaagagctttgtcttgaaaccattatgtgaatcaagaaaacttgttgctcatcttgtgatcaattttgtaggatgttgtgctttgtaagatatatagaaaagctacttcattgaaagtattggagcaaagggcagagatggaagctaagatgaatcaaacatgtcctaactctcctctttcgtcttccgagacgatttctttcgttggtaaagaagaaaacatgatgacttcgttccgtgctcctcaagtaatagctatggaagaagcaaacaagatccaaatgcatcaagaaaacgcgaaaaccgaagagaaacaaagagaagcagagaccaaagaaccttcttcatcactgaagctaccgtttggaagtttaccagagctacaattaccaaaaccaggagtagaatgggaccagttgttgagtataagcccatggctccagaatcttacaccaatagttaacatatattggtaggatatgtaaagaacaaatacatttaaatattcttactctcgtaaaaaacagagcttgtaccaaatagtatttactaaacttttatgtatcttttgtaattttgtaacataagaaaatttgtaacactatttatagtcatatttgacgatcatttctctcatacatataacaagatagattttgagtttatcattacgtatgtggaatcaatggacgtagctcttgttttgatctgaaaaaggattgtatcttggccttacactgacttggtgggaccttagaagggatgatcccaccgttgacctcaccgtagacctattaatttctccatcatccacttcttcttctgcgtaatttgctcaatgtgggtgactcactcgtgaaggtccttgtcttgtttccatccgtaaacaaatgtggttgatcttggacggttctctcggtgagtgaagctaacggcctaattctctgttttcgagaaacagaggacatataccctagaggcagattttactaggacttatccatggctagcttactagaaaatttaatctgtcaggagtcaggactacaagagaagaatgaaacaatttgtgaagtctctaagtctctagggggtagtggatggttacataatacgtaagcacacggacggtggaaactaaagtttgatcattcctataatcatactagaaaactgtagaaattatccttatttgcatttcataatgtggatttggcttcatcttgggttttatgtaatcaatgtgtattgggatgtggttgctgtgcagaatgcagacaagatccggaaacatgcaagaatggtgctgttatcatcttccctagggagacaagcaatgctagattggacatagaactataccaacgcgttcgacaattcacattcactttcatgcatgagatctgagtcatatatctaccaaataagggaaatgagttatggaggggaacattgcagagacattaatgtggataatttgatattggagcctcatagccaccgtgatatcatcatgtctctctttcatgaaggtgcatataagtattgactggacatggtgttttggagatccaacctattctatgaaagaaagcgcggagatctactgggagaggtcaaaaaatacttagcctcaagaaatttcaccaagaagacagtcatcgtcaaagtacaagagtctttgacggttgcgcaagccaaagataacaacaatgaaaatttggctgtctttggacaagcagaagctattacagttgctctgcatgattctctacttagctacatgtctgtatcatagaattttagcagatggtcagtcgccttaaagctaatgaagaaaatgaaaattacgtgtgaagagcaagcaaacaaattatctagggttgactccgaattccaatccaagaagaccttgacgatggaagatgttcagaccctagagtcatcattcaaattttgaagatggactacaatccctttcatattttgtataaaaaggaaatataattacttgtaaatgaagcatagatatatattgaatacaaaatcttctcatataaatctgttttaccctcaagttccactctttaatctttggcaatgaaatattttcttttatggcagcgaaatataacgtttactatttcgacatatcatgtggtatcattaataagagacatatttctcaaccattgagctacattaatatttaagtattatatcagacataatgtatatatagtaaaaataacaatatataattaattagaaatatatgcaattaattaaaaataacaaaactaaataaaatcaataaccaaacatatacaaatattaaatatacttaccataaatatatattttaaaatttcaaataattaattttatatgttaagatttcttctatatttgtaaaattattctaaatgtataaagtctttctcacataaatataagattagttttgcaaacagaattttgttcaatcttagtttataaataattttatttaaaaacaaatacatatatttgataaataatttgtatttatagcataatatgtattagataaatataaaatacaattattccatcttgaaattggtttgatattcatagttagatggaaaatgtataaatagaatcattttaattaaattataagaaaatgtgataattgtattgaatggtacatatatatttatatgaacacgattgcataaagtttaggtcacatatttaaagtgtcgaaatggatgaattaaggatcttgtctgaatcctaattttgaattggtcctgcattttcaatatttgatcatagtaagtatcggtaggaatatacgaagatgtgacatatgggaaaaccaaggggcaaaacatgaataatattgattttttttaaggatggcagcaataaataagggttttgcgccaaaacaattcttccaaataagtttttttgcacgtcaaataaaataatgcatatcaataccacaattttaagaatcacctgcaatataatctttccacgtgtaaaaataaatctgtatatacattatcaaaccctaggacatcgtaaaagaccaatcgagatacaactgaatttaggtaaagactaaatcttacaagtcaaatattataagtgaatggatcgcgatgaagcaaatatatacagagtttgaacgtaatcacttgtggatcacgtctcgtagtataaagcgtgattttaaaataagaagaaacagataaatcaacaaaaatgcatatacatgccagattggaatgatgcgcacaccgttcatctcatcgtaaacgtttctcttaaagttttccatgttctcctcttcctggtaaatgaacaataaaccagcttcatttgattccaagatattcatttgatttgagacatccacaacagtcttctcaatcatcttcgctttgtcaaccctgtcaagatttgggaaaaaaaagccgtctccaatcaaatggattactataacagctacgtaatgaagttatatcgatagctaatcttaatagtgtatcctgaatgagatcatatgtctcatacgatctgagagtcctgcataataattttcaggactaaaaataatcaatgttgatgatgacatccatgcatagagattaaactacgaaccagtattgggaagattcaccgactatattgacaatgtatgccaaagctctcatccatctcagctctggtttctctactactttccccaaataggtttccaccaatctattcccaatagttttggcttgcttcattacatcagatgtacccatttcatagtaaattggcatcactctgtttcccaagttttcttccctccaccttatgatctccaccaattcatccaagcacttacttgaagaaacatagtcttttgatagaatgacgactgagatacttgattcttctatggcttgtgttacctcgggacgactcatagacttgcctcccatgaatccactatatactacagtaatgccaatccattttaatttcttgattaaatagctgacaaaatatcttgggacatcctcactgaagctcaaaaaaacctgatggctccgacgttgaagcaaagaaggtgatgtgagataagccgtatcggcttggcttatcttttctgggacatccccttgtttggtttttgagatgttcaacctctggttttcctaaagaaaattcaaattcaaatcatcactacacgaagcaacaataattacaacattatataaaacaaagtccaaatgtaacttcagaagcttaactaaggcaaccaccaatgaaatatgaaacactcagatgtaccatttcaatgtcttctgatcccgagaaacttcgttttcgcttcttatacggtggtaacaaggcaaaagacggtcctctaaagtcaagatttgtttggtctacgttttcagtaattgcatatactccacactctgtaacagtgcaacaatcatcaagaatcttgttctccctgctaaccggaagcaattcaaaatgaaccacatcatccaatatattgaagtcatttccatcaacaacacatggatgcatcgagacatcatagaagataaacatgtgacttttttgaacaacttcctttggattccaacaagaaaaaattctttcaagtcgacgtgaaaggcctttcttgtttttccagctacagacacacctgattccaaaaccggcattactgtaggaatcattccaaaatgcaactgcaactgatatttggaaccccaaaagcgtttctatgctaggagttaaacgtatcatcacagatgaacctcggtttaagtgaaagatgtaatttggatcacggaatgctggaacagagaaactgaatgctggtgcttcgatgagcttctgtttcaacaaggcaaaagaagtcatatatgtgatatttttcttgatgtatacaactaatatgtgtgtagtgagagagagggacggtacctgcagagtatgatctatgaccatttgcgcaactcttgcttctaaaatctccctaacgatgtctggagaaatctcaaagcaattgctgaatgtgcaatgtctaggaaactgttggaagctcctatgaatattttttagacacacacaaccatgtgcattcaaaaactctagactttgaggaagctctggaagtgattcgaggtttttgcaatgacataatataaggctctccaaattgcggaactgcttgatgctttcaggaagtttaccaaaattgtttccactgagatccaatgtcttgagtgaaaggagattacatatctcttgaggtatatgtatgtcaaggaggtatgctttactgagaaacaaagataccatggcatacatacggaacactagggaagattgcaactttgaacgatatggcgtggttacaaatggcataagcttaagataaaatttagacccactcttttccattggagtgacatgtcttgttctccacgtctctaaaattaaggtgacgttacatggaggagttccatgtaacatcactttgtcggtcccatcttcatgaagttgtgtaatgtcttgaagtgagaaacctaggatatacttcagctctaagcagccagatagatccaccctaactactgattcgaaagattccatttggagatgttgaagcctttcgcagtgattcaaatctagtgaaaccagtttagtgagatcctcaaatgatgatggcagtttctttatgggggtctcggctagatttaaatgtctaaggttccgtggaagatcggggatactcctgagctctgagcagccagataaaattaacatagtcagagagatcaaattacccattcccataggcaagtcttgaagcttcttgcagttctcggcatcgaaaacaacaagttgagtgagatgacagattgatgatggaacttctcttatagaggtcccagcaagatatagctctttcaggtttgttgggagatcttgaatattctggagctttgaacaccctgataacatgagtttaataagagaagccaaattaccctttcccatgggcaagttttgaagtcttttgcagttagacaaatccaaaacttcaagtgaggagaggtggattgatgatgtcacttctcttatcccagtaccagaaagatataattctttcaggttccttggaaagccctgaaattcttcgagctgtgtgcttttgatctcaacgcaaccagaaagattaataactctgagatgttgtagatgtcttgtagctggaaaactctgtatttttgtacaaccttggagatcgattacttcaatatttttagattttatcagttcttcaatttcaactagatcttgcgagtgactaagcctgaccatcttcaacatctcaaggttctgaaacaagaagagataacagaaaattgctttatgtattcaaaaattatagaacaaaagtaagagcatatatcaagtttgtttaccttggttccaccccaaagtttttgaagtttactgtaaggcatgttgagttcaacaaggtgcgtaggatcaaaatgttgtggcagggattgtagaggataatcctcccagtggagtagccgtagctcattgggaagagactgaagagcttctcgaaagcgaattctctgatgctttccaggattagaactataaatcttcagaaatctaagattatgcatactcttgaaagcatcaggtttgacaaagaatttcaagttagacatgtctagaaatatgacttcaatatcttcagtagtaccctgaaaacacaagatagtccaataaatcatactcaaaatcaaatttttataagataaattatatagcatatctaacatttttcataacataccttagattcaccctttaatttggtttcttcatcttctagcagaggttgaatgattgaagtgtcccatagtctgacatgcctatcaagttctacagttccttcatttgaaatcgccttcccaacaatctggatcagattatgcatttccatctttctttttacaatagtcaccagacacttatccactagaacatatattccaacatgtggaaagaatccacatccttcaaacagttgcatcacgtagtccgccttttctcccctgaagaaacaagcaatgtctagaaacatgctcttctcgttctcattaagtgcattgtaattgctcttgaatacttccataatctgaggtggagggtggttgagcttgaggagcttaacctccattttatctgacttcatgtgtgacaacatttcttcataaaggctaagagctagagggtttccactaaaatatttgacagaaatatagtaaggtgcaagagtttccaacccactctgttttctccagtctattccaaatgcgcatccgtgaagtagttgcttagcctcatctttgtttaaaccttcaacctcatatatttggttgacgccacactgcactagtacttgtttatctctagaggttatgattatcaggctccctggaccaaaccaatcaaacccattaagaaaagcgtctgcatccagaggtttaagaacattgtcaaggacgataagaagtcttttttgtccggacttgataaaagaattgtttatattttcccctaagtattcattccacaaatgataaagtcctttcgcaagaaattctttgtcgaagtctttgatgatgcaagaagcttcataatcaccagaaaattggtcaaatgctgcttcggcaagtgttgtttttcctatgcctggcataccccatatgcctatgctgcggataccccatagttgcttgtaaacaattttttctaacttcagcatcttcctgtagatcccaattcgtttggtagggaaaatcttttcatacatatccctagcaatgtcttccactagttcacaagcaccataatccatcctccttgagagttgagaccaacacaattatatagttagacattccggtgataacatatgtgtcttaattaaacttaaacatgtgtataataatgagggacaacgaccaatttctacttgaacaaaattccattacatcgactcatattatgttaagatgccatgcacgatgtcaatgtgataaaaaaactaaaatatgcaggcttatatgtatttttgcttctacatagaggaactttataaataagttgttttaatttcaatttatttctctatgttttcctctaaaaataaatattaatagattcgatttttatttttgaattaccaccttttatttataaaagtttgcaaattaacccatatttacttttacttttacaaaactttcataaaatatataatttatatatttataagaatctatataatttctcttttgaaaatattattctcaaatcgaatgagtatatttaatttattagaaacatctttatatattgaagatattacttatgttattttacactaaattacaaaagtttttaattaatagttaaatttttttttttgaacaacaaattaatagttaattatattgtaatttggttaacttatgaaccagtgcaaatttatatatttttctaaagttcttatttattgtttctgattaacttttttctttactatttgttcaataaaatgttctttcaaacttgtaattagtaaacaattgactacatttcggtttctttctatatatatgtttatgatgtaaatcttaacaaaatcaaagatttctttatataaaaaacattcttatgatattatttttttttgagaaattatatgattcaaagaaaactaattaaagcaactaaaaattatagacatttggatatctattaaatcaagctttctactcattagatttcgaatctttttaatttcttttataaaattttctttgaaccaccacacaatatatttaaccgatgtggaacgttcaattcacacttttgtttcttcattgattgggtaaattatgtttgttttaaaaaatttgaatcacaacatttacaaaaatctagtattttatttattactatctattgattcaaatgtcctagaaaatatgattaaacaagatgttaggtttgaaatatttctaaattaatgaaaggaaataagacactttcaattgttttaattccaaatttatcatttctcattccaattaaacactttcgacatataattttaatggtaatttattaagtgaacgattttggaaaaaagtacaaatgtacttcttttttaataatataaagattagatacagacatacagtatgttgtatacgtcaagcctaggccttggcaaaatactcgaaacataaaaaccgaacaaaaaagaaccgaaccaaaattattatacacttaattggttcctaaattctaaatctaaacctaactaaaatatttttgttgcccaacatgtgattattgatccaaacattctagctatttatttatcgaataaccaaattaaatatctgaaataccaaaaaatactcggcaaaatatcaaaaatactaaaaatatgtaaataggtcctaaacttaagaacaaaaaacactagaatcgaaccaaaattgtttcggtttctacatagatgctaaactctaaaaccaaagaaaaacaaacataaatgaatgaaccgaaccgaatccccaagtcaagcatatgccatattaattagagttttcaagtcttattgcaacaagggtttggggtctagacctaatcctatatgattatattaaagaagaggtcaactaataataggacaaactcttaacttaattatcaaataaattgggtatgttgtatacatcaagcctatgccatgttattcttttaccctacacataatcttttaacttataaataaattttcaaattaattatcatttgcattaggatggtcattacctaaaatttattaaattgacagacatgaactagtggatgcagtatacaaagttagaggagagaaaaacaaaaaaacagaatctacagcacttgtagcaaaaaaaagtattaggcagtagaaaatttaagtcataccggtctttttcctaggctttaactttagtaaaaacaaaaaaggcaaagcacgattggaaagaacttggtctttacaaaaacaaaataagactgtagaaatccaaccatcaaacactggtgattggatttcacaactgatttatagacctgtttttatagtgatctagcacacacaactagtataaataacatgatccgttcataaattcatatttctttttaaaaaatatccgttatggaagactgcatggtatggtatgatggtatctctaagttagcaaaacaaattgagcgtctgcaatctttatactgttaccttaatttatatgatttggtcgttttgttcagagcatatatccaccgggataccctctcggctgagtaatcctccaatggaaacgtatctctcaaaatgtccaatcggcactgatgcttaacgtccgattgagttatgcagtaaaacacggggaccaccacattttgatcagcaatctctgcaagctcatcgaggcattctgcggataacacgtacttccaagagataaccaccaaaaaagccttgaattttgttttctctatcttaatctcattggaagaatgatggacaaacgacgatgaagagatcagacctttccggcgaagagaggcagataagtggctgaggaaggagtaccggattctatcttcacctttgtggaagcttatgtacaccatgtatgtcatcgcctttgtgccaccgataatgattttggcctttaggtaaagaagaggaagtttttttttttttttcctgcagagaagaggaagttgaatctcaattggtaaattgaattttctctagatattagaagttgacatcaaaggagaacgaaagcacctttgacaaaaatcggaaaagacgaagaagcaaagtaaataatggttgattggacttagtaaacatgtatacattgacatatactattttttttatgtataaattaatatatacttgcatataaaaataagggtaatattagtagataaccaaataaaacatacaaattaagaaactagtagagagaaagttttttgttacaaaataaccatggacccacgttgtcggaagaaaggaaataacaaagctacccttcatttgttgtaagatgaacagtaaacgaaacacatccgtgtaatttttcaaaatagcatgtaacattaaaatttcacatgtaatatttagtttaaaaatatgctatttcaaaaaacgttatgaatttttaagaaaaaacattattatgaaattcttttacatgaacagaatcttaaaaaacaaaaattatatgtgattttaataaaaaccatgtattactaaaaaataagaatatatttttaaagaaatcacgtgtgatcttaataaaaaacttgtattactacaaaatatcatgataaaatgagatattaaactgaatagaatgttttttacaaaaaatactatgtggtttttacaaatactatgtaataagagaaaataacaagataaaaagaggatattatgttatcgcatgtatttcggaaaaataacatgttacaaaggacatttacgtaattacacgtgttctccaacatgtttccgacaagatactgtgactcaaggttagtttgtacattcttttcaaatctataatcatttattataaatactctaaaaataatacagagacctcatatatataggcattatctaagacaaaaaatcgagaaaccattaataaagtagctagtaattgcataaactttagcaaattaaggaaattaaaataaaaatatttattattttatcaattaatattaatactaataataatttgattatttaatttaacaaatatgaaacaacaattacaattaaatttttcagatttaatcgatataatgtataatgattgattttatattaattccaaattttaaatatataacgaaaactaaattttcatttttttatttagtcaagatactagagaatatatatttaaatataaattttaaaaaaatataattatgaatatataatttcataattttctaaaaataaactaagactcaaagaaaatattttaaatttgtttatataatattttttaaaagacaaatcaaactaataatgatgcatataaaaaacttttagtagtagaaaatatatttataaaagacaaacatttagacatgcaaatctgtttgtaataaaacatatctgttagacttccgctacgtcaatattacttttgtatcctatcactgacgtagtttttgctctgataccaattgatttagcggaagcttttaaggatagaatatgaaagtaaatttgagtatcaatggatttcaagcaggataatcgtaactcggaattttagtgttatcggagatcaatagattccaatgaacagagactttaaaaacttcgtttgagaatatttttttcaaagcttatcaaaagttctttaatttattaataaaaacaatccaatacaataagagcctaaaacggttatttataataaaaacttaaattcttacaacttaaaatattctaaaataataataattaattaataaaagataacgattgtacatatttgcaaaatatctcgctgcttcaaatggacaatatgtatgtgtcttttttttttttttacaatatgtttaatctctagcgacgagtctttcatccttacttttacttttcgcacggttattccaattaaacgaagttttataagaaacgaaattcaactgtccaaaaagatgcagaatatgacccaaacccaacaatatatatataccccagctaataaatatttttgatccgccccagtttttaggataccgtttatgatagtcattaacaaatttaggaaagagcaagacttttccatgtttgtggatgaatgagtcagccgatgtaaacaagttaacgcacgtatggtttatataattgaacttagattttaattaagttattttgatgataaaaaaattaaaatgatactttttttgaaacggagaaaatatagggaaaattataaactttactatttattctcaattctttatgcaatttatcacaatcattcctctcttacacatcataccacatttcgatctgaaatgtcagtactgtcctcaccattttttctctatttaatctctatttcttcgaaatccgtatgttttaaccatacatcattatatttccgaagacaaaacgaaacgttttggtctctcacccacttcccctgacaacctgcacaaattatctacatgtaactttcaattaaatttgtctcccaatttattcatcataaattctcataaattctttgttgtatctatatattgtctccgatttcatcatctttcaaaattatcatgaatcccacatcttatccacaaaattgttatcatttaaggatttcaaattttatttagacttttcaccatctattttggtctacagattagttgagcattattgtcttcaccgatttgaattattcattttttcttatattgtaaaataataaaaaaatccagttataacatattatcttgtctaccattcgatctaaatttgttccctatctaattcgatcactcattcgatatgaacttgtccccgatataacatattatttaaataaaattatatgcaattgtaaacgtgaaggtgaagacaataacgttcaactaatctgtggaccaaaatagatggcaaaaaatcttaataaaattcaaaatctttaaatgagaacaattgatggacaagatgtgggattcacaataatggagcaagatgatgaaatcgaggataagacatagacgcaacagagaatttctattctgggacaagatctggagacaaaaacaaaagtctgtcaccaattgtcttttatctgatacattagtctatcaccatcaagggcaatttcgtccacaaatgtgcatgtgacaatgaaatgtggtagattttgtaagaggaggaaactttttgtggtaaagattgtaagaaaactccaaaaaagtggtagattttacaagattctcgaatatatatatatgctcacgcatacatttaaagagtcacaaaaacaatttagttgttattataaaaatattatcctctattttgttattgttacttaaagagtcataaatagaattgacgttattttctaattttgagcttcataagtagtggtgatagttagtttgtttcaaagattttcttggcagaatggttgagttcttgttttcaagtttgaatctgtatttataagggaggtcggtttcatgtcgaggaagatcataaaccaatggtccaaagattgcattaaagataaattaaaaaaaaaaaagagagaaaaaggggaaaactaagaagttgtgaccttctctttcttatgctcgaagagacaattagtttcctgacataattgtataagcaagtggggcatgctctacggaaggttgacgcagttctcttcttacttgtgatttcttttgctcttaatttaaaatgaaggtctatgttgaaatggtccatatgttattatattatacatgactttttaagttgaataagtttacaaattgatttgcatcgtctatcaaaaaaagattccaatcatgaaagaaagtcccactttgagaagatattccatggaggcctcacggcaacctcaagtgttcatcaacttccggggaagtgaactacggtatacctttgtctactatctcaggacggccttggtaaaaaacgggatcaacgtttttacagacaacatggagccgaaaggccgtaaccagaaaattttattcaagagaatcgaagagtcgaagatcgcactggcgattttctcctcaaggtatacggagtcaagttggtgtctggaagagctggtaaagatgaaagaatgcatggatgcggagaaactcgtgatcattcccatcttctacatcgtgactccatacaccattaaaaagcagatgggagactttggtgacaagtttagagtgctggtggattatgttgatgatgtgacggagaaaaaatggactgatgctttgaagtctgttcccttaattttaggcatcacttacgacgggcagaggtacgcgaatttattattattaattgtccacttaattaaggggaaacaaaactgccctcttaactgaaagacctagaatctggaaattctacgcagactttaattttgatgatactacagcggaatacagagaagaacaagaaacataatatggaaaccaaggagtagcgtgttagtggtacttgttgagagttgtcacgtaggtctaggacgacaaaatgtattttgaagaaactatgattaataaccaattttttaataactaatcaaaatacaacaatatgtcgtgtcatattttatttaaaataaattaaaattaaaattaaaattaaaattaaaattagaaaacaaaataaattaaggaaataaaatttgaaccaaagaatttttctagaccttcacccgcaaaaaaaatctaccttagacctgaagttggatcatacgctttccaaaaacctaaagtttgacacatcttttattttaaattttcctttattaccactgataatggtaaattaactttttattcaaacttttactattgcagcgaagaacaacttttaatcaatcaaatcgttggggaggttcagagagtaataaagataatttcacaaggagaaggagatgaaaaaaataaaatggtgtgcacaaatacctctacaggttcaagctttatcccacaaaatagaaacatggtagatcctgaaaatcaaattgagctcgttggactcagccaacgcctcaaggaactaaaagaaaagttggaccttagccgcaaggaaactcgcattgttggggttttagggatgcccggaatcggcaagaccacactggtgaagagattgtatgatgagtggaaacacaatttccagcgtcacttgcatatggtgaatatccgtcagaagtcgaaggaatacgggacgcattccctagagagaatgattctgaaagagttgcttagcgacacttacaatgatataactgaagagatgacgtacgcttctgtaaaggatgagctgctgaagaagaaagttcttcttgttctcgatgacgtgagtagcaagaaacaaatacaaggtcttctcgggaatcttaactggattaggaaaggaagcaggattgttattactacgcgtgacaagatatccataagccagttcgagtatacttatgttgtcccaagattgaatatcacagatggcttaaagcaattcagcttttatgcctttgaagatcacaactgtccatacccggggaatctcatggatctttccacaaagttcgtagattatgccagaggcaatcccttagctctcaagatattgggtcgggagcttctttcgatagacaaggatcagtggccaaagagactcgatactctggcacaacttcccatcccgtatatacaggatctattgagagcaagttatgatgatctgagcaatcaacagaaagaagtttttcttgtcgtagcctggttctttggatcaggggatgaatattacattaggagtttagtggatacagaagatcctgattctgccgatgatgctgctagcgaagtaagagatttcgcaggcaacttactaattagcatctcaagtggtcgattggagatgcatgatttaatggctacgttcgccaaaaaactttgttcatccttatctaatgaaaataactatggataccaaatgatttggaatcatgaaagctttaatgctgcggctaaaaataaaaggatgagatatgtcaatcaaccaaggaaaaaagtcacagaatcggtaagtattcattactattaggaattttagagttaaatagatagagcttgttgtgtgattttctaacatgtgttgttattttatcaggaaatggacaatgtcatgggtatattgctggacgtgtctgaaatggataataacatgaccttagattctaaattcttcagcgagatgtgcaatctacggtacctcaaagtctacaattcacaatgctctcgagattgtgatgttggttgcaaactgaccttcccagatggacttaaatgctcaatggaaaatgtccgatatctctattggctacaattcccattgaagaagctttcaaaagcatttaaccctaagaatcttatcgagctcaacctcccttacagcaaaattacacgactttggaaggaaagtaaggtgtgcctaaatgcagcctctgtctagtaagtttatttcttttattgttgactaatgagtgactttgtttttggtcacaggaaatatccaaactaaaatgggtcgatctcagccactcgagtgagctatgcgatatatcagggttaataggagctcataatattagaagattgaatcttgaaggctgcatagaattgaaaacattaccacaagagatgcaagaaatggaaagtctgatttatctaaacctgggaggatgcacgcgtcttgtgtctcttccagagtttaagttgaaatccctaaagactctcatcttaagtcactgcaagaactttgaacaatttccggttatttcagaatgtttagaagctctttacttgcaaggcacggcaataaagtgtattcctacctccattgagaaccttcagaaactaatcctattggatctaaaagactgcgaagtattggtaagtcttcctgattgtcttggaaatctaagatctcttcaagagctaatactctctggctgctcaaagttaaagttttttccagagttgaaggagaccatgaaatcaataaagattttgctgcttgatggaacagccattaagcagatgccaatattattgcagtgtattcagtcacaaggccactctgttgcaaataagacgcttccaaacagtttaagtgattactacctaccttcctcattgttgtctttatgcttaagtggaaatgatatcgagagcttgcatgctaacatcagccagctttatcatctgaaatggcttgacttgaagaattgcaagaagcttaaatctgtgtcggtgcttccaccaaacctcaagtgcttagatgcacatggttgtgactcactggaagaagttggaagccctctagcggttctcatggtgacaggaaaaatccattgcacatacattttcacaaactgcaacaaattggatcaagttgcagaaagtaacatcatatctttcacttggaggaaaagccagatgatgtcagatgctctgaatcgctacaatggggtatgtactattctatctcctaaaaagattcaaattatgctgcggaaatatgcagtttaataatcttgttttggtgtaacttgttttatagggatttgttttggaatctttggtcagcacttgctttcctggatgtgaagtacctgcatcattcgatcaccaagcctatggagcattgttacagacgaaattacctcggcactggtgtgatagtaggcttactgggatagctttatgcgctgttatattgtttccggactaccaacatcaaagcaatcgtttcttggtgaaatgcacttgtgagttcggaactgaagatgggccatgtatcagctttagttccattgttggaggttggagcgaaccaggctatgagccacgactattaagtctgatcatgtttttattggctatacaagttggctagacattaacaaacgtcacgtggaaaagcatgggaatggatgtattccttctaaggcttcactcagatttcaagtcacagatggtgcgagtgaggtaggaaattgccatgtcctgaaatgtggctttactttagtgtatacaccaaacgatagtgatgatatctctccggcgagagtagttgatatcactacacgggataaggaggatggcctagaaaatgcaacttctaacaaactttcaagaaacgattatgaattctcgcatcagtcaaactgtggagtgacttcgagaagggatgaatgtttcctttctgaagagcttccataagcaaatgaatcagacgtcttttatctttgtttccactttgttttcctttctttccttagctttcttcccgtttgtcgaagtaaggaacacataaatgaactcgaatctctctatcaaacatgtattgtgtctcccacaagtcatcttaattacgggtcagtccttatgtaactaaagaaatagtaacaatagggcacgagtggcttttatttttataatgaatgttaaattttattcatcaaagcacgagtggcttttaaactaatcattttaacagtttaaacttcatggtaaaactcgtcatttcaataggaaacattgtttactttaaattcacacgttatctacaataaaataactagctctgtccatgtgtacatagtgtggaacaatgtaaatggtacaacgaagaaccattaacgtacgtcttcgtgtgcattcacatgtcaatatctatgaataaggatcttgtctatattctagttttgaatttgtcgtgcattttaaatatttgatcattgtaattatcggtaggactctagtcactatacgaagatgtgacgacatatgtatctcttagcttcatttctggatttaatacttgtagcaaatggtcagtcgtctcaaattaagaatggattatgtatattcaatacagcgtctcaattttaacataggccattaaagcctacaatattttgtttggaacagtagataatgtaattaaatgttaaaagaatcctaaaaactcaattaaatcaagatttttcgatattacttctcttgttgattctttcctattaaagaaatcaatcctttaaagatgtaggagatttctttttttgtttaaatgtgtaattcattgtcgaactaggaggtaaatatgaaaataatgaagcagagtccttcatgagatacatatatctagtgaaacaaaaaggaaatgcaaggcttaataaagagagatctcagaggcgttgtaggagaattttgcagaacttcaaacatattttgacccttgtaaattcacagattaatcttcttttttaaaaaataatgttaaattatattcaaagaaaaataaacgtttatacatagaatacaaaacttttcttaaatcaaaacacaaaaagatactatacaccatcttttatcttgcaaaccacacttgaagtcactccccccacatatttctctttgcctcccttatttcacatattaatcttagatggtggaacaatatttttttcttgttttggcatattcatgtttaattaacctctatctctgaactccacatgatatgttcacatgcctttatctacggactatggatattcatcttactccaccagaaaccagttaaaccaccattatcagacatatatagttgttttaatatatattctcttgattaataaaagcacaatgcaagcgtatgagatcatatggcaagctcatgtggatgagtggatctatcagtaattgaaaggaagattaaagagagagagagtaacatcatttttcttcttacattttcaacgtgattaatacttgagaatcacattcttgaatcagcattgtatatgccttgttctttggcacattgtatgttcttaagagttcacatgaaatgtgaattgcttataaatattgacctcagaggcaatgagaaggcagaacaaacatctttagcatgactctcaacatcttcgctttaataaataacaaaagaaaaacggaaattggctacatccttcgttcgttctaaaagtttcccatctagacctcacccacaaccttctcatgtcgatgagcagttgtctcgtttgagatcttctgaggaagcctcaacatcttcaagctttcttatcttccaaagacttgacaaccttcaggatctacatgaagctcttgacaagcttatttacctactcttcacacaacatgctctagctcaagaacatataacaggaaagctgttgaacaacttcttgatggatctatgaagatcttggatttgtgcaacatttccaaggatgcgttctcgcagatgaaagagggtctcatggaagtacaatccattctaagaagaaagcgtggagatatatcttgagacagggatatcaattgggaagtccaagtccaaatgggcaatgtccaaatgagaccaaaccaaataggactatgatgatataagtccaaatagaacatgtgtccaaataagaccaaccccaaatagatcatgactaattggacaacccatgaaacccaaataatatgatttttttattttccgtcaaaaccgcaaaattatattttcgtacaaaatcaaagaattgcatttttatgcatattagaaaattacatttttcgccaaaacagtaaaatattttttgtaatgaaaatgtcagtataaaccctaatttttaaagaaataaggaaaaaaaattcctctaaaattagtaaccctaatttttaaggtttattggacgaccatgtccagatgggttcgcctatttgtttgcgggctaaaatgggcttttagcccataatagccgctttgaatttgggcgtgaccattataatttggactggtctagctagctcatggtcataaagcccatttgagaggtcaagaaatacttagccataagaagatccctcaagaagtcattccaaaaagtcgttaggagtttgaaactcaaacaagaccaacagtgcaacgtcgaatcttttgctatgtttgtagaagcagaaactgttacaatgcctctttttgattctctgttctgcttcgtgtctggatcaaagacttgtgacagatggtcgctaaggaacaagaaaaaggtttcaagtgagatgcaagcaaaagaattcaccaaggttgactctgatttccaatccgagaagaccttgaagatggaggatgttcagaacctagtgtcatgcattcaatatcttgaagatggacttgaatcactttcaaagtcattgattaaatgcagagtctcatttcttaacatcttaggccactaatggctccaaattttgtacagatttatatgacagaaacagttaatacattaagatttctcatataattttgcgtttcttaagttgattctattatcagtcctgaatccaaaaaaacaagacgtcacctaatcaagacttctaccattgacatctgaattctcccaaaaaattacagtttaatcttcgtgcggtaataagtaattaaagttgttaacttaaatcaaccatattacagcgccaagattcctcattataatactacaagcatctctgaatccacacgttttcagcaataatagctctgttcatgtctaaattgtgggagacaatggaaatgattcaacagaaaaaataagtacaccgtgtgattttcacatgtcaaaaccaatgaataaggatcttgtctgtattatattcttgaaaacagactttcacaaatatgagacattgttataaagtcactcgtgcttaaagtaaagccacataggtaatttttaaacatggcaatttaagaaagctttctgaatgaatattagacagacaagatccttattcgtcgatttttgacatgtgaaacctcacggagactttatagttttatctcttaaatatggtttctagaatataatcacatcaaatgtttcccaccatagagacaagaacagagttatattgcaaagaacgtgtgaaatgcaaaaaacttcaccaataatgattcgagacagcgtcaattaggtggattgaagttattaacgtaatttgtgttaccatgaagttaaaactgtaatattttggaattaaaagaattttctgatttcttgtttctagaatgaataatttgttatatgatgactaaagagttaatgataaaagaaataagatgtttggaactgagacttgaatttgtttctattagcttttcttttctgtacaaaattgtaggcttttaatggccaaagctgttaagaattgaaactctgtatttgatcaaagacttagataatgattctagtccatcttcgaaatcttgaatgcatgactctaggatctgaacgtcctccattttcaaagtcttctcggattggaactcggagtcaaccttggtgaattcgttttcttgtgcttcacatgtaattttcttcttgttcattagctttgagacgactgaccatttgctacaagtctttgatccagacatgtagctaaagagagaatcaaacatagcaattgtaacagcttctgcttctccaaacacagccaaagatttgtccttgttgtcttctgcttgtgcagccttgagggacttttgtactttctggaatgtcttcttgaaggactttcttgaggctaagtatttcttcacctctcctgatagatctccgcgctttcttcttagaatagattggatctccatgagaccttctttcatctgcgacaaagcatccttggatatgttgcacacatccaatatcttgagagatccatcaagaagttgctcaacgtctttcttgttcttctcttgaccgagagcctgttgtgtaacgggtaggcgaataagcttgtcaagagactcatgtagttcttgaaggttgtcaagtctttgacagatagaagagcttgaagatgttgaggtttcctcagaagatcttaatctggccaactgctcatcaacatgagcggcttgtgggtgaggtatcgaggggtaactgtgagatcgaacgtggaaggagacagccatttttattgatattagactctttgttattgatcaagaagattatgttgagagagataaagatgtttgttctgccttctcaatacctctccggtcaatacatatatacaccatcaagaaagagaggcaagaggaatctctgagggtggttaaacaattggaatcaagatctccgccatatcagttctctgtctctctccaactatcctcacagctcaattctctatttacttaatgcacgagcggctacttatcgacatagctggcttgtctgctattgaaactcacccttatatctgtcctatgaattttctagagtacacaaaaaacaatttagataatgcttaatcaaagactaaaatgtaaacataaaaatggaacagcaaataaatagtaaggcaaaattttaaaaacaatttttgtagaaagcttttgataaagaacagtttgtagaaagttacatgaaaacatcaataaaccaaatttgttaaatttttattctttacgtagtttttgccatgttacgtggtctgttgtaatagaagaagttttttttttttttttaaatgtaatatgccatgatatgacacgcttgcatcgcattagggttaatgagtaataatcaagaaactgtatttaaaatcaactgtcataataataatagtggtttggtggagcgagcggtaagatccgtagttaatggcatgtgaacaaatcgtgttgagtttcaagaaataaacatgaattttccaaagttaaaatgtgaatttcaagtgtcgaaagattgtgcaactttttgaaagattataacgaccaatatttttgaaagatttggtcagtacacaaggcaagagcggcaggaagaatcttggcagttaaactaatgaacccttaacaaagatctccaataataataattagctaagtgtctccctccaacactattttcaaagctggcttgtcttctattgaaggcaatgaatgtcactcgtgtaaatctcaggcctatcttcaaaggaatcaaataatatttttcgaagtttcgagtagaaaatgccattggacagtgcaaagacaaagctgatcaaagagtcaggtacccataagggccataatggcaagttttataatctttaaaaatgtcttaccgcacgagcactctcaatagtttctatcaattacaggttggcttggtcccctccctcatttttttctgaatagtttattagtctctccgtgtgagctatataacctgtttccagtaccgcacacgcttgcatcatatgattaagcatattgtgacaactgtgatattgatgaattagcggcaagatccgtatccgtagatcacggcatgtgaacacatccttaatagatcatgagatagaaactatgtaaaacttttttggtcattttaaaattttgaacaaacgtgtagagattcagagttgtcacatgatatattaagcaagcacatgttctatgtcttcgggccgttaaaaaaaggtttcaccattagaatactctatgaattttataacaagattgagatgatttggttgcttgatatgagatgggaagagatataacaagaacaaagtcatataagaaaaaatgtctttgttattttgatgatcctttttacattatcttactctacaaaatttgtaggcattagtggcctaagatgttaagaaatgagactctgtatttaatcaatgactttgaaagtgattcaagtccatcttcaagatcttgaatgcatgactctaggttctgaacatcatccatcttcaaggtcttttcggattgaaattcggaatcaaccttcgtgaattcgttttcttgcgcttcacatgtaactttcttcttgttcattagctttgagacgactgaccatttactacaagtctttgatccagacatgtagctaaggagagaatcaaacagagaaagtgtaatagcttctgcttctccaaagacagccaaagtgtcatcgttgttgtcttcagcttgtgtaaccttcaaagacttttgtactttctggaatgacttcttaagagattttcttgaggttaagtatttcttgacttcttccgatagatcaccacgctttcttcttagaattgattggatctccatgagaccctctttcatctctgacaaagcatccttggaaatgttgcacaaatccaagatcctgagggatccatcaagaagctgttcaacggctttcttgttatgctcttgagaaagagcctgttgtgtgacaggtcggctgataagcttgtcaagagactcatgtagttcttgaaggttgtcaagcctttggcagatagaagagctggaagatgatgaggcttgctcggaagatctcaaacgggccaactgctcatccacatgagcagcttgtgggtgagatcttgaggggaagctgttagatcgaacgtggaaggagactgccattttttgctttgttttgttatttgttcttgagagagttaagatgtttgttctgccttctcattgcctccccggccttacatatatatacaccacaaaggaagagagaacaagaggaatcttttggtgcttaaataattcatatcattaattagatgtttgtgcgatacaccttttactaggtgacaagaggcatctcatgtaatataaaactaatggatcaagatctccgttatatcagttctatgtctctctctaaccatcatcacagctcaacacttcattaagatcaagttccttattttattttttgcacgagtgacaattaagacattgtctcttatgtgtctgagctaaatcagtttttttatggagtacaatgagctgtgagtgcatggttggagaagattacaataatagctctcaaatttatatgcatgtaatacaacctccatatcccaaccttggatatatcttgtctcctttttttctcaacaaccacaagacgtgtgagtatggagatatcccgcaaaacgtaaaatgactaaaatgtgtgacaaactttgacacatcttgtacttgacttataatgattcttgacaagagggtcgctaacattgtctttgtctctaatcagtttcatgatacatttaacctttgttatagattaagcagagtaatctctgagcaatctccatagccaaacattggatctttccacacaaaaataaagtaaattaaatgcaagaagactttatttctctatatacataaaccctatctcaaaactggtcttggcaaaagggagattcacaccagcaaaaaaaaaagtttcaaattctttaaattcttagttcaaaatttacacaagactcctcaatcagaaacaaaaaaaaaaatgtcaagaataaatgccactttttatcctaaaagaaatagaaaatgaaatatgaaagactctttctcattgttactatttctttacttcaagaagagctgcttctttcaaagtatcagcagaatcagtgttcatgtcgagtttggctaatgccacagactgcaagtagaaggcggttggccaatcaggaaacactccctgtgcatgcatcccatcgaggagggccttttctggctcatcgcagaatagatagcttagactacgccttgcgtaaacacttgggtataccaatgacctctcttcaacgaactgtggacaaaaaacaaaaacaaagttaaaaatagagattctactaatatgcatgataaggcggagaatgttaactacctgagaataacaggcaatagcggttttgaagtcttgctctacgaaggctcgatcaccgtttcttcgaacatcttgaagttctttcacctcttgtatccattcttcgaaagataacttagctcatgaaaagattaaagtaaagtaagatctttgatcccaaactagttgtacaagtttaacttgatgatagtttggttacctcgatgatatccttgtcatcatcatatcctgccaagaccaagattgaatgaatcgatgcgaggtccattctcaaacaagcctctcctagtggcgaaagattacttgacgatgatgcatccttctcttggtttgtcatttcaacaacttcatatgatggagcctacaagcaagaagatcgactccaacataaatgcgagataaaagatcaagaattcaattatggatgcaatgagctccttacttctgttctagtttgcaaggtttcaagcgttgcaacaatctcttttgtgttgggactctcttgaccctcgtacttcaaacattgagaggcgagtttataaactacgttagcttcatctatggagaacttccccttcaggtatggatccatcaacttaaacacattctttcgatgtatcatctcaggagcctagaaacatatataagaattaattggcttgtcttgcaagaaaatgacaatgctagataagccttatgattacaattacaaagtcaagatgaactgttgatccaaaaccctaaaaaagcaaagagacaacttgagcataatcatttacgtggcttggaggaatttgctttccacttagaagattcacaaggacagtaccaaatcggtatatcacattttcagggttcacacttcctacaatgataaaataaacatcacattaattcttataataaatctgaagagagaaacgctaattaattacctgttgtaatttgatcattattaatctccttcatcaagccgaaacaagaaagacatgcatcaccatccttccacatccattaaaacaattatgacattttagagaccacacgagaaggcatatagatgaaaaggattcctcttctatacctcatcaaacaaaaccttgtaagcgcttaagttattgtatgatgcaaagcctgcagtgttgcaataatccaatgcttcagctacaaaataggcgactcttaacctaatagaccaatccatggtttgatatttccctgtgatacaaaacaaaaaatgctagcaagttctgattcaatcgggtttctacgactacaagcatatacattgatatgaaccatgcacacatcatgtcatataacccaacaacgaaacaacctctatatcatcaaatccacaaaccctaaaatgtgaaaataaaataaggtatgaagagaatgaatcatacgctggaataaacgcttcgcaagagtatcattagccatgaaatctgcaacaagaaaccttttatctccatcacagcaatatccaatcaaatttacgagtctcttgtgtcttaacttccctactctttgtgcctcttcctataaaaccccatcaaataagatcaataaccgccacaaaaatgataagcattttcagacaaaacaaaagctacgtaccaaaaatagtttaggatcagaccaagccatgttattaaatctcttgatagcgacgaaaccaccgttttgcaaacgtcctttaaagacaacatcggaggtttgatctgaaacgatgttttcgggactaaaatgatttgtggccgtcttgagagcggaaaaagagaattttgtcaatggtggatcttctcctccgccgtttctaggttcggaagaagcatcggtcgtgtggtcttgaacaggatctactgttgaagatagtgagtaacaacaacccatcagattcttcagcgggcaaaagaagagtgtcaaatgtattccttattgtatatttgattccttgtttggtcttttgtgacgtttgactccgaggtttaagtgtctctttgttgtcaagacaaagagtgatattatgacaattaattattctcgtgccaaaattgaaagacctttcttttttgtcactcaagggtttttaagttcttatttttctactaaatgatcatccatgttacgcgcttctttgtttttttaaagctttcgactgcaatttttttgttaatttagagatttttatttttttcacttaaatttacgttaggttttatgttttttcatatcttgaatacattttaaccaaatattcatttactagaaagaaaaaaaattcgagttgagatgtagatatatatctttgttaaaaatgtttttgcctatttgagatgtttatgaatatgtgtagaattgaaagtaagactttgaaagtcaattgtaatgtggtaaaaagttgaatatgaataaatgttttggctatccaatatttaacaaataaggtaatcttataaatgtaaaagaatgaaaaaaaaaaaaaaatcttattcttacaaaatgatattaggtaatgttataattttttcttaaaaaacattttttagagtcaagattaaactttattattcaaaatttagatagcataaaatagcatagaatcacgttctcttttgtattctatcagataaataaaatgttataacatatcattctatattgacctatataaaaaaaaaaattgttctcacgtatagatcacatatttaaataaaaaataaaaaaaatattgttcgtttaatatcttaaaccacattatatccagacaaaaaaagattctagataataaaattgtaagattaaatctacatatatgaagaagtcgactaatatggaggagggtatacatttttctcgcataacaaaaggaaaataaataataatttactcatggtcagcagaaattatttttgaagggggcaacaatctagtgcccacactcataatttggggaaacagggaatttttggggttcataatttggttcgcgagatcaatgtttggcaaaggaaatttattgacgctgattttaggtggataccaagagcttgtaacaaggcagtatatcgattagctaaataaccctttcctgacaatgtccaatttgtatctcatttctttgttccaaagttccttgtataaaatcttctataaggatcactcaaattcattctagtaaagtaagcagttgctggaaaaaaaaacaaaaaacattaagttcccaaaacaatgtaatttctacatagtttgactaaatggttatcctagtttttttttttttcatcacgtgtggatcaactcttatctattttggaatataatttttcatgtcataagtttcatggtagttagttcttcttatgttaattattttcatttattctgtttgaagcatattatatatggttgataattttttgtgtattactctattacaaaataaaagtaatttttttttttgggtaaaaggctaaaggttatcaagtaacttgtttgacatgctttaattttattttccgtccatactcttacatttttaataataactaggatttaacccgtagtataccacggaacaaatattttatttatatataataatattaaattttacggtttttgttttatattaatgttataaattttatattaatgttgtaactaaaaaagttggtgatgataaaataataaaataaatatttaacctgtgttatatcaatttaaacctgtcatgctatatttcatatcaatccaaacccgtcccgttatattttttgtctcatgatattttaatatttttataaatttaaatattagttgtggaattggttgtgattgttattttatgctgaaaaagttatggactttgaattccatggaatattcaaaccaagataaagaatgtttttaggtgcacatataattggatttcctcattttacgggatcaaaaatgtattttggtttgtttcacaatgtttgttttaatttattgccaaaatttaatacaaataattcaaatagtttaaaatttttggttgttttaagatatagtgaatattgtaggtgagataaggagaatataatttattgtgttttgcttgacatatgagattgtcatataatttattgtgtttcgcttgacatatgagatatagtgaatccttttagtttgttacacagttaattgccacaaaaaatatctaaccattaattaagaaaaaatcaaataattaaaatctagtggcagccattgtaaataaatcccaacttcaggatttatttcacaaaatggctgcaaaaatgtatatgtagattaattcatactatttttacttagtaactcaaaatttatggattaattctgaaaaaaaaacacaaaaaaaaaacttgttcattgtttgatgcggcatttgctaaagtgtttataagatttggtactttattttcctttgaattatcgattttatccttctcaacctaccaagtacatcaaaatttcaatttgcaaactccatctaaatcaaaaatttgtggtttgagaggaaggcatatctagaggaggaggaggagccatctgcatcgtttgagttggaatttagtggtcgaggaagaaagatctcggcaaggaagctcgggatcaaataattctttaacgattctatcgcgttatctgatttttgatttgacaattttccacatcaattagataatattcacaaaagaattgagattttttaagttaatttagagttgcctttaaaaaaatacatgcatgtatacacaaaaccaaaaccaaaaattcactcataaatccgtgatgtttgttgtttaggttcccaatatactatcacataagggtttagattccgtgattaaaagtcatttaaaatttctgaaaaaaaataaaagaagaaaaacgacgaagaagagaagaagagaagaagttggggaacgaaaaagaaaaagaagatacaagggcaaaatagttcatctatatacaaataagtacccattttcgtaagccgattgaaaatttttctttctctaatatttgggctaaaaagtacccaaaacaaaagcccccataatttatactcttgttataaataaattgttgaatatgtaatttccctaataatacaacagctatttatttttcagtaactttatttcctaataattcatgaatgcaaaggaggtactaaaatcacatagcaaaggtaaaagttcatttgcaactaaacaaaagccccccccccccccccatctctaaaatatctccaagcaaactaaagaatcgccctcaaaggtaaaagttcagttgcaattgtcatcagaaaaaaatccaatatcaaatttttttcctagaaatccttatgtgcccgtcatctccttttccccgtccatatgattcttgcgcctcccaaaaggctctgccatttgcatcaatgccaaaacctctaagcagtactatatgtcctctatcctcatactttcttcaaggagactttcatattcatcaaaatcatcttcaacatcaggttcaggatcatgataatcctcatacttgtgcaaagtgacttcaagagctctgtatcttgggacatttgcagtttccttacagtttttcgcaaatcgaaaaagcaatggattctcactttctaagagggttcattcattgagaatgtctatcaaggcactcaaattaataagacgacgtttcaatctctttttcaacaattatgttcttggcatcaaatcaataatctcctaaatcgacaattctttatcatcacgtaaaagtccatgccttccttaacaaggcgtctaaatgcttggtaggagcaatagaccagcaagcattccacgattgatataacacctttcgaagaagtttgtgttgttcttgttcgattctaatcgatgaaattaagaggcaaacgcgaagaatctaatcgatgaaatcgagacgcaaaccgcaaaaaatctaatcggttgcagttgttcttagagtttagtatttggtataaaatatatatttttgtttcaaaaaattctaaatacatacatttctaagtgttaaaaatggcaattccgtaaatttttagtaaaaatgacaatttaaaatgattttgatgaaaaatggtgaaatcaacaatgattcaaaaaataaataacaaaaccaaacaattggctctagaagtgaaagttcctagtataaagacaaataaaagaatgtaaaatctccctcgtactgtacctcataagaaaacccagatgggtttttgatatagtgggtaaagcccgaaaaaacctgattgttccgagactacccgtgggtacccaacttagtttttatcatttttttttaaagtttatgtttaactgttaatatactattatatgtatgttatatctatattttgcttataaatatattttaaattatatttattttctgtattacatatatatttgatgggaaaaaggttgaattgcgtttttggcgggaaaatgttaaattgcattttttagcaggaaaaatatcaaatctttttcttggtcggaaatgttgaatgccgtttttggcggaaaaatgttgaatatcatttttggcggaaaaatgttaaattgcgtttttggcggaaaaatgttgaatatcatttttggcgggaaaatgttaaattgcgtttttgaccgggaaatgtgaaatttttttggcgggaaaatgttgaatgtcgtttttggcgggaaaatgttaaattgcgtttttggagggaaaatgtgaaatcatttttggcggaaaatgttgaatcgcgtttttggcgggaaaatgttgaattacgttttagcggaaaaatgttgaatgtcgtttttggcgcgaaaatgttgaattgcgttttggcggaaaaatgttgattgtcatttttggcgggaaaatgttgaatgtcttttttgtcgggaaaatgttgaacgtcttttttggcgttaaactgttaaatcgcggtttgggaaaaaaatgtgaaaaaaaatttgacaacaaaatgttgattcacttgaaaaaggacttaaaaaaaccctgtgggtacccataactcaatgaggtaaacccatatggattttatttatttgggcaccgagcccattttaaatctgtgtttttttctagaaaaagtagatatatgggctttaaattttatgtgggttttggatacccagtgggttttaacccatcattaacatctctactcgtacatgaactcttcgaggtgtgccactcaggctagtcaatccaaagagggtaacgtcatctttattcgctctgccaatataattcgtataataaacgataatagaactcttgatgttctaacatataaagacatttctcaaactagtgtctccaaggcaatcggtatattcggttcggttttgaggtagttttcatttttgttttggttctagttatgtttatttcttcactagattaggttgacgtggagatagtggcttgagtaatcaacgatccaagaagacaagtgttttggttatcctttggatcaacgaactcttgtatttatcgtagcttgagctacaccagtaacttgcatgatgtgtggcaaattctcttacatttctatccaaccatggtaactaaccatccagttcttcaatagggcaagcaccttcttccgttaaccgagcatttgacccatctctttatccaatgtctccggagggagcagttagtgcccgtgcctagggaagattatgtgtaacttcccattaaataccagtcatatataaatctggcccggtactccggtctataaaccacgcagagctgagtaatggctgatcatgcaaccatggccaagcacaaaattagctgtcttaagcctcacaactctgatgagtttttttggttatgcgatactttcctccacggttttccattagtcttcttcatctgtttcccgagagtcgcattcttcttcttcagcacgatgtaagagatctacataagctttcagagattcctctgtaaacctctccatagcttcaaatatacgttgaagactaccctgtaaactctcgttactagtgtcgctttggtagacaatgttatcttcccctggaccaaccagaaccattttcatttccaattcttgaatctctttctgtattctctgttcctctcggtccatattcctaggatcaccatgccctataatcctctcccgggttgctaacctatcttgttcccaaagatgaagcacactcgttgtgaaacggcgtatagcctcgataacttccttttctgatattctatctagagcttgttcccactggttacagatcacgaaaatcattggagccccaatacgaccaggagaaaaaggaacgattccatctggagtttcctcaggttcatagaaaagacacttcataagccaactattcagctctcttacaaaacccttttgcgcactaacccaactcgaaaatcccacaatccaatttataagttcatatccaagcgtccttgttacctcgagatgctccccaccaaaatttttgcttgctctaatggggcctaaacctctggcttccttaatagcctcacactgacttttatggcactcaagcatggatttccacattttgctaagcctgaaagatggagttagcatctaatgagaactcaccgtaaaaaccaatcatagttatatactgattgcatttaaacttcgtccagcttacccttggatcaattcattgagttgcagccatagctcttcgtctcttatcttgttaattgtaactgatattttgtcaacaacttgaatcgcaatccttatctttgtggacaaacttctaactaattttcgtgttgaatctactttttgattctcggcacctctttcatccatacgcttaagcttccttaactttttctcatggtttacacgcattttttcctcggcctacatgcacaaactttagttcaaactggaaaaaagtaacaacagaagaagagagcaaacaaaaagatcacatctcagtatccaacgagagagtttatgcatcaacataccttgacctcatcgtaaagcttcttctcccaaaggtggagcttgtgcaatgtcgaagaaagattacgagactttaaagcaagctctgcctcaatgtctgcataagtaggagcagtcactgaagaagaggcttcagctttagcttttttggaggttgatgattgagctgacgaaaccacagacggtgatggggtcccctcatatagcttcttcgaagaaactgctccaatacaaacacagtccatttttacaaaatcaagaatgattcaaacacaacaagctgacaatagtggcaacagaatcatatattgacacaaaaccataataaatattcaactgatttctacaaagaagcaaactttctgcaacacaatctccaaataaggaaaaaaaataatgaaataagagatgatgaaagctaccatttttgcgaccatatggatgtttccccacttcaagcatcactgcgatctcatttcctgactctgcagctctcaagaactgagcttctatctctttcgcaacctcaggaaccccacgtctgacaccgccaccaccacgtgccaccgcagccttactcttcctcacctcatccccaccactatcctcaacaatttttttctccacaatatgaacctcatgctccatttcttctttctcaactgacacacttggcctagtctgatacaaagaagccttacctcctcctcctcctcctccgctagtgctagcaccggagttacctaacggctcttccacagaaactgcagctacaaatttctgtttcccatgtacttccttaacaactacatcatcttcctctaaatccggaacacccaattcatctcttaactctctcgtatcacgactaggagtatacggagtataatacgtatcaaaagggtctaagaaatcccaaaccttttccctcggcggcgacggtggcggcggaggcaatttcgatccgtagttcgaattcagatatggattatactcagaggttgatgatgatgatgattcaccgaaatgaactctctgaggactcgaaggtctctgctcataaaccaaagaaggaggcatataactattcttcatataattcatatgcaaatacgatttcggattcgagtcatcatcttctagatgatgatggagaggagatgaatgcaacgaatcaatatcatcatcgtcgtcagagtcagaatccgaatcgaaatcgagatgacccgacccagaatccatcttgggtttagcttttttgggtgaatcggaatcgttgtaacggtggtggtgattgatgaattggtgaagagagtgagagattgcttttaaggattgtgtgtaggatacgtgagcttctgataaagcgtaacgttgatgaatcgctgcttcaaggaagctacaacggtcacgacaaagcgccaccgctggaagatcgtcgagctttgaggttgaacaacccatcaaaatcaaaaagttttgaaatttctttgagattcgaagaatcagaatgttcgtacagaaatcaaagttgaggtttttaagtggaaaggaagagactttgaatagttaggtgatgataggaatgagaaaagtaaaactttaaagcgaggaagaaaagataaaagaggaatcttttgccaaaaaaaaaaaatctttggtgtaaattataaaaatatttaagctctttatgtaaattactaatttttgggtttgggaagacacagttaacttaatcttttggattaaaggattaagaaatttggtaattcatgcagggaaaagagtaaaaatgaaagatttgattgtttgaattttagtgaataattttattctatcggcaatattctcgaatttagtacttgattactgtgtaacgccgtcttagaccaatgcaatatagttgattattattttgattttggtcgttggacaataaaaaatttgtaattatgaattgtggttgtaacgtaaacaactaaacatgaattaattttttttaaagtatgtcacaacatttgattgtatgtgtatgtatagtcaaacttttttttttccttttctttgacggttaaagaattgaaacggattcgtggaaatacatactattttagtaagttcctttgtcactgattttttgttggaatgaatcaaagtggaaaagagttcatcacaaagaagttgaagagagattcggggaaaaataaatacggcaaacattcaagaacaagtatgatactttgtagaagaatacacatcagatagaggcagccccaggaggaccaattcatcttgtggtgtagattaagtaaacaaaactgttgcatatgtaatgaaaaatttaacatctttatgcctttgacataggcttatgttatgtagtgacttggtagatagatgtacaagattatgtattgtagaatcttagtagttggtatataaattagttaatgcatttctccacaaaatcattgtgttccaccagagatgaaacaatgtggttgcttatatactacaagaaaacacacaatttgtgacaaacctttgcgaggtaaaatatccctcgcaaatttgcgacgtctttgcaagatatttgctacgacaaggacgagccacgcaaattcgtcttaacgcgtcgcaaatcacccgcaattaacgagaaacaaatctataatatatttcattgcaatacaccaagaaaaaataccatgaaagttacgtatatatatataatatatttttgttttagctaaaatttactaaatatatccggtgagcatgaaatttatatgtctcaaattttttggctttgcaatggctttgcgaaggagttaccacataacaatagcacttccctcgcaaaatttactctttaaccctaaagtacttacaagtgttttgcgaacttcgattttctgttataaaaatgaatctaggaggccatataatctgacaagtcgaagatgtggtgatgcatgaagaaagtgttggagaagtttgagtataattctcaacccgagatgaaggaggaggtcaatacctatagttataatagaaaatgttatagacattgatccatgtaatagagaaacaaaagacatcattgatgcatctaaggaaaatgcatattcggacaaattcgaggaatttaatgatagattagattgtagtgaagataatgaactttgaaatgattccatatatgaatctgaatgatttttagtggtgttttgttgttcttttcattcaaattgattatcgttaattcaataatactaaatttcatgagactttttaaaatccatgtttgaataacataatgattataaactctacacaaatctcttaaaattccactttcaatacaccccctaaattctattaccaaaaccgaatagatacaaacgtaaatattttaggtaaccaaaaatatccaaaatataaatatattttcaaaagtattagttatttctatactaaataattaaaaaaaaacttaagaatatatataaaatagtaaaaacactcgaatataaccaaaaaatatccaaaaaaatccaaaaataaccaaaatatccgaaaatatttaaatcaaaataaccgaatggatactaaactttaaaactgaaatcgaaccgtacttttgaaataaccgaatggatactaaactttagaatcgaaaaaatcgttaaccgaatggatataaccgaaatcgaatggataactgaatgcccaagactactagcaatgccctcctaatgttgctatcgatttgcgacggaaaaataatttatataaagaaaacgtaggtttgagctttgctcaaacaaaccgatcacaaaaaccctagaaacgtttctttgttgctctctcatctctctggcactctcatgttctctcagatttaggcgtctaacatcctttgtggtctctgattccagtgattctaatctccccgatgctctccgattcccgtgacactcatctctctggccggtgttctcagatctctaccacatctctcaagtacttcctccaaactcatactcctttttgatttttctctgtcttgatttgctttatgccttaaatctaaaacaatttgctttatgacaagttcttagacttggatttagtttgtttttggagttggtaaagacgataactacagttgatttaagggacgatggaaacgttttagttattatagtgagagacgtaattctatgaaagtgttattatttctagtagctaaatatcaggattcttcaatctctgtaacaaactctagagagagagtgaaagaagaggaagaagataacagaaacaaagaatcgtttattctcattaatttggtaaagtgtacaatgtcatgtatttatactctaatacatattttatactatagagtaaaatactcgttatacacccccgcaaacctttgaatccaaaacagtaggattgaaaaggtttgacaaagacattcgagtaagtaaagaataaaagattcgagtatgcagcggtttggtgagaatatctgccagttggttctcacttgtaacatgtagcagcttcaagtttccaagcttgatttggtctctcgttgtgtgacagtcgatttctatgtgtttggttctttcatggaacacagggtttgtagcaatatagatagcagacttgttatcacaaaagactttggcagttgcagtcacagtcactctgaaatctttcaatagttgttgtatccatagaatctcacgagtaacatcagctagacttcggtactctgcctctgtactacttctccttgccacttgctgcttcttagacttccaggaaatcaacgaagtgcctaagtaaacacaaatcccagagactgatcttctactatcaggacatgtaccccaatcagcatcagcaaaagcattaatgcacaaatcagtcgttgcagaatagaaaagtccctgtcctggactatctttcagatacttaagaatcctatgtgcagcttgtaaatgaacatctgttggagcttgaataaactgacttaacttgtgaaccgcataagcaatgtcgggtctagttatcgtcaaatataacaacctgccaataagctctctaaatggcgtagcagataccaatggaactcctgtgtctttactcaaggtgacatagggatccataggtactacactaggtttacacgcaagaagaccagcatcttctaataagtccaacgtgtattttctctggcaaacagatattccttttgaagttctagctatctccaagcctaaaaagaacctcagctgacctagatcttttatcttaaaagcctttgctaaaaccatcttcaaagatttcaaatcatcagcattgttactagcaatagctatatcatccacataaaccaacaaagctatgaagctagtctccgtaaacttcacaaacaatgtagtatcagactgagactatataaaaccattagttagaagcacagatgtaaaaagttgattccattgtctagacgcctgtttcaagccataaatggacttgtgtaatctacacacagcattcggcggtaaaggttctgaagtacctggagtatagccttgaggtaagctcatgtaaatttcttcatccaaagtactatgcagaaaggcattagatacatccatttgactcaactcccaaccttctcttgctgccaagcctaacatcatctagacacttgtgagtttagcaacaggcgaaaaagtctcattaaaatcaaccccttcctgttgagtaaacccttttgcaacgagccgagctttgtaacgctctacagtcccatctgagttgtatttgatcgtgaagacccatttacaaccaaccacattttttccaggaggtaaagatgtaacactccatgtcttgttctgttccatagcctgtaactcctcatttaaagcccctttccatttgtcagaaactatggcttgtttgaaagttttcagttcaatttccagggaataagataagatataagaacaaaaagtgggtttaaaaaggtcatagctaagaacagatgatagaggatatggagtagtatggttagatggtaatggagtagaaatttgtgctaatgcacaatgatactcagataaataactaggagccctagtctgcctcttagtcctttcaacaggtaaagacacagatttaatattcgaaataacaggaacattctcattaggcaacctagtctccctctgaggtaatgatgatgatgatgatgatgcaacatttcctttttcactttcaatcaagtcacgaacaaatgcatcattatcataagtctcatttactactgtagagggaactgctgttttaaaaatctcagtcaaagatgcagcaggtaaaaccgattcagatatttcattattagatgcagatgcagcaggagtatgagatgcagcaggaacaattgtttcagatgcagatgcagcaggagtatgagatgcagcaggaacaattgtttcagatgcagatgcatcaggagtatgagatgcagcaggaacaattgtttcagatgcagatgcagcaggagtatgagatgcagcaggaataatcgtttcagatgatggatgagatgattcactaataaatggaacaggatttggcagaatggtatgtgaaaagaaatcagtttgatatttttctttattatgaaaaggaaaaatttgttcatgaaaaacaacattcctagtgatcgaaatgacattagaatcaagatctaagactttgtatcctttgtatccagagggataccccaagaaaacacaaggttgtgctctcagagtaaacttgttacgatctttttgtaaagtacttgcataacatagacagccaaaaattttcaatgatgcatatgtaggtttctttttcagtaacttctcatagggtgtgacattattaagtaagacagatggaatcctattcactaagaatgcaacagtcgaaacacaatcactccaatatatgataggaacattagactgaaaaagcaatgcacgagcaacatttaacaagtgttgatgcttccttccaacaactgaattttgttgtggagtatatgcacaagaaaaatagtgaatcatgccattttcttttatcaattcagttagtttcagttcaggagcattgtcacttctaatagcttttattcttatctgatattgagtatcaacaagtttaatgaagtttgtaaaaatctgtaacacatcacttttatatttcatcatttaaacccatgtaactctagtacaatcatcaactacagttagaaagtacttatatccttctatagactctactgaaaaaggtccccatatgtccaaatgaactaagtcaaatggattagaagacacattattattaaaaggaaaagacagacgcttctgcttagctaaaggacacacagaacaatgatgaggactagctaatgcagacttattaagagaaagacaatcagagagaagttctaacttggcagttgagggatgaccaaggcgttggtgccatagattcccatcagctgacaaggatccacagaagttgatgacactagatgatgcaactggtgtattcagggattgaagattgaggatgtagagattgtgatgaagattagcactcccaatcatccatccccgagaacactcctgtaaaaaacatgatgtaggataaaagtgagcaaaacatttattatctcgtaaaagagtactcacactaatcaaattaaaacgaaatgatggaacaaacaaagcattgtgaagaaccaatgaatcagataaatgaatggtgcatgtatgagtgatagggagactaatgccattaggtaatgctactgttattccagatactaaactagtctctttaaattttgaaaaatcacaacaaacatgactagtagctccactatcaattatccaagcatcattaggcaaagcagtatgtaaagaagagagacattggtgattgtatgtgagattattattctcatatctaagattagaagagatattgaaaactgtaccagatgaagattgaacagccataatcccatgttcagtaatagtagggaattgaggagttagagactctgaaacaggaacttgagcatgagaacttagctgactgattagtgtttgagcttgctcttgtgtcaacctactgacatcaagattgactgcattcatggccggagaaggataataaggaactgtgtcactagcaggaagctgtcctgtgaatacattggcaactgttctctgctctggcatgttattagcctgtggcctgaagactggctttgagttgaaatctgtctgaccacgaggattgtatgaagccttattaccttgagtattcccctgacccggaatcttgtaacccggtggataaccatgaacctgaaaacaagtctgaagagtgtgtcccaacttcccacaatgagtacacaatggtcgattactcttaggtcgatatgcattataagcagcaacaaattctggctgttcaccctgatatgaattaccatcataagattcagaagtctgaaaagcaacattgtctgtcttgatcatcggtttaacaacacgttgacgcatcttgtgccacaatgttatatgcttctttaatactaggaataggcttcaacatcagaatgtgttttcgagtctgctcataagcttcatttagtcccattaaaaacttagtaacccgacttctttgttgtaatctttcccaaagtactgcagcattacactcacatttaccacaagtacacacaggtaactcaatgtaattcttgtactcttcccacagagttatcaattcagtatagtaagcactaacatccaacgatccttgttggatactactcaatctttgttcgatttcaaacactcgtggtgcatcatcttgcttaaatctactcatcaaattattccagattccttcagcagtagacatgaacaatagactctgacctatctttttactcactgaattcattaaccaagttgcaaccatatcgttacaccttgaccaagatccagaatcacgatgattgggaggaggtttagagattgtaccatcgacgaatcccaatttgttacgcacattcaacgccatcctcaccgatcgtctccaagaatggaaatctgcaccagaggttaatcgatctgtaaccagttgtaaaccagcatgatcagtactatggaggaagaacggattatcgtaatgatccataaccgattgtctatcgacatcgttgtggtgattgaagttattcgatgttgcatcaagaaaagatggacgaagtggtgttgaacccatagttgatttgagctcaaacgatgatagaaattgctccggattgaagatataaagagaatcaaagcaataaggtcaaaaaaaacgaagaagaaactcagatttctctcacgaacatgaattgaaaaatcgcgagaaagatgatacaacatgaatccaaaagaaaacaaagaagatgaatgagaacgatttcaatcgaagaacaactcatgatcggagatgctctgataccatatcaggattctttaatctctgtaacaaactctagagagagagtgaaagaagaggaagaagataacagaaacaaagaatcgtttattctcattaatttggtaaaatgtacaatgtcatgtatttatactctaatacatattttatactatagagtaaaatactcgttatactaaacctttatgcactgaatcattattataattgcttgaaatggttctgtatagtaaattgttaatttgatttcagacaaaatatattaattctgaagtcagcctaacaattatcgagggtcaaaactctccacatagtctaacgattaagctttttcttgttccatttttcttttctcttattcgtatcatgacctttttatatggatatattgtttacctagtcaaaaaacaatccaagacaatccataacttctttttttttttgcttatgacttgatttatgattttattttgctttaagcttggattttagatttaaagcttatgtagatctcttacattttagatttatacaaaatacattcaagtgttgatgttacatataaatatttaatcattaaaaaaatcaaaattttaaaaaatcaatcgcaacgctaataatacgaacaacctggtgatcactcccgcgactactaaacgaacaacatcccacaattttaaaatcacagtcactagtcgcaatcgcttgtgattttcaaaggaacatggccaatgtgtaaatgataaattaaaacagttgtcccatatagttaagttcaattagaattttcttatttaacttatagtttctgatttatattattaaagtataagatatattttttatttaattgttaataaaatcatataaatttaaatgatttttttttactttaaataccgtgttcccaattttttttatatccactactaattacatcacaccttcataaacaaacttcatttatatatttcagaacatttgcttagatttgtattattttagaacatttagtaagacactttaattgagtatcaagataggaaatagcaaaactatgatgaaaaacatataatttggataatttcgggtaatattacgggattggaaaatgtttgtagctaacttcaattctcaaattatcactaatttgggtatggatcacacaattacggttaatggtccacttttaagctaatactagatttgagtattttattatcaaataatattgattgattaaatcaagttttattttttcagttgaatatttaaaatagtgaatttgtaaactgatttttttattcatttatttatgaattttgtatcttttttaaatttattattaataaaattattttactcacttttcccaaataaattcattttataaaaatatttgataataaaaaaaaaattattacattttgttttgttaccaatcatattttaacatttaaagtctctacaaccaaaatttttaccgtcaaagtcgtaacaaccaatgtgtttacagccaaaagttatcagtcggccccataaacataattaaaaatgatcatactttaaaaatttgagtgtgttcatgagttttagtatgaaagtaaaatttaaatgcatggttgagtataataaaatatcttattgtgtttctaaaattttagagagaaaaataaatttaaattgaaacattaatttgtaagagcaatatactacaaatagttattaattttttattaactgttcacttatgaaaaaattactaaacccaacataagtttttaatttaagacaatgacattgaaagagtcatacttttttgtgaaattatataaacaaatcatgagaattcaaaaacattataatctatcctctaaaaaaataaataataacaatggttatattattcatgagttgtacacaaactgatttgtaagttgttaacaaacagaacaacacatttgagtgttcatcatttaaatcaaacgtttttaacccaaaaagttagtgatatttttctttttacaatatattatgtttttatttgacaaaacgatgttaaggttgtatcacaagattaacatctcaaaataacaaaaagtggtaaaccaaatagtggtttgaaatcacaaaaagggataggcaaaaagttgtgtgaaataacaatgacactataatggatgaagatgaagtcaccttttaagtgtttgatgtgtaagtgttttgaaaaacaaacaactatcatagtttcatataaaattttaagtgcatttaaagattaaattatgcaatttaacccaaaaataaacaaattctcaaacaatatcaaatctacatttttcaaatgagattcaacatagatatggtcaaactttcaaaacttagaataatcttcaactattatgattataaaagtttaacctctataagaacataatataataataaattcatgcaacgcgtgagtattttttagttcatttaatcacactaataacatgtacaacatactaccatcaacaaaagattgtgtcgtactaaaaaataaaaattataacaccaaggaaagtaaaaaaaaaaaaaaaactaattgacttatattaatggatgaaaacccctaaaccattcacctacttatctcattcgttgttcgcctagttaacaaatttgatattgttcaatcaattacatctgagatatcttaaagagaaaatggtttattagcttgtttagtccattacatgcaaaagtatctaaaactcctgaaagtgaagacgacatcaacaacaactatgtcaaacccatataaagaagaattgtaacctcctagtgtttctcctgatcgataataccaacaacatataatgtcttacaaacaaccttactattagagttcgtacttctacgtacaaccatataatcatcaattttatgctcataaaagcattggttgtggcttttgggactttgaaaccttggacatgccacaacattttgatctcgcaagtctatttaacacagtaaatggagcagtaaagaagctgaaccactcttattcgattagaaaatttcatgctattaggatgccacaaagcattttgaaagcaaatatttgccaaatataactatatttttcaaataagctagatttctagtctttgaacaaaggatgcacaaaacgacatttgttgtgaaatagagggagtaataatttttttttttagctcctttagattcaatgaatcatatggttcgtagagaaattaaagttgaggttttgaagtgaaaatgataaaactttaaatagttaggtgatataaacaaaaaaactaaagcatggttcaactatagtttgatttttcaacctcaaagcttagacagtggtaggagaaaagtgtatcatttcacgaactctcacaaatatatctcctaaccgaatatttaaactgatttcagaattacatacatataaagtaaaagtagcaaatagataaaagagttttaaatagagatattcttttccgtacaacatgattccaaccttaaaataattatgtattctagaatctactagccacataatggacattcatataaaaataagattattaatattaataatttttatattttttttgctgcaacttttttggagggtggataaagtccattcaagtacaaatggtacccgtccattaaagcaaatttgttcattaaaaatcttttggattgggttacgtaaaatgcgactatattgccctagttcttttcatatttggttaagatttaaaactgtaaatctccattcatctttgtttgattttttcaactgttttaaatcatcctataatatataaagttatgaaaaactcaatctttttctccctatattgtgattcaaaattaaaaaaacggacatatattacccaattaatggaaatgatgtgtgttcaatgtcccacatcgactaaaatattcagataatgatttagaataatattatatatatgattaaaataaattcaaattcgaatgtataggaaagcttaccttaacaagcatccaaatttaaaattttgtatatgatttaattcagtctttagttttattgtttagttttaccgagaatattaaaattttctaatatcaataaaaggttttataacattataaacatttgaacaaataaaaataaaataaataacatgggacaaattgtattgtggtatacagttatatggtgagatgaatttttgaatcaacattaataaaatttagaatatcatcaatctgccgctttattatttttaatactaccaatattagaaatatctaaacaacctaattaagataagattgtatataccaaaaatttctctgtgatatacagttacttaataacaatcgtatattataaaatataaatttcttagaaaattttacaatttgcaaacttatgtatataataaatagtcatcaatttttaaactactatttttagaaaacaaatcatgagatgtgttatattacagaacaaagttatatgatggacgggtttgaatcaatatttataaattttttgaaatcattaatatgttgtttcaatacgggttaaattctcagtttattaacaattgttatgtggacttgtgatatatttttacttaataacgattataaactaaaatagaaatattttataactaaatataatttataaaattttatatatacaaattttaaaatataaattgtcttgcagtttacagctaattaaaatttagttgtgatattatatccaattatccatataactacacttttttctccacaattagggcgtgacaaatggcaacacttcaatcaaggaacagaacacaatgtgaaaccagactgttctcatttattttccagcaagtcaaaaagtcaaactcaaaaagtcctctctcggtcaactttcttcttggtccccatcttcacaaatcacaactctttttatttccaaagaccaaaaacctgagaacacaccggcgacctgaaaatggaaacttcctgttttacccttctcggtctccttgtctccctctccttcttcctcactctctccgcccaaatgaccggaaacttcaactgcagtggctcaacctcgacgtgtcaatctctcgttggttactcaagcaagaacgcaacaacgttgcgcaatatccaaaccctttttgccgtcaagaacctccgctcgatcctcggagctaacaatctcccactcaacacctcacgtgaccaacgcgtgaacccgaatcaagtcgtacgtgtcccaatccattgctcttgctccaatggaaccggtgtctcgaaccgggacatcgaatacaccatcaagaaagacgacatactctctttcgtcgcaactgagattttcggtggtctcgttacgtacgagaagatcagtgaggttaacaaaatccctgacccgaacaaaatcgaaatcggtcaaaagttttggatccctttgccttgtagctgtgataaattgaacggtgaggatgttgttcactacgcacatgtagtcaaactagggagctctctcggtgagatcgctgctcagtttggaacggacaacacgacgttggctcagctcaatggaatcattggtgactctcagcttcttgctgataaacctctcgacgtccctctcaaaggttaaaaacctgaaattttggatcttttgagttgaaagtttgtgactttagtagttttattggatatatctaaatgggtttggattggatgatggtttagatgaaataaacgaaaaaatttgattgaaaagtctttgacttttagtagtttcattggacaaaccaaatctaattaggtttgagtttttattactaattggtgattggctttgaagaaaagttatgaactttgaactttattttgcagcttgtagctcttctgtgaggaaggactcgttggatgctcctctgcttctgtctaacaactcatacgtcttcactgcaaacaattgcgtcaagtgtacttgtgacgctttgaagaattggacgttaagtgattgataatctcgttgtgtttgtcccataggataagcttgttcttttttcttctttttctagattctgatggttttggttttgtatcttgtgatcagtttaagctgtcaatcatcatctgagattaagccttcgaactggcaaacctgcccaccattttcacaatgtgatggagctttgcttaacgcctcttgcagacaacctcgtgattgcgtctatgctggttactccaaccaaaccatcttcaccacagcttccccagcttgtccaggtttgtttgatccaagtttctgcgcatttggttatagtgtagtgtaattaagtgacttaataacctggttactctctgatatgaacagattctgctggtcctgataactatgcatcaacgctcagctcaagcttcaatttcgtgattgtgttgattcagtgtgctctgctttgtctctgccttctctagtaatgttttgttgtgtgtttatgagtgtgtatctaagtacagttcggattaaaataaagacattgtttcacctgaagcatcacgtccttgtaccatttttatattggaaacatttcagcttttgacacattttgttaccaactaaacaatacaaaactttgacatgaagttaaacataattttcattattcaaaaaataatgctctgaggcagttttcactttgcactttgcatattacatgaacaaaaagaagaaaaacaaaacaaaaaaccatatgttatttttctcgaaatctgaaatcccaattcgagttatctcgaaagaatgtgggaactagaagtattttccagtaagcgtgaatcataccgacgtgtgactgatgctttacacaagcgaagttggaattgtcaagtcaatccaaatttgcaatgacagcgtcaacgacctcttgagtggtactgtttccaccaagatcttcagtccgacaattcccttcagcgataacacgcttcacagcggtttcaagcctgtcagcaaaagaagggaactgaaggtgtctaagcatcatggctgatgacagcaacaaagccacagggtttgcattcttttgctcttccgttgtatccttccccacgtttcccgctgatgcaccttgctcaaagaccgcatactccgccccaacatttcctacagaaaatttcatagcataagcaagagaatctacttctctatagtgcttgtacattagatcaaggtaaaatgaattttattattacctccaggcatgactccagtacctccagcaataccagcagcagtgtttgccactagattaccatagagattaggcgtcacctgcaaagcagatacaagtaaataaaccaaaatagaaggaagctagcccaagcatcaacaagtgctgaaaaacatttaccatgacatcgaattgctctggtctagccacaagttgcatacaacaattatcaacaatgatttcattgtaagcaatgcttggatacttcttagcaacctcttgacaagactccaagaacaaaccatcagccaatttcatgatattagccttgtgcactgctgtaactttcttcctgttgttcaagtaggcatactcaaacgcatactttgcaatacgctctgaacagaactttgtaatcacctaccaaaacattagcatcagagacatctttgatataacatgaacatctccaactttcacatctactaccaaatcactatgaatcaaatcacatttgtaaccaaaacaatcaacaaaaactgagaaattgcaccttaaggctctcaacaacaccaggaacaacttcatgttcaagacctgcatattcaccttcagtgttctctctaatcacaacaatatcaacattctcatgacgagaagctaaaccaggcaaattgaaacagttgaccaaagaagcaaagagatcaagctcctttctcagattaacattgagagagctcacaccaccaccgacgggagtcttaagaccacctttcaaacaaactttgttcttcttaatcgattccaacaatccttcaggtaaactcttcatatctccatgaacttcgaacggttcgaagtaaaccggagcgtgcatcgcttccatcacttgttgaaccgcgtttgttaccaacggaccaactccgtctccggggattaacgtcactggtcttggttttccgtcaccgggtctgggcatgtaagtcacggatcgggtctggattttggaaccggaagcgatgctacgaagattcttcagtagagaaaacgattggcgagacatcttcttctgcaattttgatcggaatcagattcttctgaaaatgatcgtcagaggaagaagatgaagaagagttgcgactttttggaacgaagaaagaacaagaaaagcgtttacttttagtctataacttttattgtttacataatagccccaaatgtttaaccgttattaatgtttagcccgtttataatttgaattgtacattaagaccaaattgggtaaaaccatgttctgttattaacataatagtcctcgatttcttaacattatacgttttagtccgtatgtaatttagtattttgcttataagaccaatttggaaaaattgaatttttgagttctgtagtagttctatggaacaatctcttgtgaaggctttgttgaagaacacgaacaatccgagattagcatggagaatcttcaagaggatattctcttctccttcagaagaaagccatggcatttctttagatgcgactcctacaatcgctcgtatcctggttcgagccaaaatgcacgaagaaatccaagagcttcacaatcttatactctcttcttcaatccaaaagacgaaactttcgtctcttctctctgttgtatccatcttcgcgaaatcgaatcacattgataaggcgtttccgcagtttcagttagtacggtcgcggtttcctgagaacaaacctagcgtttatctgtataatttgttgcttgaaagttgcataaaggaacgacgtgtggagttcgtttcgtggttgtataaagatatggttttgtgtgggattgctccacagacttatacttttaatctcttgatacgtgctttgtgtgattcaagttgtgttgatgctgctcgagagttgttcgacgaaatgcctgagaaaggttgtaagccaaatgagtttacttttgggattttggttcgtgggtattgtaaagctggtttgactgataaagggcttgaattgttgaatgcaatggaaagttttggggttttgcctaataaagttatctataacaccattgtttcgagcttctgtagagaaggtaggaatgatgattctgaaaagatggtggagaagatgcgggaggaaggtttggtgcctgatattgtcacttttaactctaggatatcagcgctttgtaaagaaggaaaggttttggatgcgtctagaattttcagtgatatggagctagatgagtatctgggtcttcctcgtcccaatagtataacatataacttgatgttgaaaggtttctgtaaggtagggttgctggaagatgccaagaccctctttgagtcgattagagaaaatgatgatctcgctagcttgcagagttacaatatttggctgcagggtttggtcagacatgggaagtttatagaggctgaaacagtcctgaagcaaatgactgataagggaataggaccaagtatttattcttacaatatcttgatggatggattgtgtaaattgggcatgctatccgatgcaaaaactattgttggtttgatgaaaagaaatggtgtttgcccggatgctgtaacttatggctgccttcttcatggttattgcagtgttgggaaagtcgatgcagctaaaagcttgttgcaggagatgatgaggaataattgtttaccaaatgcttatacttgcaatattttgctacatagcctttggaagatggggagaatatctgaagcggaagagttgctgcgaaagatgaatgagaaaggttatggactagacactgtcacctgcaacattatcgttgacggactctgtggaagcggggaattagataaagctattgagatagttaagggaatgcgggtgcatggaagtgctgctcttggtaacttaggcaattcatatatcggactggtggatgatagcttgatcgagaacaactgtttgcctgacctgatcacgtattcaactttacttaatggtttgtgcaaagctggaaggtttgctgaagcaaaaaatttgtttgccgagatgatgggagagaaactgcaaccggactcggtcgcatataacattttcattcatcatttctgcaaacaggggaaaatatcatctgcatttcgcgttctcaaagacatggagaagaaaggttgtcataagagcctagagacttataactcactgatcctgggcttaggcataaaaaaccagatttttgaaattcatggactgatggatgagatgaaagaaaagggcatttcaccaaatatatgcacctacaatactgcaatccagtatctttgtgagggagaaaaagttgaagatgcaactaacctccttgatgaaatgatgcaaaagaacatagccccaaatgtattttccttcaaatatttgattgaagcgttctgtaaggtccctgattttgatatggcccaagaagtctttgagactgctgtaagtatctgtggacagaaagaaggcctgtacagcttgatgttcaatgagttgcttgctgcagggcaactactaaaggctacggagttgctcgaagctgttttagatagaggttttgagttggggacttttctttataaagatcttgttgagagcttatgtaagaaggatgaactagaagtagctagtggaattttgcataagatgatagacagaggatatggatttgaccctgcagcattgatgcctgtgatagatggcttaggtaagatgggaaacaagaaagaggcaaacagttttgctgataagatgatggaaatggcttcagttggtgaagtagcaaacaaagtcgatccaaatgcaagggatatacaccagaaaaagcataataagaatggtggaaacaactggcagaatatattacacaggtatggatgacactttctccttctggtttgtcatcatttattgtttctcctgttataggcgccgtttcaatatgtattttaagatgcttttattggaggttttgtagttctgctttctccttttaaagtttggttttttgaggaaagaaaaagattccaagatttggagtaagcattcgtgtatatgattaggcagtagagtctttggtttcaagtgagtttacattaagaatatcggtttaactgtcttgtcggaaacctaatgaatgttttctctatcaatcgctattttgcagagatgacggtagtggaattgcgttaaggtctctgtcaagagttaaaaaaggatggggtcaaggggatatatcaagctttcagcctccaagagttgactacttagactactgggaggacgatggttaaggatttgcatgactctgttttctttctgatgggaaagttcagatggcgcaagcaagtttttgaggtgcagctcatcaaggatgacaggtaaaggtaagaacgaatactgttgtagacacgtctgaaatacaacagccttctgatgtagacacgtctaatcttttggacaaaaaaacaaaattctcgttaaatcaaaaatcaatttaaagtaacgtagagtaggacttcacatcactttcttcattttcttcctactttggacagtagtatttaattttataatcaaataatgatcttgtggcatactcttttgatcattgtctccatgctcatgtgtaagatgttagccttatagtagcttgtgatgtacaaggttgagagatctctaacgaagctaaatataactctctggtaaaagtatcacggataatgttgaggaatccaatctatttttaataaccttcatgttcagtggaaaaatattttagaattggaccctcaccttctgttttcctgtctttgtagctaagctggtagaaccagacaagacgacatggctggacaaatatatccttgttagaacgacgtttaaacataagagctgcctgctttcataaagaatttgagcccaactttgaattttgggtgggaggaacacaatctacattattggagaaaatgtaagctttcttgtgctttctgtcggcacattttctggttctggaacagtaggagtttgtagtggggatacaaagagactaagttttataaaacgtggaagaccaccaagtgttagctgcttaattggaactaggtttcttcttaaacatagccatacagattattttttcctgtttttacaatatcagttttaaatgtttaatctcataatcaatatcatgaaatggatattcttgaatcccggcacattattttccatgtacatcaatgcaatcatggactagatagtatcctgtaaccagacatgtcccaaaaataaataagcgaaacacacagaatttttcaatcgccatagttccagtcttgcagagtttaagaaaccagacaataagattgtacatgcataaaatacaagtctatggaattcatctcttttatacaaaaatctgctagggcaatacaggagaccagttactactgccacttccaaaatgttgttcagggaactggaaatatgtttatacaggattcccatgctgaaaaggtaagtgagatttctacaaaagctaaaaaaatcagtagaatcttcctggtgctttgcagttacaaaacttcgtttaatgtttttcaggaaagaccagtgttgccaaaagaaccacttagcttgacttgagaagcttcgttcagacttattttaattgtgtgggtctgtgttaatctatatatgtcaatgcattccacgagatccgcttcacatgtcagaagaacccactccttatcatcatccaggtacttaaggtcaaaccaggaaatgtcatctatgttgaaacgcctagcaatctcttgcttcagctctgcgaagccccaactcgggagtaaggtaaaccgtattctggcctcaccaaatgtcgctttcactttgatggcacctctagctcttaaactcgtgttgctactacctgttaatggagatgaattatcaagaacaagaggctccttgaatgttttatggctctgggttcttgcaagacattttgtttcctcctgattcacattatgcagttgtgcttcgctatgagctctctttaacaccgcatcagcatcctcagcaactagaatgtttccagtattctcattattgttgcttgaaccagagctcttgctgcaagaagatgatggtgacctggggttttcctctgccataataccattatcggtttgagcattcaaatgacttggctgttcattactcttcaaggaagggccattgctagacatatttggggagttcaactctgggaagcttgtatagaatgaatcgagttggatagagccctgcgcaccttggacagagtccataactagttggagtttcttcaacgaatgcccaaccttcttgatttttcgggagggccatcgcattattccatgttgcctgcatatccttttcaaggtagttggacaaactgcaacacaagaacgaaaccttgtcagatcactgtctgagagacagataaatagccatgatgaaaatgtttgtagagcatgatgattgatccactaccacatagatataatgtaagactgacttctggtttcattgatatttatgtatattggccatggagttttcacatatcctgaggcatgaatttttgttcaacatattcatttggaatgttttgggttttgactaatgaacgtaatggttatgcttttcccaagaaacaataagaatcaaaattcataaagaatggggctatgtcaccagcagtgtacaacattctcttaccaccaatgctcttggctgcatccttgaggcttccagcaaagtattgtcgaagaacctccaagccaatggtcttttctgtttttgctctttttttctcccctggtctcctactgcttaacatatttcccccaccagtcgaagctgattctgtgcttggaccgatgtcgactctgagtcctggagttgatgcttgctgtaattgctcagcttctaaaggaacattattggggactggatcaagctgactgttctcccggccagatgagagctctttaggatcttctttctggtactcccaagaaagtgatacatctttacccttctcgtttgcctttatcatgtgggcgatccatgaggattcttgcatttgaatttctgtcaacgactctacggtttctgctccacatagcaggttttctgagaagagcattgtctctcttacaggtaatacgacttctaactctaggtctttgatgaaaagatttgaactcctgaaatcttgctgcagtgtcacacatagtgacttgagcatttcctgttgcgcttcagtgtcaaggcatgctttcggaaagaaaaattccaacacaaactcaaccaaaccagatttgctctttaatggaactgctaaagcagcatgtagtccagatatcttggcgtggtgtgcaagggggtagttagtcttgctaaatgtggccacttcgggcacaaaaaagagtttggtggcttcaaatgctttcccaacaatgccttccccctggagcagatggtgttcagagcatgcctcccaaaaacttttgctctgttcgtcggggacagaacaagcagaatcgattgttgaaacacactcagagaagttctcatcagaatgtcgggaaccaactttcccttgccgagcacacggcgcccatgacaaagctagaggaaaatcatatgatctgcagattgtggccaggaaatcttttatttcaggtaatgcagcacagtagaaatcactatagacctgcagaaactgaaacatggagtatgaccttagcaatgcatatcgttgtttctaggagctgaatgaactaagaatccagttaatgcacctcagagcttggagtgttcaagttacttgaactccttagatcgacggcctgcaaaacagcagcgtctttagactgttgtggcacataaacaaaacttctcactgttatcacagacattaatcaaagaagattatggctgaatgactgacaggaggagacatgatgcagaaagaaagatgtagaacaatcaaagtacaaacgtatgcagaagatgttgttggactctaaagaaaaccaaaaaacaaactggacaaatgtgaggaattgaataatgagcaaacagagaaagccatccagtgaaagatacattcaagcatgaggtttactggttgtatgggtctaaacatgtgaggtaagcgttgcgggatctatagagtagtttgaggtagaggcaaaacctcaagagctttacacatcttctcaagttcttgccggtaattcatcttctgagttgttgtgacgatctcaacaacacccaaacaagtcccactacctctttcgaaaacaggaagggcaagtgaaccacgaacatcacacttttgtgcttctttgatgcgtggatattcatctcttctaaagaaacgcacatcaggagtccactcaggaaacttctgcaagaaaacacgaccgggaagacccacaaaatctttcataccctcatcagccgggaaattataagtctctgaaacatgtctgtattctgcaaggctggagtattcttggttgaataaatgtggctgagcccaagtagtaagaaagctcttcccttcctgctgaattggcacccatatctgaaccaagaagtccttatcttgcaccgcctcgttaagaccactaatagcttgtagtagcctctccttcacagatgaagacgggccttcacttgcacttggagcaatccaccaactttttcccacctcagcttcttctaggagaaacttttcagcctgaggaaacattctctctgtttcttcattagagaaattatcttgagatggattctcaccaaagcagaggaaagggctattgtcattcatggcggtagaagctgaaggagattgttctgtctgcttcaagctcttactatctgttgtctctagccaacatccatcaaacaagagttcatccatgaaatccaaatccatggcagtgtcagcgaatgccccaaagctagaattaggtgaaaacccaccatttccttcgcctccatcactaccaccatcatcttccatgtctaaagattcgtttttatacctccaacagatactaccaaatcctcaagttctcagagactgtgcttagctgttgtttactcaagaaccgaaactcataagggtcttgaagatgaatagagacaagacaaagtcctctccttggaatgttaaaacccaatctgaaaaagttgcagaaacattgtcaaagacccacccaagaataagacaagagaagaatcatatcatagagatgctatataatctatataagtagcttcgctttcaatgaagagttgacttaagaaggtatccatcaatcaaagtagagtgccatcaatttcaattacaaaattctcacctatggacatggaaacgaaatcaaatctgattgtccatgaaagggtaagattttcaccaaaagttactaactttatcaagatttgtttgcacaaagaaacagaaaaagcttcactttgggacctatacccaagaacacttagagaaagcaccaacaaacaaaaaaaaaacattgagaagatgcacagactggattttactctgtctaatgtaaaaagtaattggtctctctatttcttcatacatataatggtaagcaaaatcaaatctgagaatatatataaacaaaacaaaaacaaaacctgtgaaatttcttatcacaagaagcttctctctttcttgaatggtgtgttctttttttccttctttttcttctggacacaagtacttggtgaaggtgaatgattaagattgttttagtctctaaagatgtaattatgagcttcaatattctttttagagagcaagtggacccgtgataagagcatccactgttctaatcacacttacatacaactttgtctgtacctgtaaatctgtaataataaagaaagtaaacaaacagtcgcttggtttctcaaatttaaatcaatcttttcttctgaaagaaagatcaaagaaggaaacaaaaaaaaaaaacaagtttctaagttttggtttggagcctgatggttaaatgttcttatttaatcgtgtgattggtgttattctgacctcctctttgttgcccctaatcataattaattcgtataagattattattattattactataacagttgtggtgattacgtatgcgtacactttgttttatttcttcgtcggtactttgtgtttttttattcggggatgtttcattggttagaacttggctgtatcaatcggatcaagatcatttcttagagaagacatgtctttcgtgttgaacaggttcgttcgttcatcaatatagtttgacctttaatactttattttcgatttctcttatatgaatattctttctgacatcagctcgagtctcaaagtttaaaacattttgtatataggatggaatctatatatgatcgatatataaataattgcattaaaggcataatgattcacacaattatggtaatatttattcttacacatgaaattgctatttatgttccaaaatgtcgtcattttattaatttcatgacaaaaattactgtcataagttgggtgctaactagacaggttgtgaacttcccaatgttacacattatctaaatcgatataaaaacaaacccaaaaaaaaaaagcgaacagaagaaacaaatcattcatcttaggtttcatcattcaaccaaatttaatgattaaacttgaatatttgtgtatataatatattaatatgtacattgatatccaacgggtcgggcttagacgcttagttaaatgatcaaaacggccctcaatgatttggggagccatagtccgatccccattagccgcgtccgggacaatgacatgaccaaaccaaaggtcatcaaactctttgaaaatagttgaatcctcgtgtaaatcataaataacgtatcaataataatcaaaggtttatactttatactataaatgcgcacgacgtctctttctctctctctctcttcctctatttcttagatttgtcatttgttattcgtctgaatacggcaggtcctatctacacatgtaacaataatgtcgtttaaaattagtgtttttaatctcactgccagtactataagattttgatatcatataagatcaatatcattgatcgatccgagacaaaagaaagaaaaactaaattatgttcattaatcgttatgtatagcgtaagtcgtgtgatgtcaaaccatctcgtgattgagtatgatgggtacaaaagctaggagaccaaaccctgaggtaaagtaattactgattgtatgaacaatttttgtgtgagcaaaaaaaaacctgtaaaatatatatatatgcccatgataagatgatatcacatttttgtaatgaaaacggtgtgatttaactaaattttatgtccttatcttggtgcatacaaggcgttttcaaagatacatataataatttcccgtacaatcgaatagaagcattggattattggaataatacatgttttatcgtacggtaacttaagtgcttactcggttctgtttgataaggtatacgaaacaacattttcaagcttatgccttcttaatgatctaattaagtatgcttaactgtttttatttgcttaatggatatgttgaagtcaaagaacaagaggtaatcagttcttgcttgtctcttcatactattcatatctgaatgtgatgttatataatatattcttattgtaggaatcgtgaaccctaaaagtgtgacattgatttggtactaaatatcattgtgaatctgctaactggaaagcgaattcctccaagccatgtaagccattctgtttcaaaccatgtaagccattcatcttgactttgtgactttaatccttagagaatctgtctttttcaattccttgcaacacaagtcacatttctgctgagtaaattagttgtgatatagtaatccttaatttcttgccacacaagacacatattactgagttgttatcctcctatttttaggctcctgtgaggagaaacggaaagtttgttactgagctgatgaatccaaatctcaagggaaagttctcaacagaagaagctttcctagttttcaaactcgcctctgaatgtttgcagtgcgaacatagaaaaagtctcatcacaaaagagcttgttgcaacacttaaagccttgcaaactaaaccacacgtaaggagctaggcttactataaccatatgcattcttgatgatatttctcgcactcgtgttataaaacctatcgttttgcttgcagattccaaacattcaaatgcttgaactggaaaagtagcacgaggtgggagcatcttccagtcaacaacaacagtttgaactgtttagcgttcttaagtatgcagattccaacttcttcttaagttataaaaccgatcttttgtttgcagattccaacttctgaaatgacaaagcagaatctggaggcatcatcttcaagtcaaactaaagcataagtaagaataggacttattgttacccttaatgaattc

SEQ ID NO: 239 - DNA, 35515 bp, Arabidopsis thaliana
  modified_base (23501)..(23501): a, c, t, g, unknown or other
aaactgaaacatggagtatgaccttagcaatgcatatcgttgtttctaggagctgaatgaactaagaatccagttaatgcacctcagagcttggagtgttcaagttacttgaactccttagatcgacggcctgcaaaacagcagcgtctttagactgttgtggcacataaacaaaacttctcactgttatcacagacattaatcaaagaagattatggctgaatgactgacaggaggagacatgatgcagaaagaaagatgtagaacaatcaaagtacaaacgtatgcagaagatgttgttggactctaaagaaaaccaaaaaacaaactggacaaatgtgaggaattgaataatgagcaaacagagaaagccatccagtgaaagatacattcaagcatgaggtttactggttgtatgggtctaaacatgtgaggtaagcgttgcgggatctatagagtagtttgaggtagaggcaaaacctcaagagctttacacatcttctcaagttcttgccggtaattcatcttctgagttgttgtgacgatctcaacaacacccaaacaagtcccactacctctttcgaaaacaggaagggcaagtgaaccacgaacatcacacttttgtgcttctttgatgcgtggatattcatctcttctaaagaaacgcacatcaggagtccactcaggaaacttctgcaagaaaacacgaccgggaagacccacaaaatctttcataccctcatcagccgggaaattataagtctctgaaacatgtctgtattctgcaaggctggagtattcttggttgaataaatgtggctgagcccaagtagtaagaaagctcttcccttcctgctgaattggcacccatatctgaaccaagaagtccttatcttgcaccgcctcgttaagaccactaatagcttgtagtagcctctccttcacagatgaagacgggccttcacttgcacttggagcaatccaccaactttttcccacctcagcttcttctaggagaaacttttcagcctgaggaaacattctctctgtttcttcattagagaaattatcttgagatggattctcaccaaagcagaggaaagggctattgtcattcatggcggtagaagctgaaggagattgttctgtctgcttcaagctcttactatctgttgtctctagccaacatccatcaaacaagagttcatccatgaaatccaaatccatggcagtgtcagcgaatgccccaaagctagaattaggtgaaaacccaccatttccttcgcctccatcactaccaccatcatcttccatgtctaaagattcgtttttatacctccaacagatactaccaaatcctcaagttctcagagactgtgcttagctgttgtttactcaagaaccgaaactcataagggtcttgaagatgaatagagacaagacaaagtcctctccttggaatgttaaaacccaatctgaaaaagttgcagaaacattgtcaaagacccacccaagaataagacaagagaagaatcatatcatagagatgctatataatctatataagtagcttcgctttcaatgaagagttgacttaagaaggtatccatcaatcaaagtagagtgccatcaatttcaattacaaaattctcacctatggacatggaaacgaaatcaaatctgattgtccatgaaagggtaagattttcaccaaaagttactaactttatcaagatttgtttgcacaaagaaacagaaaaagcttcactttgggacctatacccaagaacacttagagaaagcaccaacaaacaaaaaaaaaacattgagaagatgcacagactggattttactctgtctaatgtaaaaagtaattggtctctctatttcttcatacatataatggtaagcaaaatcaaatctgagaatatatataaacaaaacaaaaacaaaacctgtgaaatttcttatcacaagaagcttctctctttcttgaatggtgtgttctttttttccttctttttcttctggacacaagtacttggtgaaggtgaatgattaagattgttttagtctctaaagatgtaattatgagcttcaatattctttttagagagcaagtggacccgtgataagagcatccactgttctaatcacacttacatacaactttgtctgtacctgtaaatctgtaataataaagaaagtaaacaaacagtcgcttggtttctcaaatttaaatcaatcttttcttctgaaagaaagatcaaagaaggaaacaaaaaaaaaaaacaagtttctaagttttggtttggagcctgatggttaaatgttcttatttaatcgtgtgattggtgttattctgacctcctctttgttgcccctaatcataattaattcgtataagattattattattattactataacagttgtggtgattacgtatgcgtacactttgttttatttcttcgtcggtactttgtgtttttttattcggggatgtttcattggttagaacttggctgtatcaatcggatcaagatcatttcttagagaagacatgtctttcgtgttgaacaggttcgttcgttcatcaatatagtttgacctttaatactttattttcgatttctcttatatgaatattctttctgacatcagctcgagtctcaaagtttaaaacattttgtatataggatggaatctatatatgatcgatatataaataattgcattaaaggcataatgattcacacaattatggtaatatttattcttacacatgaaattgctatttatgttccaaaatgtcgtcattttattaatttcatgacaaaaattactgtcataagttgggtgctaactagacaggttgtgaacttcccaatgttacacattatctaaatcgatataaaaacaaacccaaaaaaaaaaagcgaacagaagaaacaaatcattcatcttaggtttcatcattcaaccaaatttaatgattaaacttgaatatttgtgtatataatatattaatatgtacattgatatccaacgggtcgggcttagacgcttagttaaatgatcaaaacggccctcaatgatttggggagccatagtccgatccccattagccgcgtccgggacaatgacatgaccaaaccaaaggtcatcaaactctttgaaaatagttgaatcctcgtgtaaatcataaataacgtatcaataataatcaaaggtttatactttatactataaatgcgcacgacgtctctttctctctctctctcttcctctatttcttagatttgtcatttgttattcgtctgaatacggcaggtcctatctacacatgtaacaataatgtcgtttaaaattagtgtttttaatctcactgccagtactataagattttgatatcatataagatcaatatcattgatcgatccgagacaaaagaaagaaaaactaaattatgttcattaatcgttatgtatagcgtaagtcgtgtgatgtcaaaccatctcgtgattgagtatgatgggtacaaaagctaggagaccaaaccctgaggtaaagtaattactgattgtatgaacaatttttgtgtgagcaaaaaaaaacctgtaaaatatatatatatgcccatgataagatgatatcacatttttgtaatgaaaacggtgtgatttaactaaattttatgtccttatcttggtgcatacaaggcgttttcaaagatacatataataatttcccgtacaatcgaatagaagcattggattattggaataatacatgttttatcgtacggtaacttaagtgcttactcggttctgtttgataaggtatacgaaacaacattttcaagcttatgccttcttaatgatctaattaagtatgcttaactgtttttatttgcttaatggatatgttgaagtcaaagaacaagaggtaatcagttcttgcttgtctcttcatactattcatatctgaatgtgatgttatataatatattcttattgtaggaatcgtgaaccctaaaagtgtgacattgatttggtactaaatatcattgtgaatctgctaactggaaagcgaattcctccaagccatgtaagccattctgtttcaaaccatgtaagccattcatcttgactttgtgactttaatccttagagaatctgtctttttcaattccttgcaacacaagtcacatttctgctgagtaaattagttgtgatatagtaatccttaatttcttgccacacaagacacatattactgagttgttatcctcctatttttaggctcctgtgaggagaaacggaaagtttgttactgagctgatgaatccaaatctcaagggaaagttctcaacagaagaagctttcctagttttcaaactcgcctctgaatgtttgcagtgcgaacatagaaaaagtctcatcacaaaagagcttgttgcaacacttaaagccttgcaaactaaaccacacgtaaggagctaggcttactataaccatatgcattcttgatgatatttctcgcactcgtgttataaaacctatcgttttgcttgcagattccaaacattcaaatgcttgaactggaaaagtagcacgaggtgggagcatcttccagtcaacaacaacagtttgaactgtttagcgttcttaagtatgcagattccaacttcttcttaagttataaaaccgatcttttgtttgcagattccaacttctgaaatgacaaagcagaatctggaggcatcatcttcaagtcaaactaaagcataagtaagaataggacttattgttacccttaatgaattctttatgagttttcgtactaaaaaacagatcatcatcatcttgcttgcaggttccatcttctaatatggaaaatttaagcagaagaatcatcttccacactgaatctgctagtagctttaacaaagcaacacttctcgaagcaaagagatccaacaacatgcatggttagggaagaagaatcttgagtttatgttaaaaaatataaaaaagaagtgatatcttttacccttgttatatattaaaaaaaatacgtatacatttctctcttctttttgttaaagggttcaaatgaatttatctcattaattaacaatatcactagcaaaactataattctactaaaaaagttttcaaataattaaccaaaaaaaatatcatacacctttgaaatccacttgtcacaccaccatgcaatttcaaacttcctaaatatgaaaatataattttgacccactagtgaaaaaacaaggaaaatatataacaaaaaactataataataactagaagatgaagatcaacgataaagattgcgtaatcttgagtttagattttagggataatagtctgttataaaaggttctttcctttgtgtaaactcacttgttagtgataacaatctctttctctttctctctcgcaaagaacgctttcaatattctctctgcttttgccggcgaaaacgaaaccatgggtggttgttgcttctcgacgcctcttgataacaatcaacaacctccacaacagccacagattcctcccggcgaacgcaagaacgacggattcgtcaactggcctgtcacagagttcttcctctccgatatcaccacggcgaccaataacttcagttccgacgagatcatatcagagaacgcagaagaatcttccaatgttgtctacaaaggttgtttattagagaatcttggcttcgtagctgtcaagagattcaagaatacgccttgggatgatcctgactacttcacggtaccttttctttgcttttaaaggttatcaaagtttgcaacgttcatttgatctcttttgtttcttcaggaagacgcaaaaacagctggggagctaaagcacaagagacttgtcaagttgttgggatattgctgcgaggaagatgaaggacttcttgttgcagagtttatgccaaatgatactcttgctaagcgtttattccagggtatgattccttctcttctttcgttttcagatatagaattggtgaatatgagcttaagagtctggattgttagtcgatctgttctatagatgtatgtgctctgttttgaatcttggcagagaggctgcattgttggtttttgtggcatgattgtgggtgtagaatggtataaacgtatctgaagatagagagagtgcattgttgttggtttatgtgacatgctatagaatggtgtaaatgtatctgcttgtagaattgattgaaacagaacttattagcattctctgtttgaggtttcttttttcttttgtgatgcacagagaagaacatggaatggtcaatgaggttgcgagtggcgtatcatatagttgaagcattggattattgcaattctgtacgttttgacgagtacgataatctaagtgcttacactgttctgtttgataaggtatgttaaacaacatttttcatgcctatgccttgtcatgtgatctaaggatgctaaactgtttttactggtgttgaaggatggtgatgcctgtctttctagtttcggcttggtgaaagagatcatccgttacaatcgaagagaaggaggtaaccaattcgctcttgtatcttcagactattcatatcagaatgtaatgttttatattctcattgtagggaacgtgaggactgggaatgtgacatacagatttggtactatccttgtgaatctgctaactggattgcaaatttctccgagccatgtaagtaattctgttcaagcttgactttgtggaatccttggtttcttgcaacacaagttacattttactgagtggttatttatcctctgtttctaggctcctgagatgatcaatggaaaggatgtcactgagctcatggatccaaatctgaagggaaagttctctacagaagaagctactatagttttaaaactcgcctctgaatgtttgcagtggaagggttatatagagaatggcatcactaaaaagcttgttgcaacacttaaagccttgcaggctaaaaaagaagtaaggaggcttactgttacaataatttcatccctgaagatttttcgcattcatgttataaaaccaaatctttttgcttgtagatttcatcttctgaaatgcatgaagtaacaaagcagcacgatgtggcatcatcttcgagtcaacaacaacttccaccctgaatctgctaatagcttcaacaaagtaactcttctcgaagcaacatttttagggaagaagaatcttgattttctcacttagtgtactgacactgtgaagaaacaccataatccatgcatgatacatatacatgtatgatcaaacaatataaactttttacatagggaaaaagattcaacgttttaaacttcataaagctaatttcttgaatattggacatttagtaaataactctatttgcatttcataaactaattaacttatatatagaatacaataccacaatcctatacgttcatcatacaaagtatcacacatatatacagagagagttttttgttaattaagagaaagaaccaaatacccaataaatatataaaaccttaagttatcatatatcaaagtcctaacctaagatccaaggaacaacctaacgttgtgtctgaagatgtcgccgcaggaacattaagatcaatgcccctgacttggttctcttcctgatctttctcccaatgacatctcatgtgacctcctaacgcttgaccactggagaacactctagaacagatgttacatcgatgattcatccccgagaccaacttcacactcttgcccttatcttgatcaacgatctcttgaggaggtggaggaggaggatcttcggttatgtttttattggcgaaacatcctttgacgtctttatgtgttgctctatgtccgcctaacgcttgatgtgacccaaacactttcttacaaccatcacactcaaaccgttcctcaacttcacttgaacgggttgggacatcaccattagccatcattagtaaacaggaggctatgttatgctcttcctcagatggatcccaactcgaggatgatgacgcagcgtttgagttgatcctacgtttgaagttagaaggagggttgatgccacgccactgacgttcagggtgacatctcatgtgtccaaagagtgccttcagtgacccgaattgtttaccacattcagtacatggtcgtgcgatttgtgaagcatcagggtccggttgcgtgaccggtttaggccttggagaagacgaagaagaaccgacttcgttgttggtgagtttagtacgttttcttcttgggttttgattgtaactaggaagagttacattggaggaagcaaatgggatatcggaattgggatcggagtttgaagtgttcgacattattattgagtctcttactagagagaagacagaaaaactaaaagagaggaaaaaaaaaagtagaagagtgggagttatggttggttaagtagaagaagaacaagttagttttcatcgacggtttcttagcagttacttctccctgttttgtcggatttacatttctttttttgttttcctcataagttttgtttttctttcaattattattgtatttatctttgttattcgaatgaaaaacttaacgctcaatcacaaattatcaacgtcactacagctatatttaataagtaaaatggagataagaaaacgtaaatgtaaccattccacatttcgaaatcaacttctacagatgtacgaggtaacaacttcaaatagaatctgaaagataacagacgacccaaagtatgtaaaaaaggttgtggggattgggtaaagaggaaagaagatgaccattgaaaacaaatagtgtatcgatgagcggcttttctatccacaagttcgcgatcctatcataaatgtagttatacgaattccataaattagattactgaaagaaaacacattgtttattctataattgagaagccagagtggagtgatatcagttcacgaacctgtatgttactggccaatactccccaagagtcgttctacagcagcgttaacgttaccattggttgcaagcaaagcccttatgttctctgctctgtcgtagaatcccatttcttgcaactgttgcaactgagtcgcaaatcgctcttcaggaggaactggaatcaaatagacatgtttcagtggaaccatctcaatagatatataagaaatcaaagtatagcccctagtgaatctaaccattgggttggtttgtgccacttaggccgccagcaccaaggctgccaaacatattcatcaataaatctagtcctccgttattggctgtccctataaatatttccatagtagtgatttactcaataagcaacgtaatgaatatacgattaaagtaaagcaaaagaacaaaaaaaagcacactgtctaagtgaactagttgaagccttcatacttcaattacagataatatagtacctgtcgcagcaccagtttgcgtaggatccctacaaagaagatggattgggaacatgaatagaggttgatggaaatcaagatcactgatatcaaatgttaaaggaaagaaccaaaaaagaacgaaaatttttatgctcctattcaagtttatttcaaggattaaaatactttacagccgttgataaaggtcactaatgatcagcccagtaaaacatacaagagttgctgcattactaatgattcaacccatttattacttaatataagatagttcaccaccgagagaattacctggttagctagtgacactattttctaaacacagatcaacccaaaatcctattatgatatataaaggacattacctactcaactaatgttccaactaaagaaaacagaaaagggtatccaaacttactggccagccgtgttcctattctgagagaaaagtgattgttgtagagacatcatttgctaaaaagaccaaaaaacaatagaaaacattaggtcggagaaatttgactactgaatgatataaaaataattatctggagagacaacatgggcccaactaacctgcatcatctcgggagagctaaactggcgaaggaaatcagggttctgcatcatttccctcaactgaggattcatatctagcatgcttcggagttgtgggttaagactcataagctggaaatgaaggaaatattaaaatattaaagacagcctcacaatagctacaatgtctaaaattcagattactgaaggcgctacctgattcatgtactgtggattggaaagtacgctttgcatcatctgcgacatagcggggttttgcagtatttggctcaattgagaagcatctggagtcgcaccaagaggtgagtccgctcccagcataccgagtccaccaaggcctccaagcccaccaagaccaccaagtccagcatttgtccttccaggggcagttgtctggcctgtcaagtagccccacaatatgttctaaaatctttagtgcattacgagtaacagttaaactagaaacaaacagccaagaaacttattcatagacaaactagtcataacaacaaactgtgagaacatgaactcaccaattattactataatcaatactattcctgaccagtgtggtaaacataaactttcacttcttaaaaacaagccactcttgcttttatatttaatatttcaaccttaaactacaagtaaaatcccatatgaaattaagaggatgagaatacagtttcttaccagccgtggcaccccaaggattaggaagtggatttgcattaggtgtacccgtttcagcattcggtgccgaaatattattagaagtatcgcttccttgtgtagtaaccccctggtttcccagaagagcagcaaatggattagagctcgtattgtttccagcattctcggacatagtggtagcattcattaacggttcctggacattttcatacatacgcctaagcatgttaaatccctcaggcatagactcaatattactcatagccctatcagtatttctcatcatttcacgcataagctctgggtttctcgccgcttctagagtttgacgaaggatgcttgggtcattgagcacatgaccaagctcaggattgcgatctacaagctcacgcatttgagggttattcataatcatactcctcataaattctgggttgttcataagattctggatggctggagtattcatcatctctctaatcatgttagggttctgagctagttgttgctgtgcctgctcaagatcaggaagaccagatccaaataatccagccatagcatttccaccacccaaaggattaaatccaaggccagggaacaaagattcacctcctccgaggtttgagctatcatttgaaccaaccgcttgaggagcagtggtttggtttccagcatttgcagcgggagcagaaggagaagaaggcacaaaacctcgaaccatatgaacggtgtgatcagcctgcaaacctatatataaaatggtccacagagaaaggaaacattgaggctcatgatgcaaaacaataaaacgtggaaactatccaacacaatcatatcaacaacagccattgatggagaaaatatacatcccaagaagatacatgatcatgagaacattaggaactctaagaatggtatgaatcaattatcgtatcactaactacatctccttattcttcccatagaaggattaagcatacatcaaaactcataaaatcatccatgcttctgtaaaaacctaacataaatccaatgttccaaccccctagaaaccctatgagattttcagtcaaattaaagcaacggaacaacagaaatgaaacacgaaatgatcagaaaattaccatagctgaggagagtctgatcgtctttgaggatacgtcccttgtaaatcaaacgctgctgatttgccggcacatcgctgttctgcgcaattaactctttgaaagactccaccgtggaatcgaggctcgtcgtcacactaaatttcgtgccattggagcatctgacgttcacggcaacagctacgccttcagcagtcagcggctgcctcgaatctgcttcaccacccattctaatttcagatcctagttcaacaaatcgcgaaattgatcggagaatcaaaagctctaaacctagaagaaaaaatcgtagaagaagatttgaggagactcgaagctctaataagtcggttctgaagatttcttgaggaaagggatataaattatttttggtcgaataacaaatgagactgcagaaaattaaagagttatttggccccgaacggccaattaaatgagaatccagaaatgacttgcgcttcagagaacgtatcgacgactcttactgggtaagattgggccgggtcgggtctaaattgaggcatttggtatatagttcaggaaggaattggctgtaacttgaatctaattgaagatgatgaatcaactaattggatattcctttgcaacatgccacttctctctttgggcaatttggtttaacctttgaaccggatcagaaggaaccaaaaatttaatgggttcaatttcactttgatgtctataaacatttacagatgttgtatgttgtaacaacttgaaataagttatcaaagataaacacccaagatatataggtttaagggtagttaaagacgaagagtgaccactgataacaaataccgtattgatgcggcttttctatcaacaaagttcacgatcctatcatatataaatttttatgaattcgatgaatatatcattactgaaaaacacacattcaagctgtttattctataactgagaagccagatggagagacatcagttcatgaacctgtatgctactgtccgatactccccaagagtcgttctacagcagcgttaacgttaccattggttgcaagcaacgccctaatgttctctgctctgtcatagaatcccatttcctgcaactgttgcaattgagtagcgtaccgctcttcaggaggaactggaatcaaacagacaagtttcagtggaaccatcacaacagatgcgtaagctaaaaaaaatttgtagtctctaaccattggattggttcgtgccactcaggccgccagcaccaagactgccaaacatattcatcaataaatccagccccccgttatttcctgtccccatcagtattgtcattctactattaacttgtatacgatacaatatctgctaaaataaaacatacatgaaagcaaagagaactaaagagtagctgctatactacgtaacataactaaaccctttatactactgtagaataaatacatataatatctttaagagtacctgtggcagcaccagtttgccccgcatccctacagagaagatagatttgggaacatgaatgcggattgatgaaaatcaaaatatggagattaacacacatagcttatgctaaaaggcataatcaaaaacaaacaaaatgttatgagccctattcaagtgtattccaacgattaaaatgctttatttatagcctctttgatagatgttactagtgatcagcccagtaaatcatacaagagttgctgcattagtcatggttcaatccttttcttattatagagatcgttcacaaccaatctttttagctagttacaacattgtctaaacactaaacaacccaaaaaacaatatgtaaaggacatgtaaatgctcaactttgtttaagcaaatccaaacaacgaagggttttaacaaaacttactggctggctgtatttctattctgagatagtgattgctgtagagtcatcatttgctgaagaccaaaaaacaatagaaaacattaggtttaagaaacttctttactttgtcccaaaaaaaaaaaagaaaagaaacttctttacttgaaaatagcttagatacaaagaaatgtttcttttgagagactaccatgttaaaaattcatatgcatacagacaataggggacaaactaacctgcatcatctccggagaactaaactgacgaaggaaatctgggttctgcatcatttccctcaactgaggattcgaatctagcatgcttcggagttgtgggttaagactcataagctggaatcaagggaaaacaattaatatatgttcacaatggtaaaaggctcttaagttcagatcattctaggcctacctgattcatgtattgtggattggaaaatacgctttgcatcatctgcgatatggctgggttttgcaataactggctcaattgagaagcatctggagtcgcaccaagaggtgaatccgctccaagcataccgagtccaccaaggcctccaaggcttccaagaccaccaaggccaccaagtccagggctcctcgcatccccaccaacatttgtccttccaggggcagttgtctgacctgtcaagtagcccacaatatgttcaattatatttagtgtattatgagtaaatgttaaattagaaacaataagccaagaaaatcatatgcaaaaactacacataacaacaaattgtggtaactacactaactcaccaatttactatacacaatattgttcctgaagcagagcagtgaacagtaacgtccatttcttataaacaagccactttttcatttataaaatattactgcatccttcaaaagacaaataaaatcgacaggagattagaagatgaaaatgcagttacttaccacctgtagcaccccaaggattaggaagtggatttgcattcggaatagtccccgttccagcatttggtgtcgaagaattattagaagcatcacttccttgcgtagtgaccccctggtttcccaacagagcagcaaatggattggagcctgtattgtttccagcattcccggacatagtggtagcattcattaacggttcctggacattttcatacatacgcctaagcatgttaaatccctcaggcatagactcaatattactcatagccctatcagtattccgcatcatttcacgcataagctctgggtttcttgccgcttctagagtttgacgaaggatgcttgggtcattgagcacatgaccaagctcaggattgcgatctacaagctcacgcatttgagggttattcataatcatactcctcataaactctgggttgttcataaggttctggatggctggagtattcatcatatctctaatcatgttagggttttgagctagttgttgctgtgtctgcacaagatccggaagaccagctccaaataacccagacatagcatttccaccacccagaggattaaatccaagcccagggaacaaagattccccaggactcgctcctcctagattcgagctattatctgaaccaacccctcgagtaacactaggtgcagtggtttggcttgcggccggagcaggaggtggtgctgaagaaggtgcagagcctctaaccatatgaatggtgtgatcagcctgcaaacctaggtataacatgttccacagagaatagaatccacaagaatttcaatcaataaggatctacgagaacaacaaaagtacccacacgaataaatcagaaacgatgaagattaccatagctgaggagagtttgatcgtccttgaggatacgacccttgtaaatcaagcgctgctgattagctggaacatcgctgctctgagccaccaactctttgaaagactccaccgttgaatcgagactcgtcttcacactaaatttcgtgccattagagcacctgatgttcacagccacagcttctccttcaccactctgcggctgacttgaatctccctctccacccatttctaatttcggatcctaatacttaaaataatcgcagagctcgcgaaatcgatcaggagccctaaccctagaaaaattcgatagagatttagaagactcaaaagctctgagtcggttcggtagattgcttgacgaaatggatcgaagagaacaaaacaagaagacttctgcttcagagaacggatcgaagggaccgggtcgggtcaaaaacaaaacccggttcgttccttttctcacccggatccgagaatacatacggcatcgtataataatatcatttatctgcttcgttgaggcccaaagggctttagtttatcggtcctgcagtatcgtctaacttcatgcatctatgaagactctgaacgacatcatttaattcagaatcactctggcttaacttgtctccagccaaaaacctctttgccaagtttccttcacgaaccatgctataacccgcaacgacccgaacctttctctccttcaccaacctcctcatcattgctacatcttcccatgatttttctgcagcaaatgtgcttgacgcaagcaagtaacctgaagaacacaagggctcgagttcaagaacctcagctactacctctgaggtaatgatcaattttttaaaacggtttctgcaaccgctaagaatcgctccccaagcactagcccctgctttaacatcttctggaagattcttgataagttccacagccgtatcaatctctccagctcggctaagcatgtctacaatgcaagagtaatgttgcaatgaaggtttgtgatcttcttctaccattgatttgaagatcatgagacctttctttaccaatcctccatgattacaagctgataaagctgccagatatgtcacagcgtttggtgtgtaacctttttgtttcatttcatcgaacaatgctaatgctttatccggtagaccattaatagcatatgctgaaatgatcacggtccaagagatgatgtttttctcagtgatttgatcgaaagtccttctcgccatttctatggcaccacattttgcgtatgcgtcaacaatagaggtaccaactgagatgtcattgatggctaagcttctccggatagcaatcccatgtgcccatttggaagttctcaagtccgctgaaactgagcatgcgttaagaagacttatgacggtgatagcattgggcgtatccctcatgtgacagaagattgagattgcttcatcggatcggccagcatgggctaatccagagatcattgtgctacatgacaccacatccttgtacgtcatcgaatcaagcacggttcctgcatcatcaacaagactgcagcttgtatacgcatcaatcaaagaactcaaagccacttcgtttgactcatatccacgccgaattattacaccatgtattgacttgcaaggcaatggctgctcaaaaaacttgcaaacccggagaagactcacgactgtaacttcatccacttcgaccgcctcttgcaccatcaaatgaaacatctcaagagcctcatcgtacctttgattatgtacaaacccagccaaaatcgaattccatgaaacaatgtttcgacaagtggtctcatcaaatactctaaatgctgaatcaacatcaaatccttttgaatacatatcaataagtgaattgcaaacaaacacatctgccaaatcaaaacctctccgtatcgaaaacccatgaactgatcttccaacatcaatgtcctccatcaccgtgcaagccttgagaacacttgtcacagtcacacaatcaggctctgttttcgcctcatgaaccatctctttaaacaacttcaatccaacaacaggttccttgctctgcacataacttcggattacaacactccaagaaataacatctctttcagacatttcatcgaacagtttacgtgcacttaaagaatcactatctgcgtacatacacaagatcgaattttgaacagacgaaatcccacaaaacccactacggatcacatagccatgaatcttctctccatcgaaccataaactacgacacgcatgaatcacaagaaccaatgttgaagtattaggctcaaaaccccaaactctcaacttcgaaaaccaccataacccttcttcttcaaaaccataatcgagaagcccaaaaacgataacattccaagacaccgaatctctcgaattcatacaatcaaattctcgtaacccagaacacaagtctccacatttcatatagaaatcagcaattgagttccctacagaaacaaaagactcaaaacctctctttaacagacttgcttgaatacatctaccttgaaacagccatgagagcttagcacaagctttaaaaacaatggggaaaacgaaaggatcgttaaattgaactccagctctctgtatctctgaatacccagagaccacttcccgccattttccactaacagaagcttgcttaatcttcgaagacaaagcttgtagctttgaacacaagtgtgatcccattaccatacttcaaaccacaactaaagtttgaagctttaacaacaaaattgtgtgaacaatggcttatatattgatgaccattagttaaaccttttcataatctggtttaaccgtttaagtagttatattacacacaccaaacactacatactaatacaggtacaacatttgttttctctttcatgtagtatacatacgaatgggttttgataatcttaacaaatacaaaactaagaaaagaatctcagtgtcttcaaacaacactagtgagctcgagacacgttttgtctaggacgaaacgaagagagttgttgcgggcgataatggccttgttgttgacggatggatggggaagctctagtggtccttcgttctaacggtttctcattggcagcttcgatgagttcgagcgattccaccacttctttcatcgatggacggtttttgggttcgggtccaaggcatttcagagccagttgagctactcggaaagcagatttgaaagggtattttccttctagacgagggtccattatgcttcttagctttcttctttcggatagatgaggtttgatccattcggttagattgtgttgcccggtaggacgagtaggatcaagcgcatgtaaaccagttaagatctcagccaaaacaacgccaaacccgtaaacatcgctctttacatacaagtgacctgttggaaccaacaaacatgttcacagtttgttgttggaaaccaaaagaactaagaatacaaaacattgtagtacctgtagcaacatactctggagctgcgtaaccgtgtgtacccataacccgtgttgtgatgtgagattgactagcggaaggtcctaatttcgccaatccaaaatctgatatctttgcgttatatgactgcatcaagagcaaaccagttgaaatttcacacttgatgatttgctacatcaaatccataagcaatctgtatgtacttaccccatcaagtagaatgtttgacgctttgaagtctcgataaattacttgcttctctgaagcgtgtaagaatgctaagcctttagctgctcctattgcaatcttaagccttatctcccatgagagtggctgaacggcagacccctctgaagtaatagaagcaattacacatcgaaacatcgagatgtaaatgtgcatataagcaaaagattctgattaaagaatgttcttacttcggaagagatgattctctaagctccctttttgcatatactcatacacaagaagcaactcttcaccttccaagcagtatcccaacagcttcacgaggtttggatgagaaaccctcccaagaaaattcacttcacactgcacaacaaccaacaaagaatctatccactcagcaaacaaaacttcactttgtatatcaaagttagaaaactagtttcccatagttcactttactcacttgccattcttcgaatccttggaagctttctgcattcagtttcttaacagcaatcacagttccgttgctttgtttccctggagtcttgtcttcaagccagcctttaaagactttcccaaatcctccctctccaagaacattctcagacctgaaattccttgttgaagctctaagttctgctaagctgaatatcctcaaattcggaatgggaagtatctgaccatcggggtaagcatcttcaccacttgccacagagaacccactattgctagatatgttacttccccttgatgttcctgtagtcgtcgtgttgtttgatgacttaaaagtccctacttcaattacaaccacaagaaaacaaagtcaagcccaaaacagagagtcacataacagatcacaaacagcattaagtatgataatgaatctgattcaacaaaaacacaagaagaacagagtcttttaatcaaaaggtcaaaactttcatagaacccatacgagataacaccaaaagaagagtcacaaacgatacaagaagatgtaaaagcgtaacctttatgcatcaaacaaccaagtacagaaattgcaacgtatcacgcaagtttaagcaaaacccagatgggaaaattcagtagatatagataggacaaacctgaactgatgttaccagtagaggaaggtgttgttgttggaggagaatcagatggagatccccaacaaagacccatcccaacagagagaaattaaaagccaaacactttttgcttcctttacaaatatataacacgtatatgtatgtcttaaacaattctttgtcaggattttacagaagtcaaatggaaaaacaaaaaatggcgtgtgaagctaaaacagagtactttacaagaaatgatacaatattgatggatagagattggacaagtctcgtttaaattgggtgtgaatgattagaaaaaaaagaaaaaaaatcaagaaaagataaaactttttttatcttctccaattcgaagaaatttcttctgagagatttatttattgaatagagaattttgtggtgtgagaagcagaagcaagtggtttggtgttatcatgggcattgagagaagagagagagaagactgagtcataaaagaatggtggtgcaaagatttgaggaagaataaggaaagagagaattatagaggttttaaaggtcaaagtcaactataaagaaaaataatttacatgagaccaccaaataaagagaaaacaatcaaggcccctacaattatcctctgtattttcttcatttgaaaactttattttacttttcaacaagtctctatacggttggattataaatatgtttagattatagttttaaataattaatttcacttttatactataatttaagatagcaaattaatatttactgttgttaaaataattgttcaaaagctatattttttatcatgtaaactcaattaatattcagggttgcttacacagatataattttctataaaactaaatgataattaccattttcaatcttggttgatgattttatgattgatatccatgtattttctttatataaaatttaaaaaaatgaaagatggataaatgtccaattaaataaaagtaaatagctctttttgtgttaaaaactattaatctgtttttagaattctttttcacggcattttttggtaaattattgtgtcaaaatccaaaactgaatattttggttacatacaaacaaaacaaaataaagaaataattgtcaagttcattagacgtgatgttggcgtattaaatagtggattttgatgtgaatagaaagatactcaagagaaagatctcaaaaaaaaattgattcaccattgaaaacttgagtcatcgattatcacttgaattcataaatggtactataggagatggtgaagatgagttcaggcgcgtcataaaccgtagtaatagtagtaaaaacgagaagaaaacatcgcaatgcaaatggagacagtaaccaataaaacgaagtgaaggagtaacccctaaggttcaagcagcttgattttgatgataattctacaaacaccaacacaagattcaaacaattttattactaacttggagattttccagaaaagttattattccaaacgtttgcaaattgagattatttttactactctaaagattcaaacacttttacttcattatgccttttttttttgttttcttcttgtagaaccctgcataattcttcattcaccaatcattttctattatctttatgttttctcttatattccaatttttagttgaatatctttctagctatatttatcgttatgtaataaccttttcaagaacacaaagaaattgtacaatctttggagtaccatgtccttcaccctagctcacaaattagttagtttttgaaacttttatatataaacaacatatttcatcaaacaagatatatagtccattttttatgaagatatagttttaaaatcaacaaatgagtgaaattagaatattaaatggtcatagaaaaagtaaaaattgtagtctaatagttgattaagtgtttaattttttcatctagtaatttttttgtgtgattatgtgtccaattaaaaatgtttgtcgtgtgtatatagtgcaggtaaatctattagtcggggaggcattgtccggtataaaccttgtaaattaatgatctttggaaagaacctctaactaatttcaaaaataaacgaaaactttgataacaaaaccctaaactcattgaaattatcaagcagaggcaaagagaaaaaagcagatcagtaatcttacgataatttatcttgtataaaagaaataggaattatggtttaaataaacacttaattggacacaaatttgaaaagaatcaggtttttataattttgatcttttttgtttttgtttaatccattcgatttaggatttactttgtaactctcccaggaagagtgcctatatatttagagtgcatgaaggtaaaattgtcaatttgtaaagagagggatatctatctccatataattaactccaatttgtgaagaaatcatttgtggagattaatttttattattattgattcggaagtgtagaatggcgtaccacaaaaaatatatccaaaagaggtagattgagtacgtgtatacagtatgtagtattcttgtaaatgaacaacatacgaaaagctggccaggaaaaataataacatagaaaacaaacgtgttaagatttttcaggatgcaaacaaatcatatgagcatcattaaaataatatgaacacgactacaataatataagcaaggaaaccatttcacgcgtaatgcgtcagtcaaagaaccatcatcaatatagtttgtggatggaacaatttaaaataaataaaattaaaagttgatgtgctcttgtgcatgtgttagaagaaaaataaaacatatatctgtgtatagggaggaaacaaataattaaagttttttttgtgtgtatttttagtctcatggtacatgtccaattagcagtagtaattatagattaaaaatagataattcgccaaaacctttttctaagaaagaaatggcgttaccattaaatacaaggtattaatatatgggattatttcattaggaaataattttgtgcctcangattttgtaaatagtaaatttgattctgaaaatgggatgtataattaacagcaactagtagattccttgaatattgattgaagtgtgttttttgaaaattttgtaaaatccaagacactagcatagtaccatgccatggccaaaaaagtttacattttggaagagatttatagttgttgaattttgaatataaataggcaaatgtttctttcattagctagggttaaatagatcttttaaaaggtttgatttgaacctgacgtaaaagagagtcttgaatattctttaacaacttccatcgctgcataattgccgattgagtcaaaacgaactgaagtttgcttcgatatgtggaattgtggatccttaccttcttctaggtcttcatgttggtattacgtagtcatgcttgctttggtgtgtgattgtgtaggtttgtttcatagattgatatgatatatgaatatacgatatgctatggtgatatgatgatatgaacatgacatgctatgatgataactcgagataattaaacgtttctataaattttgtttcacatatattatgagatagttatgttgtttttaaatgtgtatttactctatacattcgttaatttaatatgttgaacgagatggtgtgatccaaactgggctttgtttgatctttaatgtaatttttgggccaacactagttcccatcatataaaatgtatcgacctttttaataaagtcgatctgtatgtaaaatccacatatttcgtgaagcctgcgtgtgttacggagttacgggctagcacccacggcgggatgggtgagaaaaatatcagcacgcttcgacccgcttttacatgcgtgtaatcagtcatagactcgtacctaagaccgaatcataaacatgaataatttgccgaaaacatgaattatctacagtatccaaaaattatgagatagatagctaaatgaggtgaaaaaggcaaagaaaaaaaaaggttgaggtaataaatgcagtttccattgacattggtaatgattgtagttcaaaattggggtccttttcttagctgtcgttcacaaacacactctcaatattgtcttcagagtcattttccttacctttattattacaatgcaacactaatttttagtattacatatttgattggtaggagaaccagggcctcatataatgggagtaacctagcatataaatattgttggtattaaaaaagaaaaaaaaacattcatgctcataagtttattttttcattttaaaattagacctaaaaataaacctttttatattaactagccaaaaatgttgtctgaatggtcttaataatcttggaccatccataaaaagaggcaatgacaaatcgaaccgctttcttatttatttgtcaaatagaaagatgaaattcggccttaaactatgcaaatatttgaaactcgaactttaaaatattaaccaactttaatacacttatttaaaactgtaagaggttgattcataattccaataacaatagtatagtttagagatgactccgatgtataaaaatttgtgttgccaacgaataagattaaaaattcgtgtagttaagaggttatcaaacatagtacatgtaattttagaccgttttttcatgtatagataatccgacaactaatctaattgcaagtaactgataaattaattaagaatcttacccttgtaagagttttaagattcgtttctcatttgtcagttctcaatccaacgaacttataatatcatttgtcttttccataaatactgatgacaactaaagttattgttatcgtacacttacatttattgaaacaccgattatactagtactatttaataatgcagaaaatgaagaaaaaatatctaaagaattttgaattcaaactttttcacttcccgaagtgtacattaaaagctcttaaacattaccaatactgttgaaataaacaaaaaagtgagtgtgaaaatcaaagattcattcaaattcaccacaaaaacagtataaaagcattctttaaactttatatatataagaaatcataaagtaaaataatgttacacttctaaaacctaacgagttatttcatcattatctcagtgattaccacaaatcaccatcattaaccttcttcttcgtttttttagtcgacagagttaggaccagagcaagctttcaaattagggttccaaatccattgaactaaaaactttcttcctcctttaccattcatattaaaagtcttcccttctctatctctcataacttgaccaatataccctcctcctccgccgcttccgtacaatccctcacacaaatcaccgatctccgtcggagccgtcggatcttctccggcgtaccaagcattaatcaacggattcgatacaacttcagctaactcatgaccaatcacactaaccatcccatctactccagtctctccgttcggtggccggagctctccgggaccaccgtgtcccatgtaacccggtaaagcaaatggataagcacaaacctcgggacattgttttcccgattgaccaacccaagcgtaaggcatagtgtaaccaaccatcgacgggaaagtgaaatagtgaaatccacaaacggcgcggcaaaaatcttgcatcgtgacgtcgtgtgacgtcagaactagatacattccgtttttatgatccaccggaaaggaagcggatctggcggcggaggcgatgacttcctgaatcgtgagacgagtaaggtgttggccgtgggagtatttagaatcggagtattctccggcgattaaaacggatctagagacgttggatccggtttgatctgtgtagagagaagcggtgcgccaccattcggagacggagggagaaggtgctttagcgtcggagatagaattgaggaaatctctgattagggatttgtgtgggcgtgaccattgtccgtaccagataacgtagatgttgatcggagaagatgagaggactggtcccatgtggtaacggaggtggactagatttgaagatccttcgaattttttggaggatgtgagggagagactccgcggcggaagctttgggtttactagcgtaatctccgccgcggcggaggggatatttaaggagttaacggttgctgtgtgtttgttgttgttgttgttctggagtgaagaagtgatgtagaagaaggatgagagagtgaagaagaaaaagaaggtgatagtagtcgccggagacgacattgttaatggttaagagtgagggttttggcaagtgaagaagagattgagagatttgatgattttaaaggagaggagaaagaatgagagggaaattggctgttgccagctgcagtgagcgtgggcttcacgcgctagccttgttgttgtttgtctgtcttcttctcttggggatgacataaatttgggatgggatttctcaatttttgagttctttaaaaaatataaaattataaagtgatactataatacagagttgaagaaattaaatttgtaaagattattactatgatgtttattaacttgaagcgaatttgtggaaatgaaagtgataaattttatattcggatatagtgcatttttagtatgaaaatgggagaggggaatttttataagtgaaaatatatatatatatatatatatatttttttgaatatgagaaggttctgaggcaaagttcgtaatccttccatgtccgaaaccataacatgtaatattagtttagttcaaagcgtcattcgaaccgacgacctctaagctttgcttaaggttttattatcaaaatattaaaaaagctgatgtaaaaagtatttgaatatagtttaacattttattaaaaagaataacacacgcaatatttgtactaattagaagcgattataaataaaaaaatgtaccatatttttttataaaaaattctctatgaaaatctgaaaaaaacctgattttgttataatttattaatgtaaaaacgtcattattaaccatattttaaaggctggaagcaaatttgttagacaagtggtttcttattatgattagtcacgaattgggtaatacgagatatgtaaccgaagtatttgctttcgatcgatattgaaatggatggtaatggatattgttacatctatttgattcgaatattttagttctcgttgaaaaatgataatcattattttcaatcttcttttagctttgacagccgaaaaagaaatatctactactcttttactcttatcgaacttaaatatctaagttaaatgcatatgttggctttctttctctatgttacttctttttgtcactgactatatggaattaaaggcaaagtttattgatggagaaaatatcttacggtttttttattgagacttttgtgtcttaatgcatgtctttttctttatttatacatttgagtttttgttttcttccaaagcgaaatcacatgtttggcagtatctttgctaagtacttagatttagagatatcagatttgtatggaaaaaacaaataatcaacttaaagagatttagatttattttattatcatatgtttaagaatagtagaactaaaaactttgaatcaagctaaaactcaaaagttcttattgttataacttattactatgaaattctattaatatgtttttcttttaaaaataaaaaataaagtgacaagtgacaacattaatttggggccgtagatttatgttggtaataaattggcctttttgaatggtggtccatcattatctatggttatcttgctacattcgaatcttaagacatgtataaaaaatacacacacgaaaatgtgtgtagttaatcagaaattggcacacgattttagatgttactctattgccaactgtgtaagatgttgggataagtaggccagctacttggttccttgttagcacgaagcggtgatccaagttttgttactgtgccacacatacactcgttagtcttatggactaattagctaactagtctaattttcaagattttttttggaaaatcactatgcacagaatgtggtttacaaattttcacaattagcatcatatattgtgcatagtaactttatttgttggttgtgatatcgatattttatctacaaaattaaaaaaaaaaatacgaagagtggttaaaaattttaaagataaaaaaacgtaagtcagaagaagattttcaaaacaataatggtgaaggaaagtgattagaaagaatgaacaaggtggttagtcataggccctagctattgtccgcaaagcttagtatttatgggccacccaataaaagcctttaaaagcccactatcaaaacgcaaacgcagcagcataaaactttcttagaacctgtcacgataattcttggttggtggataatagatttagctccgtcccggagaaccatggcgtcgctttgctctgcgaggttccttccttctccatcgctcgatattttatctacgaagacgaagatatcctccgactcgcgctcgcttggttgctcttcgtcgcgtgtctttgctttctcttccgttcaccgttcttcttcgcgtcgcaatcggaatcagctgcaagttgtgtctatggctcctgaggaagaaaagctcactcgtcgtaatcctctcgatttcccaattgtaagttcccccgggtcgggtcgggtcttatttcggatcttttaatttccagtttcacatttctattcgttgtggtaatagctccgattgagaataaataggttttggtttagagtttgtgatttgttctacattttctatgttcctgctgtttatgaatctacatgtgttaactgttaaatcaatttatacaagtgtagagaaaagctttgtattcatggctccaaagtgatttggtagctcttcatgtgttttgtttggattaggtgggattagtgatcattgtttctttatagaatatgaatacccgagaatctacttagaatcataatgctttcccttgttatgttctttacgagtctcgcgatgttaattatgttgtgatctacttgttaggagtgggaaagacctaaacctgggaggaggcctgacattttccccaagtttagccctatgaagacaccattgccaccaccgatgccttatgatcctccggaagaggatgaagaagaggaagagaagaaagaagaggaagaagaaaacccagaccaagaagaagaggaacaacccgagaagcagcaatagatttttggttggagataagaacgaatgaaacatcgagagatatcgaagagcattttttgtttcaacttttgtagtgttttggaggagaagaagaagagtcaatcttttctcacatttagttgctagatttaatctcatactcgtgttcgtgtattatatctgtgtaatgccacagtttcagaagctatgttatcctttcgaaattcgaaccttctttgtgtaagtagacagagggtttaactaatctctctttctccttacactttgtatgttgaaatatagtatcacaaacattctttagtggttatctctgagtaaacgaaagtatcgggccaaatttgatcttttacatgatttgaggggtatatccaaaattaaccttagttaaaaatgaaaaaacaaatgtttgggccaaatctcgaaatgttacactacttggggtttaaacataatataatgtttcgtgagtttaacacgaccacgttttgtttgcaagttaggttttgttatgcctctctcagctaaacccttcttcttcttccaccgtctccgccacgaaccagagaaagctcaacaatggcgtcaatcctctcaaagaagcagaagaagaacgaaaaatacaccttgaaagagctcaaatcattaggtcatgacttactcacttctcgatctcacatcaataaccttcctctccttctcaccttcgtctcaccagaatctccgccgcagttcgtcgttgaatcactcctctcactccaatcctttttcactcctctactctctcagcttcctccgacttcttcgtctccttcttcaaccaaaacagaggaccctgaagttgtgttcaaagcttggctcagatcaaaatttgacgaattcgtcaagcttttactcgatgttcttgtctctcaacaatcagaagattctctaagggtaagatttttctatctatcttctctgcgttctcttgaagttacatagctttgttattttttgttacctaatgtttttggttgatttagggaattgtgttgggaacattaatggaatttgtaaagcttttgaatgctggaaggtttcattcttcaatctaccacagattacttgatgctattgtaagtttagtctcagacttcttctttacgaaattgttattgcaagtgcttgatgttcttactattgttcactgtagattcactctgaggttgatattgagatattcttggatatacttacttcaaagtacttcaagtacattgatgtccggtatgttgataacacttcgagtttatatgttctttcgcttgctattatttggtcatttgagatttgactcgagatatcgattttgtgtcagctattttacatacatcagcatggaaaagtttgtgaaaacattggaagcatcagtgtctggtgcgttttattctttcttgacattctctctttttaatcgtcatgatgcataatgcaagtttttatttttgtgttactcttagctgatagaactgtgatcgaaaataatgaggctgagagtgattcaaaagaaaggttagtatcagtaaatgtgtaatctttctttgtatatcttatatttgttgtttttcttccaagctgtttgaatgtaatcttaagctggtttttaaagttattgtgttgttggtgatctataaaaattgtgaattgtagcctagaactctctgttcgcaagatctatcaagttttatctcaaatcccacctcctgagaaacaagctgagaagtctcaacacgagatgtggagtgggtcaggtgattgtttccgagattttccaattttgtggaaaggactccctatgtgtttagatttgctaataagagttattgtgcagatgaaagtattagtgagaagccgacagataaaaagaagaaaactgagaaaggagacagcactgtaagtttccagttgcaagtttgctgaatatactgaatccgtaatctgtgaataggttttcttcctggcatggaattccttacatttgcctctttatttattctgttaaaactccagctcctttctccggcaacaattagcaagaggatgaagttgaagttcactaaagcatggatttcatttctcagactgcctcttcccattgatgtgtacaaggaggtaaacccatttacttttccaactaaccatttgtctggaatatggattggatgaagaattaccaatatattatcttctgataaccaggttcttgccagtattcacctgacagtcattccccatctatctaatcctacaatgttatggtgggcaaatttaccaaagcttttatcatttctgtatatgtgattgtccttcaataagcgcttacttatgtttcaccgtactttgcagcgactttttaacaaaatcgtacgacattgggggtgttgtcagtgtgatggctcttagcagtctcttcatcctcatgacccaacatggtttggagtatccgttcttttatgaaaaactgtatgcgttactggttccttctgtctttgtggcaaagcaccgagcaaaatttcttcaggtattgccatatttgagtaaccgatcaatgactgattactttataatatgttattcttccctctatatctgaaacgctttctgcagcttcttgacgcatgcctgaagtcgtcaatgcttccagcatatctggcagcttcattcacaaagaaactaagcagattgtcactttccattccccctgcgggatcgttggtcataacagctttgatctacaaccttttacgaagaaatcctacaatcaaccatcttgtgcaggtacggcctatctttgttagtgcaaagaacatattaacagatgaaaatgacgtctgtataataccactcacaactacgcaaaataatgtatataaaagcatggacttacaaagaggtcactcttgttcaggaaatcgttgaaaatgccgatgaagccaacacagaggctggtgaacacaatgagagccaaccaaagaccatcaaaaagcgaaagcttggtattgactatttcaacaaccaggagagtgatcccaagaaatctggagccttaagtaagtcgttaacattctattcccagtcttttttatttttcctttccatgcccctagcacaaaatcacacccctatgtagaagcttgattcatccaacaaaaaacaatgatgtgtatgctttcagatttcctgatttgtactttcataacagcggctttgtagcataattagatttattagtttgataagaaattaagaatgccaaggttctctagattcatcgataaattcaaaaagtaaagttttaactgctttgaaagttcaagaacaatgtgttgttttgccttctgtaagttgttagcttgttaaataactttgtaatctaactgatgaatgatgatattcgttttactggaaacctacagaaagttctctttgggagatcgacactttgcgccatcattactgtccaccagtttcacggtatatttgctcaccaaacaattttatccgatttttttaaaatttttacatttggtcatctccttgatacctcttctcacttttgtaggtttatctcatctctagaaactaatctaaccatcagatcgaaaaccacggaaatgaaaattgaagatttttgctctggttcatatgccaccatatttggggacgaggtaatgttgctctggttcatatgatatcaactctttgttgagaaaaaatcagttgactttggtcttccatttatagttgggaaactgtaaccatttgctgaactaactgtggagatttgaaaaattggcagattcggagaagggtaaagcaagttcctttagcgttctacaaaacggttccaacatctctgtttgcggattcagattttcctgggtggacgttcactattccacaagaggaaggcacatgctgatttctaagagtaaccaactcatgaactaaaaaaactgcaggctattcgaagatttgtgctaccaaattttgtagttttgatactgaatgtgtcacatacttgattttgagggaaaacaatttttgatagaaattttcggcccatgaaaacgagtttccgtccaattcgtatatcggagtaagagatgggaattgtgagaaccatgaaaacacctggaaagaaaaagtctaaagaaaaggtagtacgcacattctagttttgaaaatagttaaattgtttgacatcatacttaggaaaatagtttacatctttaaagtattaaaatagtataagatatattattttaaattctaatcttaacattcttaaatgatgatttttgttttcattcataggcaaaatatgagttttcgttcactaattggagtgcattgataaatgataataaattggagttttcgttcacaactttatatatatggtccaaatttcagtggagactccacacaaattccaaattattcctttgccattcaactttgtttgtgcatcattccaaatactactctcaattccctttcgttaatcattgcattcttttattcgtgcgttactaacaccactacactatctacgaacaacaccaattgtgcataatgtagttggagtttttctaaaaaaattatatatatagcaaattgaatatcatcaaaagtcactcaaggaaatcatctttaatcgatagatatgttcaagggttagttaaatatatgtacatatgagatgatataattaagaatgtatatatggaaagttgatatttaggtgtaataaaacgtgcaaatcgaatatgcctattttaatcctgttgttctgacatacatttagtgtataattattttgttagcatgctaaactagcatataacgcattatcgaaataatatcgttagcgaaatatggatggggtttgctctatggatgaaatgatgtagggtacaaaccaacttaatatgttaataatatatttgacgatataaacaaattttctgttattgaaccaatgattagatttcaaagactgatatatatgcgaaaacgataacattattattaaaaggtaacaaaaatatttgcatgaagagcaaaaaagttgacttgcaactcaataatcatgtaaaaaagtacatgcattagaatagttagcagataacgtattatcaggataacatgataacaaaatctcggtaatacttattaggttaacatgataacaaaatatttatataaataagtttataattatatcatgctaagtcattttgtatcgcgataagttgtaacttatgtgatatatttatatttaccgtcttaactcatttattatattatatataaaaaattaacgatttagtataacgtgcaaaatatgaatttcatccaataatattaatattatcactacatttaaataaaattttagttaactcggtaatttgattgttaaccaatttgggataaaaaataaaagataaaaaaatatagggataatgatgtaattttctttagtaatgtactatgtaaatagtgacacatttgtgtcagttaattttctctgttattctatgtatacttcttataaataccttatgttcaatcgttttgagtcaagaaaaaaaaaaacagaaataaaaaaaaacatttggtcaatcatctttactcatttgggtgaacagaacaaaaaaaagaaaagaaatcagtgttttgacaattcttct

SEQ ID NO: 240 - DNA, 98102 bp, Arabidopsis thaliana
tcaagcttttactcgatgttcttgtctctcaacaatcagaagattctctaagggtaagatttttctatctatcttctctgcgttctcttgaagttacatagctttgttattttttgttacctaatgtttttggttgatttagggaattgtgttgggaacattaatggaatttgtaaagcttttgaatgctggaaggtttcattcttcaatctaccacagattacttgatgctattgtaagtttagtctcagacttcttctttacgaaattgttattgcaagtgcttgatgttcttactattgttcactgtagattcactctgaggttgatattgagatattcttggatatacttacttcaaagtacttcaagtacattgatgtccggtatgttgataacacttcgagtttatatgttctttcgcttgctattatttggtcatttgagatttgactcgagatatcgattttgtgtcagctattttacatacatcagcatggaaaagtttgtgaaaacattggaagcatcagtgtctggtgcgttttattctttcttgacattctctctttttaatcgtcatgatgcataatgcaagtttttatttttgtgttactcttagctgatagaactgtgatcgaaaataatgaggctgagagtgattcaaaagaaaggttagtatcagtaaatgtgtaatctttctttgtatatcttatatttgttgtttttcttccaagctgtttgaatgtaatcttaagctggtttttaaagttattgtgttgttggtgatctataaaaattgtgaattgtagcctagaactctctgttcgcaagatctatcaagttttatctcaaatcccacctcctgagaaacaagctgagaagtctcaacacgagatgtggagtgggtcaggtgattgtttccgagattttccaattttgtggaaaggactccctatgtgtttagatttgctaataagagttattgtgcagatgaaagtattagtgagaagccgacagataaaaagaagaaaactgagaaaggagacagcactgtaagtttccagttgcaagtttgctgaatatactgaatccgtaatctgtgaataggttttcttcctggcatggaattccttacatttgcctctttatttattctgttaaaactccagctcctttctccggcaacaattagcaagaggatgaagttgaagttcactaaagcatggatttcatttctcagactgcctcttcccattgatgtgtacaaggaggtaaacccatttacttttccaactaaccatttgtctggaatatggattggatgaagaattaccaatatattatcttctgataaccaggttcttgccagtattcacctgacagtcattccccatctatctaatcctacaatgttatggtgggcaaatttaccaaagcttttatcatttctgtatatgtgattgtccttcaataagcgcttacttatgtttcaccgtactttgcagcgactttttaacaaaatcgtacgacattgggggtgttgtcagtgtgatggctcttagcagtctcttcatcctcatgacccaacatggtttggagtatccgttcttttatgaaaaactgtatgcgttactggttccttctgtctttgtggcaaagcaccgagcaaaatttcttcaggtattgccatatttgagtaaccgatcaatgactgattactttataatatgttattcttccctctatatctgaaacgctttctgcagcttcttgacgcatgcctgaagtcgtcaatgcttccagcatatctggcagcttcattcacaaagaaactaagcagattgtcactttccattccccctgcgggatcgttggtcataacagctttgatctacaaccttttacgaagaaatcctacaatcaaccatcttgtgcaggtacggcctatctttgttagtgcaaagaacatattaacagatgaaaatgacgtctgtataataccactcacaactacgcaaaataatgtatataaaagcatggacttacaaagaggtcactcttgttcaggaaatcgttgaaaatgccgatgaagccaacacagaggctggtgaacacaatgagagccaaccaaagaccatcaaaaagcgaaagcttggtattgactatttcaacaaccaggagagtgatcccaagaaatctggagccttaagtaagtcgttaacattctattcccagtcttttttatttttcctttccatgcccctagcacaaaatcacacccctatgtagaagcttgattcatccaacaaaaaacaatgatgtgtatgctttcagatttcctgatttgtactttcataacagcggctttgtagcataattagatttattagtttgataagaaattaagaatgccaaggttctctagattcatcgataaattcaaaaagtaaagttttaactgctttgaaagttcaagaacaatgtgttgttttgccttctgtaagttgttagcttgttaaataactttgtaatctaactgatgaatgatgatattcgttttactggaaacctacagaaagttctctttgggagatcgacactttgcgccatcattactgtccaccagtttcacggtatatttgctcaccaaacaattttatccgatttttttaaaatttttacatttggtcatctccttgatacctcttctcacttttgtaggtttatctcatctctagaaactaatctaaccatcagatcgaaaaccacggaaatgaaaattgaagatttttgctctggttcatatgccaccatatttggggacgaggtaatgttgctctggttcatatgatatcaactctttgttgagaaaaaatcagttgactttggtcttccatttatagttgggaaactgtaaccatttgctgaactaactgtggagatttgaaaaattggcagattcggagaagggtaaagcaagttcctttagcgttctacaaaacggttccaacatctctgtttgcggattcagattttcctgggtggacgttcactattccacaagaggaaggcacatgctgatttctaagagtaaccaactcatgaactaaaaaaactgcaggctattcgaagatttgtgctaccaaattttgtagttttgatactgaatgtgtcacatacttgattttgagggaaaacaatttttgatagaaattttcggcccatgaaaacgagtttccgtccaattcgtatatcggagtaagagatgggaattgtgagaaccatgaaaacacctggaaagaaaaagtctaaagaaaaggtagtacgcacattctagttttgaaaatagttaaattgtttgacatcatacttaggaaaatagtttacatctttaaagtattaaaatagtataagatatattattttaaattctaatcttaacattcttaaatgatgatttttgttttcattcataggcaaaatatgagttttcgttcactaattggagtgcattgataaatgataataaattggagttttcgttcacaactttatatatatggtccaaatttcagtggagactccacacaaattccaaattattcctttgccattcaactttgtttgtgcatcattccaaatactactctcaattccctttcgttaatcattgcattcttttattcgtgcgttactaacaccactacactatctacgaacaacaccaattgtgcataatgtagttggagtttttctaaaaaaattatatatatagcaaattgaatatcatcaaaagtcactcaaggaaatcatctttaatcgatagatatgttcaagggttagttaaatatatgtacatatgagatgatataattaagaatgtatatatggaaagttgatatttaggtgtaataaaacgtgcaaatcgaatatgcctattttaatcctgttgttctgacatacatttagtgtataattattttgttagcatgctaaactagcatataacgcattatcgaaataatatcgttagcgaaatatggatggggtttgctctatggatgaaatgatgtagggtacaaaccaacttaatatgttaataatatatttgacgatataaacaaattttctgttattgaaccaatgattagatttcaaagactgatatatatgcgaaaacgataacattattattaaaaggtaacaaaaatatttgcatgaagagcaaaaaagttgacttgcaactcaataatcatgtaaaaaagtacatgcattagaatagttagcagataacgtattatcaggataacatgataacaaaatctcggtaatacttattaggttaacatgataacaaaatatttatataaataagtttataattatatcatgctaagtcattttgtatcgcgataagttgtaacttatgtgatatatttatatttaccgtcttaactcatttattatattatatataaaaaattaacgatttagtataacgtgcaaaatatgaatttcatccaataatattaatattatcactacatttaaataaaattttagttaactcggtaatttgattgttaaccaatttgggataaaaaataaaagataaaaaaatatagggataatgatgtaattttctttagtaatgtactatgtaaatagtgacacatttgtgtcagttaattttctctgttattctatgtatacttcttataaataccttatgttcaatcgttttgagtcaagaaaaaaaaaaacagaaataaaaaaaaacatttggtcaatcatctttactcatttgggtgaacagaacaaaaaaaagaaaagaaatcagtgttttgacaattcttcttcataatggagatcttcgtttcagtgatcactgtcgtggttgtccatgtcatttcccacgttttccttccatttctcaaaagtttccctctgttttctcctgaagcagcttctcctctatgggttctttttgtaagtaatcaaattttaaaaagaaagtttcttcctttctcaaatcttcaagtatacccacgattcataataatattccatgtccttttattttcttttctcttgcttgttcctcatgccttctcattttagttattaatcttgcttttcctacttctttaatgatgatttggttttggggtttcgtataatctctgcctctaagtaatttcctgtgacactgaaagctacttgctttgggttttaactcaaaggtctctttttgttgttcaatgttaagctcaatgaattgggttctattgagcttcatcattgttcttggtggtgggttgctactttcagagggagcttctagttctaggcctcctgttattaaagttggtgctatatttggtttaaacaccatgtacggtgaaactgcaaatatcgcctttaaagctgctgaggaagatgttaactctgatcctagcttccttggtggatcgaaattgcggattttgatgaatgatgctaaacgtagtggcttcctcagcatcatgggaggttgaagaagacttaaaaatcctatcttgtttcattttcttgattgcttttttggatggatacttacttcacttttatcctttgttgttgcagcattgcaattcatggagactgatgtagtggctataattggtccacagacatcaataatggctcatgtgttgtctcatcttgccaatgagcttactgttccgatgttgtcatttacagctcttgaccctaccctctctccactccaattcccattctttgtccaaacagcacctagtgatctgtttctgatgcgtgccattgcagagatgatcacttactatggctggtcagatgtggtggcattatataatgatgatgataatagtagaaatggcgttacagcgttaggcgatgagcttgaagagaggcgttgcaagatttcttacaaggcagtacttcctttggatgttgtgattactagtccagttgagattatagaggagttgattaagatacggggaatggagtctcgggtaatcgttgtgaacactttcccaaatacaggcaagatgatctttaaggaagcagagagattagggatgatggagaaaggttatgtttggatagctacaacttggttgtcttctgtgctagattcaaatttgcctttggataccaaattagtcaatggagttcttacactgcgtcttcacacgccagattctagaaagaagagggactttgcagcacggtggaagaacaagttgagtaataataagactattgggttaaatgtctatggtctgtatgcttatgatactgtctggatcattgctcgagccgttaagacacttttggaagctggaggtaatctttctttctccaatgatgcaaagttaggcagcttgaaaggtgaggcgttgaatctaagtgcattaagcagatttgatcaaggatcacaacttcttgattatattgtgcatacaaagatgtctggtctaactggtccggttcaatttcatccagacagatcaatgctacagccttcatatgatattatcaacttggttgatgaccgggttcaccaaataggttactggtctaactattctggtctttctattgtaccgcctgaatcattttacagcaaacctcctaaccgttctagctcaaaccaacatctgaactctgtaacttggcctggtggtacttcagttacgcctcgtggatggatttttcgtaacaatggaaggcggctaagaattggtgttcctgatagagcaagcttcaaggactttgtttcaagggtcaatggaagtagcaacaaagttcaaggatattgcattgatgtatttgaagctgcagtgaaactgctttcttatccggttcctcacgagttcatctttttcggagatggtttgacgaatccaaactacaatgagctggtcaacaaggtcaccactggggttgactttgatgctgttgtaggcgacatagccattgtcaccaaacggaccaggattgtggatttcacccagccatacattgagtcaggccttgtcgttgttgctcctgtcacaagacttaacgaaaatccttgggcctttttacgcccgtttactcttcctatgtgggcagtaacagcatctttttttgttattgttggagctgcaatatggattcttgaacaccgtataaatgatgagtttcgtggtccaccaaggagacagatcattaccattctctggtaagtacacaagagccatcttatttgtctgcataaaatgaagattactatagcttatgcaagctttaatcttttcttacgatgcaggttcaccttttcgacgatgtttttctcccatagtaagtctgaaaaccccctcaagctaattactgcaattcccgtgtgaaattcttaacatctttatgaaatcaaactctcaggagagactacagttagcacacttggtcgtatggtgcttctgatatggctttttgtggttctgatcattacatctagctacacagcgagtctcacatcaatacttacagtgcaacagcttaattcacctataaaaggagtagatacactcatcagtagcactggtcgtattggtttccaggttggttcttttgctgaaaactacatgaccgatgagcttaacattgccagctccagacttgtgcctctcgcctcccctgaagaatatgctaatgcgcttcaaaatggcactgttgcagcgattgttgatgaacgtccttatattgatctcttcctctcagattactgtaagtttgccatcagaggccaagaattcaccagatgcggttggggatttgtgagtcatccatcttctgaatatcttctctctttaccagcatgtttgaacataattctgatcacatttttgcattttctgttcaaaaaggcattcccaagagactctcctttagcagttgacatgtcaaccgcgattcttggtctatccgaaactggagagcttcagaagatccatgaccgatggctttcgaaatccaactgcagcagcccgcatgggtctcagtcaggtgactcagaacagctcaacgtgcatagcttctggggtatgttccttgtggttgggatagcctgtctcgtcgctctctttatccacttcttcaaaataatccgcgacttctgcaaagacacacctgaagtagtagtagaagaagctataccttcaccaaaatcttcacgtttaacaaagctacagacttttttagcatttgttgatgaaaaggaagaagaaaccaagcgaaggttaaagcgcaaaagaaacaacgatcattctatgaatgccaatagcattatctcgaggactgcatctagaagacccatatgattatccttatgattttgttcatctgtacatttcaacacacacctcatttgcaacaaaaatgagattttgtttatataccaccatttacaatcatctaagctaaagccaaaccaaagtggacaagcttaccggttcggttcagttcggtttgttgttaaaccgttggattttcactggtctgaatctgatctcatcactcactgcatctttaaagtaatcagctttactggagaaaacattaggttaggtggtcacgtttgttcatctctctcttatatatttgtttaaaggcttcgtctttgttcatttgcttttgttgatctcattacttgttcatcaatggcaagtctttgtttccaatctccttccaaacccatttcctatttccaacccaaatccaatccatcgccaccgttattcgccaaagtctccgtctttcgatgcagagcttccgtacaaaccctcgtcgccgttgagccggagccagttttcgtctccgtcaagacttttgcgccagccaccgtcgctaatttgggaccagggtttgatttcttaggatgtgccgtcgatggtctcggagaccatgtgactctccgtgtagatccctctgtacgagccggtgaggtctcaatctcggagatcaccggaaccacaacaaaactcagcacgaaccctctccggaactgcgccggaatcgctgctattgctacgatgaagatgttagggatcagatcggttggtttatcattagatttgcataaaggtcttcctttaggtagcggtttaggttctagtgcagctagtgccgccgcagctgctgtggcggttaatgagatctttggccggaaattagggagtgatcaattggtattagccggtttagaatcggaagcgaaagtctccggttatcacgctgataatatcgcaccagcgatcatgggtggattcgttttgattagaaactacgaaccacttgatttgaaaccattgaggttcccatctgataaagatctcttctttgttctagtaagccctgactttgaagctccaactaagaaaatgagagctgcattgcctacagagattccaatggttcatcatgtttggaacagtagccaagcagctgctttagtcgctgctgtgttagaaggtgacgcagtgatgcttgggaaggcattgtcgtcggataagattgtggagccgactagagcgccgttgattccgggaatggaagctgtgaagaaggcggctttagaagctggagcatttggatgtactattagcggagctggaccaacagcggttgcggtgattgattcggaggagaagggtcaagtcattggagagaagatggtggaagcgttttggaaagttggtcatttgaaatctgttgcttctgtgaagaagcttgataatgttggtgctaggcttgtcaacagcgtctccagatgatctttgtgtgctgtttgattatgttaagattggaactgtttgattatgttaagattggaaccaatcttgctctgtactgtaatttctagatgataataaagttctttgttttctacaccaataaaggacaacgttttatgtgtttgtttagctctttttggcttctgggagtatgaattgtgtgagacttgagagtatcacactctccaaatcagtagcaaaattgagtttcaaccttatgtagcaaacaactttagtcactgactagtggagcaaactttatagttgagagcccaaactataaggcccatgaaagcccaatttggagaagaggaggactcataaataattccggtaacggtaaagcaacgaatctatccgccggcatgaggaaacctaaattgaaattaccattttttctcttaaagattcgatttttccgccaacccgttcccgaaagcttggaactttatttgttgaaaaagtaaaagagagagccttgtgtttatttctgagccttgtctttgtccgtgagacgtggacgagcgatctccatcagaaaatgagaacccttcccacgtacacactctttgcctttccttttatagctttcctgtgacgtgtttcttcgtttctgggttttgggtttactagcgaaaacgtcaaagatcaacttttgttctgagagattacgattagggtttatcggggattttgaaacgatttttggtaagaagatgacaagagtcaagagtaaactagacgaggaactgtcgtctccttggttttatactgtttgtaccatgggaggaatgcttagtgccggaacaacccatttggctataactcctcttgatgtcctcaaagtcaatatgcaggtttgtgtttcctttctctgcttcttgacttcttcaaatctctaatcttgtttgtttcttctagttattgtctttttagggatgtataatgatcgatataactgctaaatttaggatcttttgcttttctctgagcttaaatttggaaccatcatgattgttcagtcaatgaggatcgatcattctctcttgtaggtgaatccagtgaagtacaatagcattccttccggtttctctactctcttaagagagcatggtcattcttatctttggagaggttggtcagggaagctattaggctatggtgttcaaggtggatgcagatttggactctatgagtacttcaagacactctacagcgatgtgttacctaatcataacagaacttccatatattttctcagcagtgcttctgctcaaatattcgccgatatggctttatgtccttttgaagccataaaagttagagttcagacgcagcctatgtttgcaaaagggttgcttgatggatttccaagagtgtatagaagtgaaggtcttgctgggtaagcccttttttcagaatcattctacttggctggctcactttgcgttcgtttttgagtcttttatctcttcaaatgcagcttccacaggggactttttccgctctggtgtcgcaatcttccatgtaattttactgcttcgtgcaatgcctgttttcacttaatctatttgatcatcaacgtctctcgttatcagtttgatcttaatcttattacaactctcaaactgtcagttatgtaatcaaatcattcagttttagtcattagcatatgagacagatacttgagctatagatgcacattagcatgtctgtagacttggttgtgttttctaccaaaaccatatcttgttgattatatcttctatgtggtttcagtttctatggtgatgttctcaacgtttgagcagtcagttgagtttatatatcaaaagattatccagaaaaggaagcaagattgctctaaagctcaacaactcggtgtcacatgtcttgctggctatactgctggagccgtaggtacaatcatctctaaccccgcagatgtggttctttcgtctctctacaacaacaaagccaagaatgtgttgcaggtcgactcttaaccatcattatttatcttttaaaatccatttcgaaatttcacaatcatgaagcaaagtattcttattgatgttggttatttgcttgagctttaggctgtgaggaatattgggtttgttggtctattcaccagaagccttcctgttcggatcactattgttggacctgtcattactttgcaatggttcttttatgatgccatcaaagtcttaagcggattgtaagtagaaatctctcaaaatttccatatcagaaactcgaatctctctgctccaaatcctcatctaaccagcttgattgtacaattgtgaaaattatagccctacaagtggcggagtgaagaaaccagtggatgcagctaaattatcagtgtgaagcttagaagagtagatctatctctatcaacaataaaaccaggaactcaaaacatacggtcatataagattctcttgcaagtagatacgaggcgttgtgtagcgattagaaggagctttttgatattttcgtttcatgcgcaaatgcatttgtcttgaacccctgcctgaaattggattgtaagtaaagtgctaatgatggatattgctgtaaacagaaacaatgatctttaactgattgatgtcaaaggaatgagtctggttttatctttggtatgctctgaacaatttttgtatgagaagagaagactgagatttgctgtttttagattgttcaatagcttccaagtactttggttttaggcttttagctaattagtttgtgccgtcttcatattttccccttcttctttgcaattttgctattttatggaagctgattatgaccaagcatcaatgaaggaatctctccactataacttatcaggttcacataactttcttaaaagtaaaacagtgaagaaccattcaccttccatatctccagagcaggttcattgcatcttagttagggtttaaccttcaaacttgtctttacactatcctaggattctattgttttcttgtcttctttgtattgctgcatttgattgacttaccactactctcttgagattggccaatttttgctgattaacagttcatttttgctctaagtttcatcagttttttttcttggcatggatgttttgctgaattatcattcgcctaatgagttacacaaacaaaattgtagattttcagagaaaacaaaacaaaacatatgaataaaaaagttatgcatatgatacgcgttaagaaaaacaaatgattaacgtacgtcggctgtgaagtgttgtttgatacaattgggggaagtgacggcacaatgggctggtttcacggcccctttctaagtcatacacgtctcctttttttattttcgtttttttcaaaataataaaaataatatagagagtggcatatccgacggtttaggatctctgccttttctcaacttatagtatataccaaacactttctaaggtaacatgagatatttcacatccttttctctcttattcgtttctgagattcccttcttgttgttgtagccatggacaacgaaggcataggtctttacccgcttcatcgttgcaaaaccattcacctggttcgttccgtacaatccggatggatcatcagagataaatgtgtggttcttattctctctatgttttctgatgggttttgtttttgttttggttaggtgagacatgctcaagggattcataatgtggctggtgaaaaagatcacagtgcttactcttcggaggattactttgatgctcatcttacccctcttggttggcaacaggtttatctctattatctctgttctgttctgttctggatcttaatgctcttgtaacgaccctgttgtcatcatcatctctttatgacacaacaggttgataatctaaggaaccatgttcgtgcagctcaactcttaaacaaggttgaacttgtcattgtttcccctatgcttaggtaaaaacgttttcacaatgttaccattttgttcttacaaaagattataagctgtgttcttgtgattgttggttatttagcagacttgagtaattataaagactcagtttttatgatttgtttcaaaatgtagaactatacaaacagctgttggtgcttttggaggagaagaagatactaatggagcggatgcaacaccgttaatggtggctaatgctgggagcagcgatcgtcctgcgatttctagcttaaatagtcctcctttccttgctgttgagctttgcagggaaactatggtacataagttgttaaggagtttgttagtatagatgagtgaagatcacattgttaaagattgtttttatggatgcagggtgatcatccttgtgacaggcgaagaagcgtcactgagtacaaggctctctttcccgctattgatttctcaattgtaagaaaaacatcttatatggttaatatatatctctgtggaaatgttggcaagttgcttatgctttgacctctatggttttagattgaaaccgacaatgatgttctgtggaagccgagtccaagagagagccttgaagaagttgcagccagaggtgtagagttcatcaaatggtgagtttcatttttgttacttatttccacatggagatatatgtaaacatatgtatagctgaatctctctactgccatttgctttgtgaaggatatggacaaggaaagagaaggagatcgcaattgtatctcacagtggcttcttgcacggtctcttgagttctttcgggaaggattgttgcgatgacctaaagaaagagttgtctatacagtaagagcttaaacaaaaacttgatgtctacaagcaccaacaatttgtataacttgaaactgtttaactaatcaacatctttaactttgttcagtttgagcaactgtgagcttcgctcaatggttatcgtggatcgagggtaagcaataattacaataagttttgacagaatataaatataatttgagagtgtgttggattatttattatggtgttgggtgtgtaggaacctggggactgactctgcagagaccacaaactatcctgggaaggttcctgaaggacttgataatcctagtggctaaatggctgaagagtaagagagagaattctgagatagtttttctttctaaaataaataaattacatgatgtttccattggactagaatctggcattttcagttatttgatgaacattagtgttggtatgtagccatgtaggttgactctgctgctacatgaatttattgtatgattgttattatccaaaatttagcggtagctttaatatttctgctccaattctcattttagctgtgattatacaattgtggaaataatagcattacaagtagaggaactggtagatgcaactaaattataagtgtgaatcttagatgagtagatttatctctatcaacatgagaaccagcagaaacttaaaacattatttatgtaagatcaacttcatattttatggcagctgtgttgaattttcttatggccaagcattttaataaaacaaagagaaaattccaaaaattacactcagcttttcttatagtactaggttttatcttttggtgttgagattttttatgaaaatagaaaatgttttaagtgtttttatagaagtagatcaaagtttaatgctcttcgtacgttctatgtatttggactttaatataatcgataatcgtattcagattctttatagaaattacgctctctccaaactattggagaaagcttttaccattaggaattcgaaattttttgttccccaattttgaacatatgataagatcttttaaagaacactcgacaatgtaaaatttaaagtaggtctagcttcttatccgtttaagagaacgatttttttttttaaatgatatgattcacggtttgtaaagttatctattggaaaataaaaaaactgtaagtacaatactgtgatgtcaaaaagaaaaaaaaagtacacccaaactaaatttgtaccacgtgcgagacaaattgtagtctgcgatcttactcactacccgacaatgacatgccccatgccttagttcttgtaagaaaaaagtgatatcctatatacttcactaattattggtaaaattatgcaaaactttcagtgctaaaagtttgatttatactgtactagttgttatttcaacgtagacataccaaaatgtttattcaagaaagcctatatactagcaaaagtaaaaaagaatgtgacatctttgatgaaccaatgtgaaaagtcaacataataaaacttgagttttcagaacaaatttagttgtccattgtttcgatctgttaatcaagaccataaattaactcttaactatatgcatctaataataatattttgtagttagctaagttaagcacatccaactcttaaaaaaagctagtataacgttaggcttataatcattctcttaataataagttatcctaaacaaattattgcaattttttattctccctacttgcactaagtatcattacaccagtaaaagatgatgatcccttaaattaatactaattaaacaagcaattaaggaatgaagaaggtgagacgaaaccgcgtaaaagacctttcttctttgcaccatcctctctccttcatcatttcacaaatccacaaaagaatcaatctttttaacactctctaatgattcaacgaatccaattacccaaccagaaacagcaacacatatagagatatatactattaaacaataacataacaaagaaaccattttttctcttttgttattgacttaaacaaaaactatcaacgaataattatccttttttgagtttttcccatttcttcttcgtctccatttcatcgtcttctcgctgttctgctatattccggtactagatcctctgttttctcatgtttcttttattaccaaatgatttcttcatttattgttgtgtctttgattcttttttgggatctataatgatcgatgaacatttaaagctacgacttttcaggagctcttgtctttttttctttaatctttgattatgttacaaaacaattatgttttttgaagcttgatctgatgtgggttctttgatttcgttccaaagtttgatacttttttggcttctctttatctgattttttttgtgtatgtttgttcatgaaacagtttcgttggatgaggagaagaagaaagtgaaaaaagttgtgaaatagagagagtttgtttcatgggcaattcatgtcgtggttcttttaaggacaaaatctacgagggcaatcatagtaggcccgaggagaattccaaatccaccaccactactgtttcctctgttcattctcctactacagaccaagatttctccaaacagaacaccaatccagctcttgtgattcctgttaaagaacccattatgcggcgtaacgttgacaatcaatcttactatgttcttggtcacaagactcctaacattcgtgatctttacacgttgagtcgtaagttaggacaaggacaattcgggacaacgtatttgtgtactgatattgccacaggtgttgactatgcttgtaagtctatatccaagaggaaattgatatctaaagaagatgttgaggatgttaggagggagattcagattatgcatcatttagctggtcacaagaatattgttactattaaaggagcttatgaggatcctttgtatgttcacattgtgatggagctttgtgctggtggtgagttgtttgataggattattcatagaggtcattacagcgagaggaaagctgctgagttgaccaagatcattgtcggtgttgttgaggcgtgtcattctcttggtgttatgcatagagatttaaagcctgagaatttcttgttggttaataaggatgatgatttctctcttaaggccattgattttggtctctctgttttcttcaaaccaggtaagcgttagttgcgagtttctcattgttctgaatctatttaagtaccatgatgtgttttgtagtatacattactgtgactttctattcatcaaatgagtaagggaatgtaaatgtttcagctttgcataatgtgtagtcttactctaatatcaggccaaatattcaaggatgttgttggaagtccatactatgttgctcctgaggttcttctaaaacattatggtccagaagctgatgtgtggactgctggtgttatactctatatcttactaagtggtgtcccgcctttctgggcaggtatgcgggcgatatagctgtttcaatgcgttctcttaattagtgccattgacaaggtttcctgaagtttggttttgtgtttttgaaatcagaaacacagcaaggaatatttgatgctgtgttgaagggatatattgactttgatacagacccgtggcctgtcatatccgacagtgctaaagatctgatccggaagatgttatgctctagtccttctgaacgtttgactgctcatgaagtcttgcgtacgtaatcaattacacttaaataaatggttacatttggcagccacacaacattagactatatctcttgtatgtatctctttttttttcaggtcatccatggatctgtgagaatggagttgcaccggatagagcacttgacccggctgttttgtctcgtctaaaacagttttctgcaatgaataaattaaagaagatggctttaaaggtcagtttgtagttatactcaatcttctattgtctctgcatcacattcgtttgagatatgtttactcatattagtgattatggaatgatcaggtgatagctgagagcctctcagaagaagagattgcgggtttaagagcaatgtttgaggcaatggatactgataacagcggtgcaatcacttttgatgaactcaaagctggcttgagaagatatggatcaaccttgaaagacaccgagatccgagatcttatggaagcggtaacaatgcatccttttgagatatgcacactagttcatttcgctatatagatgacaataaccatactctctgtgttgtatcttaggctgatgtggacaacagcggtacaatagattacagcgagtttattgcagcgacgatccatctgaataaactagagagagaagagcatcttgtctctgcatttcagtactttgacaaagatggaagtggttacatcaccattgatgagctgcaacaatcttgcattgaacatgggatgaccgatgtttttcttgaagacataatcaaagaagtagatcaagacaacgtaagctttgcctcttgacatgattcttccactcttcaccattggtgtttgctaataaagttttggtttttgtttcttacaggatggacggattgattacgaagaatttgttgcgatgatgcaaaagggaaatgctggtgtagggagaagaacaatgaaaaatagtctaaacatcagcatgagagatgtgtaggcacatacacacatctttaaatcgtctattcggtgaggatgcaaatgtttccatggaatcaacatttgcaatgtttaatcacagaggaggaagagaaaccagattcatagctgcagcgaaccagctaaatcgttgaaggtttgagttaaaaatgttaaaaactactgtatgattaaaaaatggtgaaagataaaaaaaaagtgttaagttctgttcatcagtagctgtgaggactatttctattttctctctctctgttttgtttgtttgtaacaactgtttaagtttggtttttatttcatctccatcgtcgaaagctttgaccctttttgggtttttgaaagatcaaatcatcttccaatatagtacaaatgtgatatacaagttgtgtgacaatcttccaccttttagttgttgttgctgttgttagtacacaaacgcatactcttcactttggtttgttaaactttttagctcggctttggtcgtcttttctcacatgcatacttccaaattggagtcatagcgacaacattaatacaactagtcaactactatgttacaagtttctgtccactaatttctttctctaattacatctgaatctgtaagtacataaacatgtatgtacatatgaacacatgagtgtgtgtatatacacaaaaatttatgtaataaaagagcaataattgatgtaaaatgtggaatactgtatgatgatagctactaagtctcaatcatgtaatcaaagtgatgtcttagaaccaaacttaaggttgttcgaaacaatcaatcatacattggtcccaatgtggtggattggaacatgacagggaaaccatgtgctcccacttatttatatatatgcatcgtatgttcgtatgtattaatgtatatacatttcacaccacatgcagtgagttatttatgtcaccttttatttagttttccgaaaaatggtgaaatagattggtcaaatttcgtctacaaagtaaattaaaaaagatcattaaatcagtcgttacgagaaaataaagcacatcctcatatatcaaagattaaaaatataataaaactaaacaatacatgtacgcacacgtagaagattagggttttgagttatgccgcctcctaccatctatataaataaatctagcgtctctaatatcttcataaacctctcaaactttgctgagcttgattattccatagatgtttggttcttgattctctatatcctactcgtttgttttgtatagaagtttattcctaatgaagaagcaatcccatagataggaagtgccgtatgacactttacacaacagcggactgaacgaggatgcatccggtgatttctcatcccccgagcagttttcctgatccgtttacggtcgggttcgagctgctcggtcgggttatctaccgtacttcccaccgttctgtgtccactgtgtgggtgatttgacacgggttcgctgaggggtaacttgattttttattagttatgatgaaaatgtccgatgccacgtcgacggtagctatttttggcaatgatcctcgatgctacattggacatagacaaatgtacgtgtttcgcttactgataggaacctgtggatcttgattctatacgatctccggagccatttcggcgattacattttttttatataattgatttgatttgattattgggaagattaccgatgatgattattgcgaaaatatggaattaccgtctgagttaatttctttgatgttaaaaacgctggctaactgaggcttcccaattcataaatcaactctttataatactacttatatgttgcacatccgcaaacaatctttttttgataattatgtttataagtatttttatttttattttttttaattaccatacaatagtcttgattgattcctaacaattaattttagggggtgttattggtttccaactttaaaagagttttaatgatttaaaaaaaatagaaatagtagacaaaatcaaggattttaaatgattactagagaattttgtataatctctttgattaccttttccatagtcttgtaaagtcttcttaaattaaaaagatttgaaatgattacttgagattttatctctttgaaatattgcttttctcatattttataaaattgtctcgttgaaagttttacataggttttgtatatgtcaaaagtgtattactctcccaaaatatattattgtgcttttgttaaagtttagaggtatgtaagttctcatataaaagattttacacatagttcacaattatatagaaagattagagagaggtcctaaaagttacgttcatgatatttcttgaagagattagggagaggtcataacgttactttgattggtttttatttaatggttaagcagatgattcttgttaattctaaaaatcattcacaatctctctgttcttattatacttttcatgatttcattttgtaaagaaaaatgtataaagccataaaccaataacacaataatttaaatcattaacaatcctagatacttttgttttaattgaataacacaaaattttcaatgactttactaaagtatcaatgcaataactccaaatttatcaagattttatattactttttacaaatcagaaactaataacattaaactttaacagaatcttaaacaattgaataacaaaagatttttcctaatattataaatcattaaaagtcgatataaattacagaccaataacaccgtcttaattaactgataaagaatccaatctgtagactttagaattataaagctaatggccaccttgattgttgccgacgttttggtgatactcctttttttttatatggtaagacgtaacacatcaaaagctatttctcggcctaatttcacgcaatgacaaaaagaacgtaaaaacaaaattggaaaactctactcagcactaaaataatgaaggaatggtttttaatctaatataaagacaataagtacacagaacttgtaaaacaaatgaaataattaattatacatttaacattacatttaacaaaaaaaagtatttaaaagacgaattctatgaaattagaaaattatgaccacacattatacatgtaagattcaaataataagagattttataagaatgaaagtaacgccacacacacaaaatcttaagaatctccaacgagagagtgagctccacgtcatcgctgtccatgtttgcaagagagaggaagagagtctgaggaaggacggaggagacggcggatttcagatcggagcttaaaaaagacgtgaatgaagctacctctttgttgattccccaatgatgatttggtttcgttcttgttaacctcaagatctgtgaaaaagattggtaacttctttaaaagaatccatgaccaactccattcccaccattctttcacggagctccctccttgctctcccatgtcagagacagacttggatcttgagacggtggaaggttggttacgtgagagatttagagaaagagaagagagacgacgacggagaagccctggctcatctgtggtggtggaagagatagggagagaagttggtttacgaatttgaagggttttcataattgaggagctcatggcttgagcttaaacttggaacgagagagacgaagatgaagaaggaagagagagttgcggttgctttagggagaaaaagtgagaaaggtgaaagagagagagagagagagattgtgaacaaagctttgacacaagactggttttattcccgtgtatgttgtggacctcattcacatttattccttaccaataattacatgccagttcatttctatgattttgccgcaaagttggtaatttggttgtcaattatattagtagtcaataatccaaacttaaaatttaaactgtcatacactgatcatactaatacaaactactatactagaaattcaaattatctttttttctttttttctttttctggttacatcctaaaacaaacctacattactaacatttactgatgtacatatatgaaagacataaatatataaatgtgaaaaaccaataagtgttgtaaatgtggaatatgatgagctagctagaaagtctcaatcatgtaatcaaattgaagtattgaatccaaactcaggttgtttgaaacaatcaatcatacaatgccccaatatggttgattggagcatgacaaaggaaccatgtgcttccacttatttaaatttacgttgtatttatcttttttcggaatattatttaaatttacgcaaatttgttttgaattaaagacctattatctaatatggtattagaatcttattcacacgttttcaactcgatccactgatgattagtccaacctatatttgattcttcgatccatgtccaaaaatatcgagatcaatagctaaaaaaagtcatcatctggaaatggtgtcaaagcttatagctaaactagatgtaagttggaatcgatactcttatactcttcacatcacatgcattgagttctgatgtatatatagaatgggacttttgaatagtccggtgaaagagaccggattcatgattatcattttgttattttgtgaatttcaatccactcacgataaacaaacacgatttaccagcatcagtgaaatgtcaagaaaaaaaaaataacagctcatgtagcaatgctatttcaaattttaatagaagggcagtcgtagcttaatcgattgaatcataacgtaaaattttgagagtagaacaaacgaaggaacaataacctatatatataggtaataggctgcaaatgagtttgaccgagacgggaacggaggagacaaagtgaaagatctcttccttcttcttttaaaaagataagggataaaagctcataattaattattgtttgaggttcgagaatttttttttagagagcatatgaacgtaaagtttatgatagatgatattatctggtcatagatgaaagaattaagtttgatatcatattcaaatatttgttttaatagttataggtaggatggtattatgtttgaactaatttttcattgaaaatatatgaacaaaattaaacaaggacaactagtggttccatttacgaatagtacaaacaaacaaaatcctatcaagtcttatgggctctacgatttctctaccgaaaacataaatagtttcataaatttgaattctttgattacgaggtttgtcgtgtcacgacaaagattcttctatcgcttagagaaaacatgctatggaaagcaagatagagatggtcaaagcaagaaggcaatcatgtaaattcaataatgaatctgattttttgttgttgaattcctatctattaattcttttaaaagggatgattcaacaaaaaagaatcagatttactatcgaattgacctaattagcttctagttttggtcatatctatgttgtttttcaaagattatgtattgatatgtattctttataaacgatggaagaacctttgtcatgaagccacaaacctccttttcaaggaatccgagttcatggaaagatctatcttcaatacagaaaccataaaaacaataaggcttgatagagaaaccagtaagtcatcccttcggggaatgtataatgtctcccaccgtattcactgctacctagctcccaacaagttaataatacatacctcaaggggtggtacgatgatgctatagaggttgatgagttacagaagtattgatttggtggagatgagatgataagtaaccgataaacgcggcttaatttatcaaagggaaaaacgtttatatggatacaagactcgtgagagaaatttaaggggaaaccacacaaaaatattgactcaaaacaatgctcaaagacttgaatgttggaagaagaccaacttgaactttttattgcttagaaattgtgtaatgagaacaaagcaacgagcttttataagctcaaacgagaggagacctccaactgtccgaaatagttaacaaagaaataaatatgcggaattaattgacatccttggtaaagagatctacgatctaattgttgggaattgagagtgaagatgtgatggtctcagatatagaacaagtggaaaaaatcttggtaatatctttagctgtaatggatttggtcgagaacatggctaagttctttcgaatctaaaatatagaaaatatcttcttaggaatatctttcttatacacgtatataggcatgtcaatcaggcttttctagttcggcccaaaattcgaaaaatccacataaatttaagccttatgagattcgaccccttcatggaatgctcttatttatatcactccataaaggggtcacaatatttttgtatgaggtggatcctaaaagtgatggcgtaggcgattgtgggatggttgtacttaaactcggtggataaagtatacgccacataagacacagacaaaacaaggcagtgatataaatcacatcactagcgaaacgatattgggctcacaaggcaaaaattcttaaagagagtaagagactaatatcctcaaatgaaacccgtgataagctttccatcagacctcgaaaatgataactatcaaaccaacctaaagatgtcgctacctgctaggatggagtcctcaactagtcgtgcagggtaaaaaatcatcaaatagattggatttgacaaaactttaagatgaagagaacttgacaaatatgttagttgggcttcgataatgatcatgtcaatgggcatcaaagctcttaatgttgggccgcaaccttttggatagatctttcatggatgataagttgggccaagcggctgtggtcgatatcgtggtccaagcccgataatgggacctcaagccggattagggtttttccatttgtgggccttgtgctcaatttaaaatataaaaggtaaaaaacacatggtttgtccaatcaacttggtggtttcttccttcattatgacatttgtaaagttgtcaacaaaatattacaatgcatatttgtggtagttaaggaaacgtccactaaaatgtggtagatattgggaaagcaatcttttttttttggtcataaatcttttcaatccactaaaatgtggtagatttagaaagctatattttcaaaagtagaataatagataaaaatcccttattctaaatagatatttctaggaaaaaaagataaatatatgttgattagtatcatttaattaaatgtgtattgatatatgtttctccttgtgtcaatctttttcttttcaaatatgttaaatttaagaaataaattataaactattaaagtattttactttctgcatatatttttcctaaatcttgacatatgtgataaatactaaaatcacctttcaattacccaagtagcaaattaatattttgtagaaactctaaaaaataaaaaattaataagtgtaagaaaatgattgaatacattttaccattacttaaaaagtttgtactcttttggttttttatatgaaaattaaatttgaatttgttttagtaaaacttgttaaattaaaaaaggatcttttaagaaaaatataagaaaaaaagatataagttactcgcttcagagtgtctactattttttaacaagtgttgttataacacagaagaaatattttattcacatacaatttcagttaaccaaagtttcatcttaaatggatttgattagatatattaattagtttttaatttaaataagaattttagatagatttttactatatagataaccatattcaagctcaactaattgatagtagcgtatttcaaaagatagtttggaaaagtccgcgtatatcactagtgacaaaaaatttgaaatagcgcgcgcattatgtagattgtcatttgattcagttaaaatagtattttcaatctttctttctaaataaaaattaatgataagcatcttttaaaccacaactcttaatctatgatatattttttcaaaactcaaaaataaaagttaataagaaagggtaaacagatgtcaaatcggtttcatgagtgaaactaacataaaagaaaaagctagactttcaaaagcatataaatagataactctctaaagcttttaagccagtggtttattcataagcaccatcttctctatatctcgtgttttgaatatcaccacattttcataatggattcagcaaaaaaatcagatttcttttcaaatttacatgattctcttttagtgtttataatatcaatgctacctttcaaagatttggtacgaacgagtgttctttctagacgttggaggtatctttgtcgtgaaacgacaagcctcgttttcaatgaatctgatttcgtgaatttatctgtcttcgatagagaaatggtagaacctgatagggttttctttgtacgtgttatgcgtgagtggatctcaagatttactggtaaaattattgaaaattttgagattcatctctcccagccgatgggtttcgcaggagatataatgtctctcactgaatttgccacctcccgacaagtcaagaacttagttcttgatttctcagatcctatccaaagaaacttaagtcaagcccaacagattataagagatggtctactcagatgcagataccctcaaaagaacgaattagatgtttctcatctctttttcaatcttttatatgttagaaatttaacggtctgctcttttttccttcaggtaattggttttcactcttttagctatctaaaattcataatatctacattcaaatttcacaccttatgtcatgtaatgtaaataccattcattataaattttctttgattttttaagagtataatctttagtactatttcattttcttatcgttaaaaattgtgtatatatgcaaacaggtttgtttcaatttgtcattttaacatctttttttttattggatgaaggtcctccaagattgtgacgatcctatggctttgcacgtttcgatgaaaactcgacatttggtgatgaaaacaaatatgcacgcaaatgacttcgtgggaattagcatatttctcaatagttgtccggaactggaatcactcacgtttgatttggttactagtagtcgtttcgtggtaagctattattttttttttaatctttaacgttgatgaagtcaatagacattattacaatatacatctatctaggttctaggattctaggtcatgctatttagtaaaacccttaactttaattaaactttgcagagagctccatcgcctttagtgatagatcctgtaagccattggctcactagcaaatcttacgagtgtttggaaaaaacgcttaaggttgtgaagataacaaaatttcgtggaagctcgaacgagttacatatgcttcaatacttgcttcgtaccgggtgtgttatggaacgagttgatctatacgaggcagagggattgaaccataaccaaaagaggtgggtactagctggggttgaggaggttcagcagaatttcaagagagcttcgaggcatttacgaattactctacacaatgcttgattcaagcattttctagtgaaaaagtaatcaatgaatgatctttttgaactttgctttatttcatatgaaggatgcgtatgttttatttggattggttgtttcagttgtttaagtctattattttcctatttggcttggtaagataaacaattgataattaagaaatgaaaagctagtatggttatgtttggtttcagttgggtttggtttgtttttaaaaatttaaatctatgtttgaaaatcaatatttacaatatgatattaataaaaataaatgtgataaatttttaatgtcagttttttatttttctaatttgattaaatctatttttcttaatataatgttttatttgattccatttataggtttgtttgcttatatgaatttgaatgtgagatattgtacctaaatgagtttatttacttccatctatacatgtattagtgaatatgtcctcacatatatgcaagtgagcatttctagtaaacatatataaaataaaatttcgaatttagtaatttcaccataggggatttgcaatagtaatcattttctactatttttttgcaacaataccctttcttgttcgttattttaaaacacacatttttcttaaacaaaatgaccaaatcacctctcatctgatgagaacatgtaattagttattttcccttacataatttgttttctccaccaaaaaatgcatttaaaaatccttgtaaagtttttaaaattttataaagttgttaaaaactcttgtaaatcattttaaaaccacataaaatcattataaagtctttaaatacatatgcaaatactttaaaactcatttaaaagcctttataaatattttgaaatccttgtaaatcattctaaaaccttttacaatggttttaaaagttttacaagagtttataaagaattttaaaagagtttttaaagaattttagaagacttttaaaggaattttaaaagtatttacaaagattttaaaaaactttgtaaatccttttaaaactcttataaagtctttaaaaacattagtaaatcatttttgaactcttaaaaaaaaaacagtaaatattttaaatcatttgtaactctttttgaacgattttaaactcttgtgaaccattacaaaaggttttaaaaatatttacaagagtattttaagagtttaaacccttgtaaatcctttaaaaatctcttaaaaactcttgtatattctttaaaactcttgtaaaccctttaaaatcttttaaaaacccttgtaaaaactttaacattttttcaaccattttaaaactgtcatgaactcttttaaaaacccttgtaaacccttgtaaaccattttaaaaaccattttttcaaccattttaaagctattaaccattttgacgttaaatagtttttttatcctatcaatccaaatagttttacttattgacgttaaaaaaaaactaaaaaacaagttttactataaatctttaaacttattttactaacactgtagacctcaaaataaattttctctttggatctccctaaaagataacagaaaagtaactcccctcaacaaaaaagtaaaatgtattatttgttttgtttttctttaacatcaaaaagtaaaactatttaatatcaaaaaaaaaattaatgtcaaaaagtaaaattatatatttttttaacgtcaaagtaaaaataatttgacacatgggacacataaatattatttaacctcaaaaagtaaaattatttcgttaaaaaatatgtttagtttttccgttgatgggagttatggttccgttatcttttagggcgaaacaaataaaaaaatttaatttggaggtttaaagtgttagtaaattttgttttggagttttaaagtgttagtaaaattagtttgaaagtttatagtattagtgaaaatatatcaaggtttaaagtgttacccaatactactttgaaggttaaaaatgtgatattccccaaatttttccttctcctaccgttacaattttattttcagctttgttgctttcaaaaataaagttacacacatcagtctagcttctcattaaaaagtgttgcacttaattgttcttgatttgttatataaacttcaaaaatattattggctcaataatttagaaagaacttttcaatctttcactttgttaacatgtctaagtcacatgttaattacatatatgtctatattaaatgtcagaatctagctttaatttgcaaagttactttcctttgctaacagaggataaatacagtctcttctcctatttttttttgttcagagctataactccaaagtccaaactaaactaagaacagaaaacctcatggctcttccgtgggagttggaggaagacatactctctcgtctgccacctatatctcttgttcgattcagaaccgtgtctaaacactggaactctcttttcaacgacaagactttcatcaacaatcacttgtctcgctcccgtcccgaattcattatcttgaccaattccaagatttattcggtagacatcatcgatcacaacaacatcgatccaacgataaggttgcatgagatacccacctatgatattcatagccggggtacagatttgaatcgcacaattataaatacttgcgatgagttcttgttttataactatcggtattgggacaacatgacagctctctggaatccatggttgagacaggttagatggatcgagtacgcgaatcaagagttctgtgttttcggcttagggtacgataatagtagacccgaaaaggtttacaagatcttgggccatttgttttgtcacggtaaagtcttgagagatcagaaagttgtgatctacgagtgtgcgtctgactcgttgaggtttattgatagacctgaggatgacgactggcccataactgaaacagctaaacgatcaaatgtgtcattaaatggaaatctctattggtttggttgtagtaattatgagaatgatgagtactacatccgaatctttgatttctcgacggaggatttcaaacctttttgtctccttccgtgtcaaatgagccatagtactgatgaacttgtcctcgcggtttataagggagatcggttttcgttgttaaagcaatgcagtgtaacaagggagattggggtatgggtaacgaaagagaggattagtaatgacaatgggaacggtggagagggcgtggagtggttaaagttgatgaccttgtcaaaacctaacttgccaaagttatttggtacggttagttacttcatctatgggaagaccttatacatgtgtaatggcgacgatgaaactgcattggcttgcatctatattgtgagggaagatgtgtgcaagaagtttcaaataggttctggaaatattaactgtcgtcactgtgtttatacacccaatttgctctcgcttcctttatttataggttagatttcggtccctctgatgttactctcttttcgtctccttaagcattttcttcttcatttactcgcctatggactataatgtaatatcgaggttcaagtgaaccatttgattaatgtacttagtctgtttttctataaatgttttaagctttagctatttggtatttgcctatttccaatctttaaaacagttatgaagaaaagcctaagtacggtaaggaaatggttatgaaattttaagctcgaaccgcataacacaaaactagtatagtttatgaaggtgacattggcaaaaaatatcctatgaaccaaagggtctaaaaaaaactaaccctttggaaatttagcaactttaaaattacctacttggctaatttaccctagattttatttgcattacgttttccaaataagatatataatatcattgaagtatcaaacatgtgagacagaggttctagtagcctcccatagcctgagaatacgcgaaagtagagtttcccttccaaatacaccttaacagacagagatgtgctgtcgccacgatgaagaatacaacaccctttagtgtgtttcttaatgaggttttacggtggccaatcttgtcttgcttctctatggaaaaagattatgaacctagtattggccaatgcaatgcatggggtgaatagcacctactttttccaatgcaatgcaaggggtggatagcacctagtttttcttgttcttaaaattgtgacggtccatgatattaattaaagtttatctctatcaccaccgaccagaaaaagttgtagcggacgttttgtagtttctctttcttttggaacacgtaacacatcaaaggctcaaaactacctttttctttttaatagaatcaagaaatcccctaaagaagtaaccctagttaccggaagaacttgtgcgtttacgtagcaatgagaagagccaccggaaaaattggattggcttgcatttatattgtgagtggagatctgtgcaagaagattcaaataggttctggaatttttaagtgttgtcattgtgtttatactcctaatttgatcccgcttcctttatttagaggttagattgttgagtgaattgcaagtcttttttgtttttccttggttttgttaggaatctaggttgatttcgtttgataaaatgatatatcgaatggatgattcagtacaatatcattgaaatgtaattaactctgaacttcattgaatttaaagacacagtcgtaaagtcgtcctccgagaaactgtgctacttcaacgtgcttcacctgcataaccaaagatgttcatgacaagtcagaataaagagagagtaacgtgacatagagaaagtactaccattccgatcttgagagaatcacacttgaactgagcataaaggtttgtctcgatcccgcgaccctgattacaacagccaagaagttagctaacaaagccaagactagttgttaaatcgtgcttcactttcacattgtatgggcccctaccatgccttctaggatgactaagtctgcatcagatgaaaggtaagcaagctcgtgcgatactcttgagagatcaataacctgaaacaaattttcgagagggaaaaagaaaaaaaccttaagaatctaatgaataaacccatttctgtctctggagtttctaatgtcttaccgctaaatcgttccctgaatttgcaatcagaagctttgaagtatcaacgcctatcaattggccatttccatcctttaactggtagattaagtctaataaatcagattcacttttcatgaattagttaatatcaagaattacatcattcatcacctgcgacacgatatctgtaagctcagtatatgttacatcgttgatagctggcagctcgttagcagctagcaccaccttcaggggggaatataaagaaagaacaatttagatagtactctgcatcactcaggggactgtaaaaaaagactcggtcattttcaaaggtaccgtacctgaattcctcgacggagcaactctcttgcgaaaggcaaaatacccaaaattatgtctgcaccagaattatcaacaaaaatcactgcctgtcataaacaattaattttgtcaagcggttaacctctgaagtctgaacatcgcattagataaagcacaaaacaaacaagtgaccttcttccaaggcttcttgacccatttggcttggaacttgttcaagtcatcgatgacccatggtcgtggaaccaagttttgagaggtagccaagaaagatatgccatcccttgagaaaacctcagcaagcttcaaaatgcgaaaagaaaagagcgcgtaattaggacaagcttttcctgtgggagcaccaaagagagacaactgaagaaaccagcgttgttcaagtaatggaatacctgtgcagaaccaagatcaaagatgtttccagcaaatatccctctcaccaaattctctaaccgttctccgtcatcttcaatagcatcactcagactgacaacttcaggaaatagtgatatagcctttgcattctcctcatcctattcattgaatgcaagctcatctaatcagagagagcgggcgagagaaagagtatctctgtatctgaaaacctcaagtgcccttgaaagaaaattcgaaccttgactttcttgaatatgtccctaaatcctaactctctgagtaaatgctcacgaactcggccgagaatctgaaaacaagccaaaataatccatgaaaacaaaactcactacatcaaagagaaagatcataaggtgttttcgacttacaacaccatctggtggcccaccattactctctggatctttcttccagccttcaagaaatcccgcatatcttccagattcaaagtaagacatatcaaacgcaaaccacaggacacaaaactcgtctagtttatgaaggtgacattagcaaaacatttgcctacaaaccaaaactttgagaattaccacattaatacgcaaaggcaaaaaaatatgttacctttgttcaaaaattttagctctagcaggagcatctggaacactggtatcgctctctgcacgtttcctgcaaatgaaacagctttagaacaatggagaataattattgttaaaattaggattccatctgtttcctataagcttccagaaacaatctcgtgatgttaagtaaacacagaggaaagtcaaagcaacaactagcaactacactatcaatagcttaagggctaaaagtttcatgagttttgacagaatttgcaattaatcaagcagactattggaatatgagcctaaaagaagcaatttttggtttcaaaatcaaaacttgattcgacccatgagcagtatctaaatgaggtcaaagtagagagagaggaacttgaaagaaggaatggaattggcgaagacgttgatccaggagatttcagtaggagtggctttcttgagattatcggaagggaatctataaggaatggtgcaagctctgtagttggtttcaatcggcgttggtaacagaggaaacggaatcatctccgaattgataacgacgaagaacgagtgtctaatagatccgggtcgggtatgtacgggtcagttttcggattgtatttagagataagttgaaaagtagacactttttctacaaataatttgcaaagtaggtagttttttagttattttttagaaatagacacttttctctttcctctctatttagtaaatgatttatataaccttttgttattttgttatgtagtaagataaaaacaaaatttaagtcaaattttactttttctcttttttatttttacttaaatatttttactttgtttgataataatttttcataaaaaattaccatataatcatattaactttaaattttttatgttaatctaaaaagactaattttgctatatttcaaaaatatgtagcatttttttatttaatttcaaccgacggtatacgcaatattgttaaaactggtgaacaaatgttagtgtacgataataatgtaaaagttaatatataatattgatgtaagaagtgatagaccgattacaatggtatacaaaatggtgtacaaagatgattgaaaatatggtgtacatgatcgtacacctttagagatatataaaacagtgtactaacattggtgtacgagatgatttacaccactaactaaaataatgatttatacatttctagtaagtgtacactttgtttaccaatcttatatgctatcatttaaaagttgtatacaccattctattcaccaatcgtcataatagtttcaatcattttgtacaccatcaagattaacttaattatgtacaccatcatgtacaccattatattgagtaataatatttggtttatacaatcattatgtttgtaaaatattaaaaacaacattacctctagttatgaaatatcggtatacacacttgtacaccaatgaataatagttagtatacaaaacgatgtttgaaatgtttgtgtattaaattgatgacataaaaatactctaaaaatcaatataattttttaagaaaactaaaataaagaaaaatagaaaataaagacaaacaaaataaaataaaaatggtctctcatattatttttattctctctcaagataaagggtattttagtatttgataggtattttgttttttagtctattagacatattctctatctcacaaaaagtaaaaaaaagtgtctatatctctaattttttaaaaaactacctattttgcaaattatttttgaaaaagtgtctactttacaaataaacccttgtatttactactttaaatagtagccaaattccaaacttcgtggtgtttttgtatatatatatatatcatttattttgtagatgttgaaatttatgagtgaaattattagcatacgatcaaacaagcaacataacaaacaaagatcaaaggaaagattaaaaaaaaaaaaaagttgcaacaaggtttttaagaaaagggacgacgcttgtaacgaaccatgacatttcctttagcaccaacgaccaaagcattccagttgatttcagggaaaggtgacactaactcaagctcaaagtttctcaataagtgacaccatacggctttgatctgcaagaacgcaaatgatccaccaggacactcgtgcctaccagctcccaaagagatgtatgaacacgaaccagctgctttatcctcttctctttcctttgaaaatctatccggatcaaaattttccggatctttgtagacatgaggtaagcggttggcgaatgcaggagaagttgcaacgatatgaccctttggtatctcatattgctttccttctcgagttgtcacggtgaaatcactgtgtactgttctcagcagtaagatctttggagggtgaagccttaaagcttcttttgcactgcgaaacagaaaatccatctcagacaaaacatcgtagtcgatcttgtccccatgttttccaatcagtttcttctgctcgtccaaagccgcggaccaccagtgtttgttttgaattagataagcaccggtccatgtggcagtgatagagcttgtatgttgtcctgcaaacaaaccagcaatgagcaaaccagttacttcagattcagttgtctctctaccgtctttgtactttgagtcgatgaaacattgtagcatgtcgttctctgatttgtcaccagagcgttttcttgttgctatgatgtttgaaaagatttttgcaatctttccgcgagcacggtcacgacaattgtgagctggaatggggagctttgggaagatgacacttatgggttgcatgcctttatcaaggtcatggaacaatggagcaacatcatcaaaaagttggtcacggacttctcgacccaatagacatctactagcagtcaaggtgattagacgctctaactcggcctttagatccacttccccactttctccccattttgagaagtaatcctgcaaacattacatagaaaatgattggcaaatatatgtacatacaagtgctttccaaaaattatatacagtatatgttattttccttttggatgtcaaaactcaaaaaaataaaaaaattgcgattttatataaggtaaataatactaataaaactaataatatatctgaattgcgattatatatctccataaataaaattactatgagataaagagatgatgaatttttttttatttttttcttgaatatctggaagttcaagcccgaaagtctacatcttctagagacgagagccacaccaagttaaatttatctcctcaaatacaacatttccacatgcatgagagatttaccactgggtcaacagctctagtgtttcaaaatgtttgatgttttggctataacacaagggttatgacatacattttttttcaaaaaatattaaataaaaataactcaaccaattatcaaaatagctataaaattagtcgcacggtttctaataaagctaaaaatatcaaaacatattttacattttgaaacactagaccatcaaatcttttagaatattttgtcaaaaaaaattgtatatattcaatgcagctttttattacctcagtttctttagtcatctgatcaacataaccccttaattgttgaccttgagagcgctggagaagaatcggaactgctccatccgaacgggatagtcaacatcaaacacaactccggggccaaaagtaggcacattaaatttgtaaatttctttctggctgagttcagattcataagcgttgaaaaagtgggacgagacttcgggaccgatgagaaaagtgatgtttttgtgaagaagcttcactgtgaaaacacttccaagcttaggatattcctctctaagtagcactattggacctttcatgaagcggattagggatccgataaatggaggccacgcttgaagaactggagggagtgggacgacacttgttttcttcttggatttggaggaggttatgagtttggccacaacaaacactataataatagccacactcgtcttcaacagcgtatagtaatcccagtccatttttttctctcgttagggttctttaaatctgtggaaaaccaacaaaggaaatttgtaaaacacgatatttttttttacgttatttgcttactattaccatttttatgttttactctcaataaaaatagaagctaatcaaaatctctctacatataagaagatctcagttgaataatggagaaatgaaaatcaaaatctgagaaaagcggaatcaaagtatatgctgaatgacaaatgcatggaagaagcaaactgaaagtaccaatgaatggataagttaccttaaatatggctgaagattattatcagaagattatctaaagagtaaaaagctgaatgagaaggaagtgtagtctgtagtactcactgtctttttcttttatagggaaattgcacatgtttaagaacataaattaattataaagtagcatgtgcatatagttggcgaaatcaagtaatttatttttgatgatttgtggtatttatctttctttttttttgaatgaatgtaaaattatatttataaaaaaaactattcataaaaaaattgtatgtacaatgaatacagtagaaactctgtaaattaatactcgataaattaataaacatgataaattaatatattatgtcggtcccaagtcgggccaatgtaaatattaaccaaaatcgataagataataagataataattattttgaaatctctatgtaaaaatatggtcctaataatatcataaattaataatcataaatcttaaatatgcttttaagataatctagtataatatgaatttaattttcttagtcttttttaaaagttcgaatcttgttgaagttcatgtctaatttttttattgcatcaaaaactcctggtgttgtcttctcgatatgcatctaaaagttgtgatgacgtgataattgtttttttatgtatcattatttctaaaagtttcatattatcgtcttcaacttcttcaccaacattatagaaacaaatcacaatttcttctaaactttttgaattttggagtatgcttcatttttacctagataatcgaataggctatcgacatttgttctattccgaaagtatatagtgttatattttgcttaaatatttttataaattaatatttattaatttatggataaattaatatcattataaattaataaaattttatggtcccaacattattaatttatagagtttttactgtataactttgagagttaagagttgagagtgtagaaaaaacccaaagattacaagatttacccttttactcctacttgttaaaacaaagctctcctcgcgaaaaaaaaggaaaagcttcgtgagctgttacaggaaggatttgtttttagtattattatattctcaacttcaccaaccaaatgtatcattctgcattttaggcaatgtttttaaggagttgtttaggttttaattagcacagtattatattcaacttcaccaaccaaatgtaacagctcatgcatgtatttcttcttatatcccaacttggtcgatctgcattttaggcaatactttactagagattctttttggcttacgcaaccgacagtcatttattttcattaattagtatcccaacttgagtctacctccataccatgtgcacacattatatttcacttgacatggttactgctataagaaactcacatctaatcaataacccaatgtgcatggtatctttggttctcttcacattcaaactaaaccacctgacaaatacttatacaacagaagaataaagacgtgtcccggtgttgccattgtttcctacaaacatttatactaacaaagctacatccatcactaagaaaggccgtgatccaaatacatcaacttctacattgtgtgatttgaccaaaacatactttcttcttcctagaattcggttttgcacaaaaaacatattttcttcattaaaatctaattagacaaaccaggcataatttcaacaagtccctttattagagtgtatatagttggtttagttatggtttccattttatccatcagtccatcacaaacgaataaatatttttgtttcaaattgatttaccatatcaagatggaaaaatattactttttgtaccctatgttttgaattaaaaatgacagtaagagagaagtgagactggagagtactgaaatactaattagctctgaacttcattgaatttgaagacacagtcatagagccgtcctccgagaaactctgctacttcaagatgcttcacctgcataacaaaaggatggagaatatgagaaatcagaaatcagaaataagcaataggcacacaacatttcttttcattaatctgttgaggaaaaaaagagagtaacgtgacattgaaactactaccattccaatcttgagagaatcacacttgaactgagcataaaggtttgtctcaattccacgaccctgattagaacagccaagaagtcagttaacaaaaccaagactagttaaattgttaactcgcgtttcactttcaaactataaatgggacttaccatgccttctacgatgactaagtcggcatcagatgaaaggtaagcaagctcctgtgatactcttgagagatcgataacctaaaacagatttttgggagggagaaaaaaagtaagaatccaatgaataaaagtataaaaccatctatatatctttcagggagcttctaatggcttactggtaagtcattccccgaatttgcaatcagaagcttcgaagtatcaacacctagcaattggccattttcatccttcaactgtaaattcagactaaaaaattagattcgcttttaaaagctgtgtatatcacgaattactcattcatcacttattcacctgtgacaagatttctgtaagctcggtacatgttatgtcattgatagatggcagctcattagcagccagcaccaccttgaaggggaaagatgaagaggatgaacaattcagagtatacttaagctcactgaagagactgtgaaaaaaaagactcagtcatagtcaaaggtacctgagctcctcgacggagcaactctcttgcaaacggcaaaatacccaaaattatgtctgcaccagaattatcaacaaaaatcactgcctgtcatgaaaaagagaaaataaacaattcatttcgtcaagcggttaaccactgaagtctgaacgaagcattaaaaggaagagcaaaacaaatgagtgaccttcttccaagacttattgatccatttggcttggaagttttccaagtcatcaatgacccatggtcgtggaaccaagttttgacagctagccaagaaagacataccatcccttgagaaaacttcagcaagcttcaagatgtgaaaagaaaagagcccataaattaggacatgcttgctgtgggagataccaaagagaggcgattgaaagatacctgtgcagaaccaagatcaaagatgtttccagcaaatatccctctcaccaaattctctaaccgttttccgtcatcttcaatagcatcactcagactgacaacttgaggaaatagtgatatagcctttgcattctcctcatcctattcattgaatgtgaactcatctaatcagagagaataagtgctagctatctgaaaacctcaagaaaactgaaaggaaattcacaccttaactttcttgaatatgtccctaaatcctaactctctgagtacttgctcacgaagtcggcatagaagctgaaaataagccaagataatctatgaaaagaagaaagctcactacaccaaaggaaaagatcatgtggtgtttatacttacaatgccatctggtggtccgccatgactctctggatctttcttcaagtcttcaagaatcccagcatatctttcagattcaaggtaagagatattaaacgcaaatcaaaagactgaaacactatcttgagaatcaaacaaaccacagggcacagcctttgttctactttatgaaggtgacaatgacaaaagatttcataccaaccaaaaccttgagaattactaccaattatgcaaaaaatttacctttctgcaaatttttcagctctagcaggagcatctggaacagtgatatcgctctctgcacgtttcctgtaaatgaaacagctttagaacatagagatttaatgggattttctggttaaaaaacaggattgcaactgttgcctataagcttccagaaactactcttgatgtaaataagtcaaaaaccaagtaaacccaggaaagtcaacacaaacaacaaaccaacgacattagtcgaatttagctgaaagacgaaaagtttcctgagctttttgatatttgaggctaagagaagtagttttttggtaacaaaatcaaagcttggtctgacccatgaacatgaacagagtctgaatctggtcaaagtaaatagaaactaaataaggtcggaagagagaagtagtgagaagagaatgaacttgaaagaaggaatggaattggcgaagacgttgatccacgagatttcatttggagtggctttcttgggatcatcagaaggaaatctgtaaggaattgtgcaagctctgtagttgttttctattggcatcggtagttgaggaaacggaaccatctctgaatcgctctccattttctttgcttgtgatgatcttcagaaatgatacaatgattgatgacgatgaagaacaagtgtatctagagccgggtcgggtacgggtcaaagatccatattagtgattccactaccacacgaataaatgttgcattttttgctttgggtttggtttggatttagttaaatagtagccaagttcctatctttgtggtgtttgtttctgcaaagttaagttttttgttctatactaatcagtcatctttggtcttcaaatgatttgataccttatctgtggtcggctatattagctcgagcagcaatctgaattgtagaaaccattgaaactctggcaaaacttgctgtttgctgcccgtataaccgtatttgtcgaacataatatcaatgccctcttggattaaggagtaacctgttttggtaaggaagctggagattatagaaaacattcatatgccataaagaagttcaattttgcaggagtttacaattgtaatcagctacttatcataagtggtaaaaccacacctaggcaccttgacaagcaaagaagctctcccaattagagtgatccaataccaacctagccacaacacctactgcttgaataaagccactgaggtacaagtttgttttagatttaactcaaagagagaatgttaaaagtagagaaaaacatatggatatttccttttcatagatgcataccgatgtcggacacaattctgagtcaagcaaatctaacaggaccaggaaaaaaactcatccttcggaataagatatacaaacctagataaagaaattaagaaacagcaagaatatggaaataggtacactgtaccacaatgttagttccagcagcaaagcaattattactattgtaacatagtggataatggaacctagctcatctgtctggctatctgcttaaacactaacaagcccactcatacgggcacaaccttctacttcttccctatgttctgaaaagtgaaaccccttaggtttgctactgggtgctgctttgccaaaagaccaagctaactataacaggagaagaaattctaaatgctagtatctccctaatccctacccaaaaacatttgtttattgtctctcatcaatcaccataaatcatgatagatactaacaccaataatcactcactcatgcatcctagcatctttaccctggccacctttcattctcttcatgccacaagatgtttacacattcaagcaaaaccacatgaaaaatccttaagaacagaagaaaacggaaagatatgttccggtgttgcccctgtatttcctacaaacatctatactaatcaaactaaacccatcattcacacataccgtgatctaaaaacctgaatttcaacatgtcacacagcaatcaacaaaagtttgaatagagcaagaaagcaccttgaggcttgaagtgatcagacaaactctctttccagaaaacacaatactttcttcattgaattaataatttacacaaaccaagcatcattccaacaattcccattgcatccatcataaacgcaagaacaaatcttttccttttgtgccctaaatttagaatccagattccaatttccaacctcatttcttagccttagagaatctaagacaccgatatttctcaccactcacagtaatttccagagcaccatcttgattatcctgattcgacgcagtccccataagaacactcttctccttctccagattctctctctccatcttcaacctcgcttcctgtctagcgatctccgtctgtcaaaatcagaacaaaatcagtatccccacacagatttctccggattctccaaaagccctaaaaatcaaaatttgaaaaaaaaacgaacctcacggcgagagagctcagctttccaggcagcttctcgctcagcgacttcacgctcacgctcttctatataactctgcatctctctctccttcatgatccgatcttgtatatcagcgtcaagtgcttgcttaagctcctccacaaacttatccaccactaatttaattctcagcgacatcgtcttcgaagcaaattctaactatatacaaaatctcctccttcctcacactaaacgctgctacacataaatacaatctcctccttcttctggttttccgtcttttacttacggcggcgctttaccgacggcgagattccgatcttttctcgttgaagcttgcgtgagaactgaggaagaaagggacagagacattcacgaccttttgtttttttttccgctttctaatcttcttcagagtgggaaaaataaataaaagcgggctcttattgggcctatattgggcctgtacttaacataagtcacacgtgtggcagcggatttttggattacacatgttaaaaacttaaaattagggctttgtgtttcgcttcttctcaaaccctagaagatataattgagactggcttgcttagccgcggagaactcagaactcattcgctgcaaacatggttcgtaatcttcgtctctttctctaagtctcgtattcacaagcgtattgcgtcatgtgtttgttttggttttggatagtttgtctccatctgtgaattcattttgtgcgggattataaaatctctctttgtaatctagatagcatttccatgtaattatgggtaattgttaatgtttataaagtgaattcctttgtgcgatctgtaaaatgggttagggattgatattgagatctcaaaagataggactcaattagtcagatatgaaacctccctggcgttattctcttgttctgtgacttgaggtcttgagtgatgagacttttagtgattgagctattataaacatttattgtgttttgatttttatttttgttcgatattcttttgcaggcaagaggtttgaagaagcatttgaagaggctcaatgctcctaagcattggatgcttgataaacttggtggtgcctttgtaagtttcacttgtgttggattgaatcttattagagcttagttttcgtttgattcggtgcttataatgctatttctgtccaggcccccaagccgtcttctgggccacacaagtctagggagtgtttacccttggtccttatcatcaggaacaggttgaagtatgctctgacatacagagaagtgatttcgatcttgatgcaaaggcatattcaggttgatgggaaagtgaggactgacaagacttaccctgctggtttcatgggtgagtctgttagtgttgtgatacgttttcagagtctggctatagtccttgtgctgattgatttttatgcttcttgtgatcaatgatctaactaaggataaatatttatttacagatgttgtgtctatccccaaaacaaatgagaacttccgtcttttgtatgacaccaagggacgtttccgtctccactccatcaaggatgaggaggctaaggtttgttctcctaaatctcttacattgccatatactgaatctgtcaaaacaaagtcaagtctttattcattgctctatacttacattagaggtctgctgaatttgcatgttgattaccagtttgtaatatattccaacaagtatcctcttttgttgttgtgcagttcaagctttgcaaagtgagatcgatccaatttggtcagaagggtattccctacttgaacacatatgatggtcgcaccatccgttatcctgacccgctcatcaagcctaacgacaccatcaagctcgaccttgaggagaacaagattgtggagttcattaagtttgatgtgggcaacgtagttatggtcactggaggaagaaacagagggcgtgttggtgtgattaagaaccgtgagaaacacaagggtagctttgaaaccatccacattcaagactcaacaggacatgagtttgcaacaaggttgggaaatgtgtacacaatcggtaagggaacaaagccatgggtgtcccttccaaagggtaaaggtattaagttgaccatcattgaggaagccaggaagagactttctgctcaacaagcttgatagttaatactatgctctgttttccagtttcagaacaaaccatgctttagtttgcagcttttcaatgagtcacttttgttttaaaacttatcttttcggattgttatgagctatattttggaccttttgcgctattaatattaagtttgaactcaaccttgtttcttcagatagttattgaattgcttcgtagtatttaggggccattttgttaatgttagggtcttagggagatcacaacttctgctaaacaacagtaagataaatgtatcacttaaacatgtggtaacattctgattgatgtttcaaatttccgatctcgatgtcatatttcggtgtgggagacaaaacaaggtttatgggtttgctctagaaagtcttacattgattatggtgcacaagcatacgtgtctgctttaagaatactgaagtcatgttgatatcgttattgtcgctagcttcacgtggtagttgtggcgagtgttattttaaaatcgttagtagaagttgctcaaagattcttctccttggtgacttggtcaaacaaaaaatcctacaaaatgagaagaagataacaacaaaaacgacactgaagtcaatgtcgaaccaagtgcctcggaaatgcaactacagtcaggtatattgattgaaaacaatgtatctcttgtatgaaatcaaacgccatgcatgaatctgttttaagcttggggaaattataagagtaaatcaagaaaaatattctagatgatagaagcatagaacattgatcatgtaacttcatgacaacaagaaattgtcttcgaatcttttttgatggtttttctacattcaagttaaaaaaaatgtcatttgatgtgaaccggttcgacttagcatatggttaattgaaatccagcaaaataagaaaagacttgagaatatctaaagccaaaactgctgaattccaaaagccaaaataggtgttaacttatggtggatataaatataaatcatagagaaaattttacggagattgaataattaatacccgcaaaaggatcgggaaactgaatagcaaaaagacgagagagaatgagattttacttctttataattgaagttatgcgaatgttgtgtatttttacaatgaacggtttatcgttctttatatagagataaaaaaaaagataaaatttactgtgttggcatagtaacatttaaattttaaactacatcactaaataattagctttgaaagaatatatatttctcttagttttttttcttttctttttaagttattattaagaatgtggccaaatttacccaagagttaaaattttgtcccatcctttatattttaaggaaaaaattaatagttttagagattgatttttaccatttcaatttgggggaaaaaaataacaatctaaaagcattgaaggtttgaatttttgattcaaaaagacccaaaataaacgcctcatctttaggttaattttcagaataactattaaaaagtgaataattcttcactgatccatgttggactagtaagtagtaacaatcaaatccataacattaaatgtgttgaaaaaaagaatcaaaagtaacaaaaaccataaccctaaataatcatcccaaaagtggaaataataaaagaagcagttagattgtgacggaggagacaaaatcatcatctctgttcttcttcttctcctctctcacatacgatgatgacccaacaaccttgacgttgatttcgatgtcacacacaacactataaataacactcttcacctatttttgtcatctcacactttggactttggagcccaaaataatctcataaccattaaaaacaaatctcctccttctctccggcgtcaatggaggatctccgtcgtagatttccgactaaaaagaacggagaagaaatctctaatgtcgccgtcgatcctcctcttcgtaaagcctctgacgcgcttcctcttccgttatacctaaccaacacttttttcctctcgctcttcttcgctactgtttattttcttcttagccgatggcgtgagaagatccgtaactcgacgcctcttcacgtcgttgacttatctgagatctgtgctctaatcggtttcgttgcttcgtttatctacctccttggtttctgtggtattgatctcattttccgatcttcttccgatgatgatgtttgggttaacgatgggatgattccatgtaatcaatccctagattgtcgtgaggttcttccgattaaacctaattccgtcgatcctcctcgggaatcggagcttgattcggtggaagatgaagaaatcgttaaattagtgatcgacggaaccatcccttcgtactcattggagacgaaactcggagattgtaaaagagcagcagcgattagaagagaagcggttcagaggataaccggtaaatccttaaccggtcttccattggaaggtttcgattacaattcaattttggggcaatgctgtgagatgccagttgggtatgttcagatcccagtggggattgcaggacctttgttgcttgatggggttgagtattcagtgccaatggctacaacagaaggttgtttggttgctagtaccaatagaggttttaaagctatacacttgtctggtggtgcttttagtgttcttgtgaaagatgccatgactagagctccagttgttagattcccttctgcaagaagagctgctcttgtcatgttttatcttcaagatccttctaatttcgagagattgtctctcattttcaacaagtgagttttgaaagtttctccttttacttagtgatttgagtgttgttgctgacttgtttgttgttctatatgttatagatcgagtagatttgctaggcttcagagtattacatgcacgattgctgggaggaatctgtatccgaggtttgcgtgtagtactggtgatgctatggggatgaacatggtctcaaaaggtgttcagaatgtcttggactttgtaaagagcgagtttcctgacatggatgttattggcatctctggtaaactcttctttccctctttggtgttgtctcgattttcgaaataaagttgaactctttttgattaatttggtgttatggtgttcagggaactactgttcggacaagaaggcttcggctgtaaactggatcgaaggacgtggtaagcatgttgtatgtgaagcttttattaaggctgagattgtggagaaagtgttgaagactagcgttgaggctcttgtagagcttaacacgctcaagaatcttgttggttcagccatggcgggttctcttggtgggttcaatgctcattcaagcaatattgtcagcgctgtgttcatcgccactggccaagacccagctcaaaacgtggagagctcacactgtatgaccatgattcttcccgatggtgacgaccttcacatctctgtttcaatgccttgcattgaggtataatgcatgttctatcttgaaattaaacccattattgcagagaacacaaagccgttagttttttgaattattgttggatccaactcatgaatgttttgtttattgatgtgactccaggttggtactgttggaggtgggacacaacttgcatcacaagcagcttgtttgaatctactcggtgtgaaaggatcaaacaacgagaaacctggctcgaacgcacagcaattggcaagaatagtggctggttcggttcttgcaggagagctttcactaatgtctgctattgcagctggacagcttgtgaagagtcacatgaaatacaacagatccagcagagacattggcccttcgtctcaagtcaacaggtgatgtttggagcacgatgagacggataataataaaacaacaaaaacccataattagatttgatgtaattctaacttcatttgatttcttcttcatcgatctcttttcttttctatctattttgtactaagtctccaaattttcttaatttatgtaaagtcttttgtccttccatctttatggcttatattaatatcatagcttagcatcaaaatgtgtaattaaattgcggtttaagctttaaagccatgatttttttttctaacattgaatagattattgtggcagtgtttgctttgtgatgattatgtacgtgacagagttaggtactactaataaatgtagaaatgtagttgtgaatattgcagacgatggaggagtgatatggtagtttgacaaatgaagcatttgaggcaatgaagtctctcctcatggcatgtgtgtgtatgggtctttgatgatatcttagaaagtaagcagtagagactgtgcagagagctaaaccaacaatcattattgattttaaaccaaagagagtaagagttttattattattgatttctgattacttctcttacaattgaagtaatgaattttatgttacgacaaatttgatcatttatatagacgtaaaaatgtaaattattatgcatgcatagtgacgctgaggctcatacaagttataatttactctcaatattttcaggttgcacatcaattgttgatattttgtttcctcctttgttctaacttttacaacaataatatctcattttgaaaaattgcctaaaccttttaataaaaagttgtgattttgttgcaatttttaatctgtaaaaatgcaatccgattaagtcggaccgtcagatcagtcctcatcttgtttgtttaacggtccagatttaaaacactaccccagtaaatacaaaaccaactgaagaaaaataaataaaaagtaaatttttaaagagtccgacccgggtccctcaaaaaaaaaaaactccgacccgggacaagatccgtatccaacaaacttatatgtgtatcggacacagaagaatactttccacgatcatcagcttctggagatctcttctgggaatcgagcttcactgttaaagattttccttcaatcggctaaaaatggtaacaatcgccactccctttgcttttgggcttctctgttatctgttcgaattttggatctgccttcgatcttgtactattgcatcgagtatctacgatttgatttgatgatgaaattgaatctaatcctccggtatccgtagatttctgcttggatctgtccggttcttttctcgcttacgaattgatcgattatttaggaagtgaaaggattagtttgtttcgtgaagcttgaaattgttatgtttctgttgcccattcgaatctcttgtgagttattaaatccaattcattgtttttgaaccactattgctcttgaagtaattaagcttcttggattcaaatgtaatagggtctaagctagttcatgtacctcacatctctttatttgcctctgtttctgaattggcaaaataagctcgttgatctctccatctttccatatctttaaatggtttaaaaacttttcttgagatgcttgtggcttgcgtttaggtgtatgatggtaaatgattctcaagttctggtacttgatctctcacaattccctcttttgcttgccttatgcaattatgtgcatttcaaatctttatgagttgccagaaatcgtgatatatactactggttttgtctggtcttgttttaattctctttatctcgatgctgtctttgtgattctagaattttctcatgcttgatatgggtgaggagacgtcaaaaactaattaatgtgttatgtattgccattcacaatgatagaataatgctttcttgaaaagaaaaaaaaaaacttctaaggtggctgttttgggttatgtttgtattttcagatacatttcgtgttactagtcagtcgacaagggaaagtaaggctcaccaagtggtattcgccgtatacgcagaaggaaagatctaaggtatgtacagcttaagtgttattgagttaatgccgcattatgctttgcatgcctatttaatcttacatttggaaaaatgatctggacaggtcatacgtgaactcagtggagtgattctgaaccgaggtcccaagctctgcaattttattgaatggagaggatacaaggttgtctacaaaaggtaatagacatattttatataagtagcatgtatttgctactttaaaaacaatggttataaacatgatggttttgtaattttgcagatatgcaagcttgtacttctgcatgtgcattgatgaggcggataacgagttagaggtactggagataattcatcactacgtcgagattcttgaccgctactttggcagtgtgagtaaacgcttatccaaaatatactcctaccactctatcataaccttacaaaacatctagattttgattaagagctgtttattctatgatcttcaggtgtgtgaactcgatttgatttttaacttccacaaggtatacatactcaactctatcaatgattctctactctctgtattttacttcaatatgacaattttcgaatctggttgttttgttctaggcgtattatatactcgatgagctgttgatcgccggagaacttcaagagtcaagcaagaaaacagttgcaaggataatatcagcccaggtatggtttcttaatcctaatgcccactgagacaaaaacgattagtccgtaagggttgtgtaaatgatgttgtgttataatatttgaaggatcaattggtggaagttgcgaaagaggaggcgagttccataagtaatataattgctcaggctaccaagtagtccttttctgaacttttcttatgcagctgaaacaatcgtaaatgagttaatattttccttaaactctgagatattctcttctgaatcacacttttgtttgtcatgtcatgtgattgtttgattgattagaagaaagaagcattcatcgttttgggtttaaaagtagtgattgatctgcgaaatcataaatggtatactattttttcacatatgttacgttttaaaacgtggaatgctgaaatttcatcaagttcatcatctcgaaattataatttgtccgattgattgaatagaattggtttttgagcctgaggactgatgcaccaaacaacatgccagtgtctcgttctttcttcttcaacgtgcctaattttgtaattcgggcgacctaacctcattttgtgtaaccgtgatccgccatgagaggaggtatccgctcgaagagttatcctttctcctcacaaaagcaacgccaatgtcccttttctcactttgccctgtttgctccttagtacttgtttcaccaaaataatctataggatttcaaatacatgaagaatgtttgatggtaacaccaaaaatagtggagaagaaacagacacttatgggcttgggctcaaggactcgaaacttgtatacccaaacttaaacgtgactgcgtcttgttcttaccaatccaataatttatagtaatgataataattcatctttccatatataattttttttaattattgaaattaaaaatgagggaaagaatatccgttttctttgccacaaaaacattttcatttgggggttttcataatttttggttcttcagctcctcaagcttcgataggtatcgatcgtcttcaccatacttttggattttttctgatcacgtttcaattccaatctgagagatcttccttgattcgatttctgaatatatctctgtaattttttttctggttttttctagggttttagtaattttccgatggcttcaagctcagagaaaacacctcttattccttcaggtatatatgttaatctcgattttagttttagaatcgatttggttgttgtttcttcgagtaatatagagaaattgttttcaacagatgagaaaaacgataccaaggaagagagtaagagtactactaaaccagaatcaggctcaggagctccaccttcaccttcaccgactgatcctgggcttgatttcaatgcttttgatttctccggcatggctgggatcctcaatgtaagttctcttttgtgggtgtatgatcattgaatagtcaaaggttggattttttcttgtgtttgattggtttgtttattcaggatccaagtatcaaggaattggctgagcaaatagctaaagatccttcatttaaccagttagctgagcagcttcagagatctgtgccaaccggatctcatgaaggaggtctacctaactttgatccacaacagtatatgcagacaatgcagcaggttatggagaatcctgagtttagaacaatggctgagcgtcttggtaacgctttggtgcaggtacctttaatacaagctctttcggatcttcttgttattattagttagtcaatacttgaggtgtgatcatgacattgaatctctgtttggtgtttaggatccacaaatgtctccctttttggaggctcttggtaaccctgcagcatcagagcagtttgcagagcgtatggcgcaaatgaaagaagatcctgaattgaaacctatactagctgagattgatgctggtggtccttctgctatgatgaagtaagcatgccattatttgctataaattattaggtttacttgtgttcatggctaatagttgattactggtgttaggtactggaatgataaagatgtgttggcaaagctgggtgaagcaatgggtatagctgttggagcagaccagactgttgcagctgaacctgaagaggccgaagaaggggaagaggaagagtctattgttcaccagaccgctagtcttggtgatgtcgaggtaaactgattcatacactgttagtctctcgtgtttctgacggtctatattttatacttaagtcggaatcattgatcgaggttagctcataaactctctgtgcattgatttcctgaaccaaccagggtttgaaagctgccttggcatctggtgggaacaaagatgaagaagactctgaaggaaggactgctttgcattttgcatgtggatacggcgaggtatgtcaacgtctcaacaagccttaacaaaaaaaactgtcgaaatgtcactatcacagaatcatggaaggcagtatatactaccaatatttactagcatcatgcacttgatggataagcagcttcggtttcacttagtagattattacacaattatctgtagcattctttacaaaggaaattgacagttgccattattacatctgcaattagaagttgttataaaagcttaatccgaagtttgaacccagctgacctaggttgagtttgtatgtaggtgagatgtgctcaggttcttctggatgctggagcaaatgcaaatgcgattgacaaaaacaagaacacaccattgcactatgctgctggttatggaaggaaagagtgtgtaagcctcctcctagagaatggtgctgcagtgtaagtttgcaacaacaagaacacaaattcgatttccaaacaacttagtaatggttatataagactcttttaagtgtcgtttcattttctgtttgcagaactcagcaaaacatggacaataaaaatcccattgatgtggccaggctaaacaatcagctagatgtggtgaaactacttgagaaggacgctttcctctgagctgctttgactcttgaaggatatgtttcttctctgtcatgtaatagtgtcacagagtctgattgcaaccttgtcttctgtgggggttttcatcattaaatctggaaaaaaaagatggagaaaatggatgtttattatggttttgtaatgaattattttcttcttgaattggttttttcttttggctcttaaagtcttttttgtccttctttgtgtgccacagggctttagtgttgcaatcacaaagaaaaaacccttaaactgttatattcgagaaggaatagactgtttaatcaaatcggtgataagataatttggagatttttaacatgccaaccgtaaattagaatgaagagtagaaagcccatagaggataacgatactaatagatgagatttgtacataagtaatgtgcagaatggaagtcgatagaatgaaatgcaaaagtgaactcaagaacagcaaagatgataaaacttggacctcaaatcatctttggctctttgctgtttcttttgttttctctcttgaaagtattattgaaaaaacagtaaaaaaaaactcaaaattgaggttacttcaatttaacaatagtaaaatcatcaacacaatttttttttttaaagacatcttaattttctaaaatggatatacaaaatcatatcttgcacctcggaatttggtccaccttagacgtttttagtggcaaaaattcccggatttatgtggattccaatattagtctaggtttcggcatagaattctcctggttaattaaaaatatgtatacaatgttataatttaatcaaaccaacaaaataaaaagagtttgtaaaaatttcaaaatagttctttcaaataaattctgaacagtcttttaaatttatttttagtgtttagtgtgtcatatgtcatatgtatacaaaaacttaatttaaaatttgttattttgagtgagagttttaactgtaaaactaaatatacgattttacaaaaagtaatataaataaattaagcattatttggaaaataatgtaaagctgataattatattcctaattttaaatccatattgtttccttaaagaatatttcaatataattgcaaaaagaaaagaaaggaaatatatcttccgacaatattatctgatgcgcgtgaaatagactatcaggccaagattaggtcaaaaagcccgtgagcccaaaaacctgagaaaacccggttcaaattgcaaaccctcgatttcatttctccaattcgatagacgctgggtaaaaaaattcggaggacgacgaaagagaaaacgagtgtttcagtcactgccccacggagctctcggaaatttgtcttccccttgtcgtcgtctccctatctactgcttcttcttcgttttcgtcttctttatcaaggtgcgctttagcttctcaacgccgtttgatttttagaatttcgatttttttttttttttcttctagttcttgaatcaatccggaatttggcgactatgttgcttcgtttgtaaatcgtattctcctgtttagaaatcttcaattgactgtgttataggaacaatttaaatctcaatttcaatgtctcttttagtcaccttcgtgtagtaatttgcttttgaattactgttaatgaatctcaaaaaatggattttataatttgggaaaaggggcttctgggtttaattaaagaacacgagataaggtctggttttttcttttcatttctttgtgtgtgtttttggtttctttgattttcttctgggttatggtccgtttgagtctggtgatagttagttggcaaccaatttttattgatctattacaatcgagaacacaaaactaaaccctaagaaagaagtacataaagttgttgaaaagatctcgttaactctcccaaagtcctagggctttcacacaaccagtgattaaataacctttgagctgttctccttcccacactttatatgtgtgtttgtggtttgtctaatttgtgaggagcttctatgaaacctctggttattttaattgttttctgcaattcctgattgatatgtttatatatatttcttgtatttgtgaatttgtgtaggaatgctgtttaattggaatcaacaatggagaatttgacggaaatagaatcaacgatggagagtttaacggaaatggagagtgagagagttgaacagggtaccgataaggaaattggaagtggagagaaaaggcaggatgatgtaaaggaaacggagaatgagaattctggagagagagtaggagaggaagctcctgtcagggaacatgaagattctccatgtctcattgttattgaagaaggtacttccctagcttcccttgaggaggtgaccaatgctgatgatctgccgaagattgatgatgagaagaattcccaatttgaaacaagcccgcatccaagtccttctccttcagtagctttagacactgaagaagggttaatcaaccctactgcagaagacactgtagaagagaacatagtgtctagcgaagtaagttcggatatcttgaaagatgacggagatgccgtcgaggttgacagagatactgcagaagtccaggaagaaacggccaacatacctgaatccaaactctcggaggacacaggatcacctcatcatcatgctgatattctgatggtgcaggaaaaagctgcagaagaacatgacatgatagcctctggagaccatgaagaatttccagtcaatcctgataacaaacactctgaagaaaatcagtcaccacatcatcatgctaataatgtgatggagcaggaccaagctgcagaagaacgtgagatcatatccccaggagaacataaggaaattccagccaatcctgatactaaagttgttgaggagaacaatgacaggatagatgagggtgaggctaacaatttgaatttggctggcgatggaagtggagcagtcgatcatgattacttgaccaaaacggagctggacaaagtgctagaggtgcctggttctgagaccatatcaaaactggaggataggccatctgagcatctctcagaaacctcaatgaacgtggaaaaagaactagaaatgcctgccgttgaaattttgccagacaatgacaaaaactctgatgtgttggcagttggagtttctggagacagtgacaatgtggtatctgtcttgcccgcttcccaaacttcctctgatcgtgatgaaggaatgattacagttgatgctgaacctacggaagacatgaaacttgatgttccagattctaaattggttactgatactactgttgactctactaataacaaggatgcccatgttgaggctaatactgaaaggcaagataattctagtgcacttgtgctaaatgatgcaaataatgaaagtgcaccagtgaaacgtgtacctggtccttatgttgcatcttccaatataaagtctgaagcgcggggtagtggagatttgaacaatggagtacataaaatagttcggaccccacctgtctttgatgggaccatgcgcgcaaagcgctctttcctcttggatgatgcgtctgatggtaatgaatctggaacggaagaggatcaatctgcttttatgaaagaattggatagtttttttagagagcgaaacatggatttcaaacctccaaaattttacggggagggactgaactgcctcaagtaagcttgatacccatcattatttggtcactttactgtgttacattttaaaattttcagcaggagctgatatctaatcaatttctttggcacaaggttgtggagagctgtaactagattgggcggatatgacaaggtacgggtcactgtgaatacgcctgttgaatgtcacagcatcttttttgacaagcaaatgtgacttcggcttttcatcttttgttccatcctggcttacttgcatgcgtactgttgttcatgatctagcagtggtgcttttggtgattttctatgattattatatgctttttatactggataggttactggaagcaaattatggcggcaagtgggagagtctttcaggcccccaaagtaagaagaatgcttttcttattagtggtttgtcttagaaattttgggaaatcatgtggatatttttaagaattaccctctaattggtcaattgtttgttcaggacatgtacaacagtatcatggactttccgaggtttctacgaaaaggtgagactatattcaccaccttttcctctctctgcttttggttcgtctatgtgacttttgtatacactggcatgggactgggactctatgtatcaacccttctgagaaataattgaaatgattgaacagtgaacaactgtgaatcatcttgagatatgttttccttaagatacagtaacatcttgtaacattatagtttcttcatttttcaggctcttcttgaatatgagcggcataaagttagtgaaggtgaacttcagataccccttccgttggaactagaaccgatgaatattgataatcaggtaaaattgagaaaaccatatcatgtgtctgtagtttttgtttgatcttcttcttctgattaatgtcagtgttttaacttaacccactgccttgtttctacactaggcgtctggatcagggagagcaaggagagatgcagcatcacgtgctatgcaaggttggcattcacagcgtcttaatggtaacggtgaagttagtgaccctgcaatcaaggtccggtagaatctttttatatgtttcattttacattcacactagatctctcgttttttttttgtcaaacatttaatctatatctcatagtctgaacgaacatactgttttgtaattaataggataagaacttagttcttcatcaaaagcgcgaaaaacagattggaaccacccctggtatgagttctgtttgatgaagaagtgttgttctcatttttattttgaaactttgacatgggttatcacttacatctcacaatgtcatcaggtttgctcaaacgtaagagggctgctgaacatggtgcaaaaaatgccatccatgtatctaaatctatgtacgatttttggctttgtggtctggttttcaatgcgtgataattcacatttgaattctgattccagttgttgtttttcctaggttggatgtgactgttgttgatgttggaccaccagctgactgggtgaagattaacgtacagagaacggtaaaatcaattgccactttcttaaaaacctgagcaatcactttctggttttacatatattaataaactcttccactatctgcagcaagattgctttgaggtgtatgcattagtcccaggattagtccgtgaagaggtaagctctcaaatctcgttgtgtttacatatggatcctaagattgagtttagcactcagtttttgtcttggcaacaataatacaggtccgagtccaatcagatccggctgggcggttagtaataagtggcgaacccgagaaccctatgaatccttggggagctactcctttcaaaaaggtaaatgctggttacatgatttttcagcttacacgtagaatgttgaatgacattttcaaacctccattgaaactgcaggtggtaagtttaccaacgagaatcgatccgcatcacacatcggctgtggtaaccctaaacgggcagttatttgttcgtgtgcctctggagcaattggagtagaaacatttacagtttaacaaagcctttgaagatctgaaagagagaagattgttagaagtagttgttgagagtattttgtttgtatattatgagagattaagcacaacatgagaagagcctttaggaatccttaattaggccatctagtttttattgtctctcctctctttgattagattcttcttctaagtgtcatcactattgatttgttgtagcaccaaacttctttaaacctttctattaagaacacacaaatctacaacctttttattttttttaattgtttatgtgatttgttttctgtggcagtgaattttttatattatcaacttatcatgttagctcaagattgcatctcaatttgtacttatcttagtggtaattagaaaaaaaaacaaaattaggctacaatagttttgtttgtttgtttgtttaggtgttagggatagggtttattttttccgaagtttattagtgtttactatttagagtttaatgtttccaaaattttatggtttaatttatactctcagattaggttaaacatttttatttttaaaaatctataatatttttctaattttactttaaattgtagactaaataattgattcagccttatattatatcttaaactttgcaagaatcactttggcttgtaatgaaatgaaatccactgttttcatattcaaagtgattctagtcttgtattaactattaaatattccaatctttaacaacaaagaaaactataatattcaaagccatgtatataataatggacatggtccaataatttggcaatttaaaaaaatattaaagagaaaagtagattcaaataaagtggtctatatttcaaattgcaaaatgtgttggatctcaatgagccagtcaagattcattataaagtctttatttagcacagcaggaggtttcttacttggatctgctctctcaaatccgccgtctctagccaccgcgttttcttcttcttcctcgtcctcctccgccgccgccgccgtcgacatggaaactcacaaaaccaaggtttgcatcgtcggaagtggaccagcagcacacacggcggcgatctatgcatcgagagcggagcttaagcctcttctcttcgaaggatggatggctaacgacatcgctcccggcggtcaattaactacaacaaccgacgtcgaaaacttccctgggttccctgaaggtattctcggtattgatatcgttgagaaattcagaaaacaatcggagagatttggaactacgatcttcacggaaactgttaacaaagttgatttctcatcgaaaccgtttaagctattcactgattcgagaactgttctcgctgattctgtaatcatttctactggagctgttgctaaacgtcttagcttcactggatctggtgaaggtaatggtggtttttggaatcgtggtatctccgcttgtgctgtttgcgacggagctgctccgatttttaggaataagcctcttgtggttattggtggtggtgattcagctatggaggaagcgaattttctgactaagtatggatctaaggtttatattattcataggagggatacgtttagggcgtctaagattatgcagcagagagctttgtctaaccctaagattgaagtgatttggaactctgccgtggttgaggcgtatggtgatgaaaatggacgtgttcttggaggattgaaggtgaagaatgttgttactggggatgtttcagatctgaaggtgtctggattgttctttgctattggtcatgagccagctacgaagtttttggatgggcagcttgagcttgatgaagatggttatgttgtgaccaagccaggtactactaagacgagcgtggttggtgtatttgctgctggagatgttcaagacaagaagtatagacaggccatcactgctgcaggaactggtttgtactctaacttgtattttttacatttctgcacaacgagttagctctttgaaatcatgattggaatctatcatgagtatctaagggtgcttgttgactgatagtattatgttttaaggagttgttaggtatatcgttaagtgaacaattgtttgtctttttaggataattgttgattgatctgttcaaaaagaggcgggttatcgaaagttggtagctttttatgacgagaccctttcatgttatcaaagtggctggcttttgtatatcatttgattcattttacaaaagtatatgaggcatgcttttggttggatatgtgtttgctgtatgtgttgtgccttcgtttgaggttaaaggctatctacgttctcattcgcatactctttataagactagtagtggtcattaccattttaccaagtacgtgtcttgatagcctgcaagggaaattgaactgtttcaagtgtctcgttataagatctgtaatctaaatgttctcttgctacgatgaaaaagcctgacatatttagctatttagctatttacacttgcatcgtgtgtgtgtgtgttcgttgaactctgctgataactaacgctgaaatcagattgttctcgccactctaaagtgatttcatgtttacttcaaatgtttctcatctgtttttttggtttcatgaatcaaaagttcaactttcataaacaactttatggatggtgcagggtgcatggcggcattggatgcagagcattacttacaagagattggatctcaggagggtaagagtgattgaagaagctgtaggagaaggatccatgataaaatcactctctctccaccttatttgctttgccatttttataaccaataaaggatcagattgatctcatacagacaaatctgaatagaattttgttatttgcatttgtttgcagttggattttgtgccaagttgtaaactctttagttgtcacagcttccaccaaattcatcttttaagatttgttcctcaggtgagaggactttttcatactttaattctctttttatttgattatgtaatcacaattaaaagtggcatatatggattggagtttctagagctcaagaaatatacgaaacactagattttaacccgcggtacaccgcggaactatttattttattaaaagtaactaaaaatatattattttataaattatctatatgtaacatattgttttgtattttataaatatataatcctaatttctatatattgtacaatcccttgattttatcatggaatacaccgtaagtcgatttttaaaatttaaaatttaaaattatatatgatttttgttaagattgtttcttttgtcatatattttaaattatatcattgtattttaattgttagttatacgatttcacccgttgtataacgtgtcgtattactataaactcaaacccgtctgaccatcttattccgttcaatgaaattaaacatatttaatggatttcatcctaggtatactgtctcatattactatcaactcaaacccgtcctaccatctaaccccgttcaataaaattaaatattattttattatttttgttttaataatactttaattttaaatatatataattcaaatcaatttcaaactttttattttaaatggttatttaattgttataatttataaagttcatatattttaatattttaaacctgtcataccatctaatcctgttcggtgaaattaaacattattttttaattttttgtttaaataatatttttattaaaagatttataattcaaataaatttaaaatgtgtctttcaaatagttatttgatttttatagatttcacatttaaaatatttctctatatgtaacatatagttttgtattttataaatattataaacgttttataaactttaaataattacaatatttaccttttaataaagtataatattaataatcatttaaataatcatgtgtagctaattttaagggatttgatttaaagtttgttgtttggattaaatttgaatgaataatgtgattgatatattaaatcaagaattaaaaattaaatcaaataattaagggaaaaaaaaataatgccaatggcatgccattataaataagtgtcaagtagaaaatttatttgctaaaatggttgcaaaaatatatatgtagattggttacttcttcaccactatcaatatttcaacaatgtccaaataatcaaaaacatgaacgattagcagtttcactagtttgtgtttttgcaaatatgtacaagtcaaatgttcttaatatgtgtaattaggttttgctaatgtaactttcattgattaaatgagatgagttacaaaactaaactacactgttcttttcattttgtcaacactcaaagtactacaccagtggttttaaatgatacttttaatctcataagtcaaacgaaaaccaattctttatctaatactataacttatgttatacacgtagtaattaaagaagcactaacataagtttgattctctacgttagtatcttctatgtttctcacctctcatttccttcactcatgatcacaagaagcaggtgtcgaagatctttgttatggtttctagtgttccatggcggagctacagccaccggagctccctctggtgggaaagagctttctcagacgcctacttgggcagtcgccgtcgtctgcacctttctcatcctcatttcccatctccttgaaaagggtcttcaaagactcgccaacgtctgctttcttcttcttcttcttcttttcttacgagtgttcttgttcaaacattcattgtctgaaacatatgaatttgtttcttctcagtggctatggaagaagcataaaaactctctccttgaagccttagagaaaatcaaagctggtaagtgagcatatagccttggttttcttaaatctttttggttttggtttttaaatggtgactgattctacagagctgatgatccttggattcatttctttattactcacttttggagaaccatatattctcaagatctgtgttcctcgaaaagctgctctctctatgttaccttgtttatctgaagacacagtgcttttccagaaacttgctccatcatctcttagcaggcatcttttggctgctggtgatacatctattaattgcaaacaaggatctgagccactcataacattgaaaggcttgcaccaacttcacatcttgttgttcttcttggccatctttcatatcgtatatagtttaatcaccatgatgcttagcaggctcaaggtaccataaattctagttttgatcaaaactttgtttgatatagtgaataagtgcttcattttttgttggatttttggcagattcgtggatggaaaaagtgggagcaagagacattatctaatgactatgagttttctattggtactttgttcatcagattctgttttgtacccctgaactgaagtgttgttcttttacagacttacttctgttctgtggtgcagatcattcaagacttaggctcactcatgagacttcttttgtgagagaacatacaagtttctggacaacaactcctttcttcttttacgtcgtaaagaaaccatttctctcattcttcatctctttcaaatgatcaaaatgatcttcattcgatttattatatgctctttggttacagggatgcttctttaggcagttctttgtatctgttgaaagaaccgactacttgactctgcgccatggattcatctctgtgagtttttttttctaaatcttccatctctccatttccttctatctcaatcttgatatgtgattttcgtgatgttttgattcaggcccatttagctccaggaagaaagttcaacttccagagatatatcaaaagatctctcgaggatgatttcaagttggtagttggaataaggttacaacacaatcaaatcatcaaatgcaaatgaaaccggtcttacataatccggtcgtatataacagttttaacaaattgttttgctctgcagtccagttctttgggcatcatttgtaatcttcttgctgttcaatgttaatggtgagctaaatttatatctttaaatttaaattcaattcacatactgaagtctttctattcaattctaggctggagaacattgttttgggcatcgatacctcctctactcgtaagacaatctctccctctaatacatcttcttgaaagtttcttgatgaacaataagtatttttgcagataatcctagctgttggaacaaagcttcaagcaattatggcaacaatggcgctagaaatcgtagagacacatgcagtagttcaggggatgcctttagtgcaaggttcagatcgatacttttggttcgactgtcctcaactacttcttcatcttatccactttgccttgtttcaggtaattatgaaaacatcttctccttgatttcattcttgaactaacatgttttcgcagattctgtcttcttctagtaatgtttctctctctaaccggtaaatttatttcctctgtgttatgcagaatgctttccagataacacacttcttctggatatgggtaaagaaacatctattcttactttggtgttatagaatgatgttactgagtaacatctattactggcatttgcagtattcttttggattaaaatcatgcttccataaagatttcaatcttgtagtcagcaaactctttctatggtaaaaagcttattcataaacttacttatattatagaggaaaagtatttaaaaacatgtgaggatgtatgtatgtatgtatgtgcagcctaggagctttgatcttatgcagctacatcactctcccattgtacgccctcgttactcaggtaattaacttgtaaacaacagttttcgatcgatattttagtcgaatggtctattgaaggaaagaaaatagagagatgatgaaatggtgtgtggagcagatgggttcacacatgaagaaagcagtgtttgatgagcaaatggcaaaggcattgaagaagtggcacaaagacatcaaattgaagaaaggtaaagcgaggaagctcccgagcaagacacttggtgtttcagagagtttcagcctctcttcctcttcctctgcaaccactcttcaccgttccaagaccactggtcactcttctaacatcatatactacaaacaagaagatgaagaagacgaaatgtctgatcttgaagctggagcagaggatgctattgacaggattcaacaacaggagatgcaattccacaactcttagctgctttagtttcttctgttgttacttcatagttcaaatgaaacgatgctgtttactaacttagtcaggaaactattgtcgtacaagtgtttctttaatgtgttactacgtttaagccaatatagatatctaataacttgtcctaaactaaataactcgcactacatgatcattgttattattaatatagatttatttcgatttgaaaaatcctaacacgacatgatcatgttttcttcttctccttattatatgtgatccgtatcaaatacttaatcattgtttacgtcaatgcttgacattaacaaaattatcattaagctaaacagataaggacgcgagagatagagatagatagtgactaatatttttgaattatttaatgcagtttgagagaaagagacgaggaagaagaagaagaagaagaaaggaagtgacgaagaaagaatgagaagacgaagaaagagaaaacaagatccgattcaaaatatggaaacttgaatatcttcttcttcttcttccttctcctttctcatctctcactttgagggtgaattttgattttgtagaaaatggattcgaaggagatggttgtggaagaaatcatgagaattcacagatctctaccattgagaccagagatcgacgatgtagaaacggcaacttctctgatacaaaacgttgaaaaggaagatcggaatcgtttagaagccattgataaacttgttaaaacctcttcctctgaggttcctttagagcttttcaatgtgttcaaggagatgaagaaaagtcttgttcgtttccagagcacagaacagacaagagaagctacgaaaattctcgatctggaatctgtacacgttgtgttcgacgaattgattcagagagcttctttttgcattgcttctcccaacagcaccaccgctttgcctcggtctgttccggtaccggcgccggttgtttcttctgatgagattcctttcaagtcaaaggaaattatctcgcgtgacgatacgtttgtgaagaaagctaaatcttcgttttatagtgatgggttgttagctcctagtaagccccaggttctggattcaacacttcatcaggctaagaacgttgcaggtgagtttcatttgaaatgccttttacattaggatctgaagttttgagatttatatatgtatagtaggtaggccatgaaatgttttgacttttagattagattcatatagtgttttcatgtggttttgtttgcttttcccaatggagatttataactgtagtctaatcaatgtttgggtaggccatggaaaaaagtgtttggaattgaaatgtttcaactttttgatagaatctgaggttaagatttatatagtgcttttcatgtggttagtttgctttttcaatggaatctaagcttgagatttcatgtgtttagaatgtgttccaacggagtctgtttgtctctaattgtagtggaattattattatgtgtgtgtaggcaatgatggggagaagttgagtctcataaaacttgctagtttgattgaggtatctgccaagaaagctactcaagagctaaatttgcagcacaggctgatggatcagctcgaatggcttccggattctctaggcaagttatcgagtcttgtcaggctagatctgtctgagaattgtatcatggtactaccggcaaccataggagggcttatttctttgacgaggcttgatttgcattcgaatagaattggtcagctccctgagtctataggagatttgctaaacttggtcaacctgaatcttagtggaaaccaattatcatctcttccatcgtcatttaatagattgatacatcttgaggaacttgatttgagctctaacagcctctctattctccctgaatctattggttctctcgtgagcctaaagaagctcgatgttgaaacaaataacatcgaagagattccacatagtatctctggctgttcttccatggaagaactccgtgcagattacaacagacttaaagctcttccagaagctgttgggaagttatctaccttagagattctgactgtccgttataataacattcggcagctacccacaacaatgtcctccatggctaacctcaaagagctagatgtgagtttcaacgagcttgagtcagtaccagagagtttatgttatgccaaaacacttgttaagcttaacatcgggaacaattttgccaacctaagatcactcccgggattaataggcaaccttgagaagctagaagagcttgatatgagcaataaccagatccgtttccttccctactcttttaaaacgctttcaaatctgcgtgttcttcaaacagaacaaaatccacttgaagagcttccaagggatataaccgaaaaaggcgcacaggttctttcttaacttcagttatttttgtcctccttcgacatatgtgtagattatggagtttgtcgtttgtgtcactcatgcatgattaattcatgctctttactatatcatctcaggccgtggttcaatacatgaatgatcttgtggaggcaagaaacaccaaatctcaaagaactaagccgaaaaagagttgggttaacagtatttgcttcttctgcaagtcctctaccaactagagaaaacagagcagcatggagatcctctaaaccactctgaacaaatccgaccttttaatcgtcaggtagatttctttcttagagctccaaagaacatggaatctaaaccaaaaaacctaaatttcatttcctgtttcaggcaggacagaagaatcccgtcgtctccagacagttcaccattcattcttttattcacaatcacatgattcttcacacaatttcactttactcttcgtcgtggtgtttgtttatacctcaattatgactggatcctaaggaaaatataattgcatttgttaatctcaaagtgattatattcttgtttctctaactaaatttttgtttcttttgatgttgcatgtattgattcaattagagatcacgtccacgaggaaaaagatatagtcttcacatgctaaacatagttaaggttaaatatgattttacttacaactaaacaaactagattcactcataagttgatatatattcaaggattaacattttaaatatatatatcaaattactaacaaagttaaggctaaaccaaggtcagatcatcacaaccttcagctacttagtttttaaagggtacatattctgtcttcattctctgcaccaaatcacatagtttcttcctatgaaactccactttagtttcttcctgcatatcgtccatcggcgtttttaatttctttcaacaaatccattcgaggagcactatacaactgaaacacgacaaagacattagaggtcatcaagcacaactatgtacgtccttttgaaataaccaaacaatagagattcattaacaccatttcttgcttttacctgccctagatagtccaacttcttttcctttcctttcaacacatccattcgaggcgccctaaacaactgaaacatgacaaagacattagaggtaatcaagcataactatctatgtcctttcaaaatcaacaaactagtatagagattcattaacaccaattcttgcttttaccttccctagatcgtccaacatcttttcctttttttccaacttaaacattagagcctcacaactctgaaatatgacaagacattacatgtcaaccatgactaatttcttttcaaaatcaaactgttaagatccattatggcttttttttcttttacctgaaccatttgtttcgccatctttttcattttttccacctcagccagcttagcctcatacgtctgaaacatgagaagacattacatgttaaccataactatagttgtcttttcaaaatcaaacaacttgaggtgcataacaccatttcttgcttacctttattatggactctgcttcagccaacgcctgaaacgtgagaagacggtaactgtatcctttcacacacacacaaatgaataaaaaaacaatttcttgcttacctgatgagctttttttatttttttatttaaattaggggttaaagcatcatctgaaggaaagacaataaacacattgatgaagcttgtttccccaaaaagtaaatcataaactaatcaagaacctttaaagccacatacttgtgaagtatccaagagcaaatattggtgaattcgcaaaagctctcccaaataatcccttcttctggtgataaaagacaaatgatgcaattattccccattcaaatctctctgttcatagtttatcaagatcaagcaaaagagccgaatacaaaaacaaagaaacaagcaggagagtgtacttaccatgatcttcttcttgaccacctcctgaaatagaaattttagggattctcttagcctacaatgtatatatggaaataaagtatcaaagaacaaattcactataaatgtaattacagggaactaaaagttgccagagcagatttcaatcaaaccaaaaacaaaatcattataaggaagtaaaaaacaccatgagcatcacttttgcattgattattggtctcttaggaaaaaaagtcagaagctttcaagcattagcgatcttacgagtcaaaaaggctctgcaaaaaccgtaacaaaacccctaacaccaaaactccaaaatcaaaattcaccataaatgtcattacatggaactagaagttaccaaaacagatttcaatcaaaccaaaaacaaagtctttctcgatataaggaagtgaaaaaggaaaaaccaccaagatcatcactttttcactatttcttgttctcttaggaaaaatttgggaactttcaagcattagcgaacttatgggtcaaaaaggctctaaaaaacactagcataaaccctaataacaaaaaccctgacaacaaaatcagacagaaagaagagaaacaaacagagaaacggcattgaatgtaagaaaggaaaaatgggtaagacctagaagaccaatgcgagatcgacgaggagatgctgctatagtcttagattttttgagaagacagtagtaacgcaggcaaaagttcggaaagttcttcttcagtacctttttagtaaatggaaaacaagagagacgaagaagcaaaccgggtttagtggaatttttttacttaaaaacaatttatttcggtttggttctctcttgttggaccgtgtttgttggaaaggcccaggaagtcgaaaagcccaaaataaaattaaataaaatggctttatgatcatatgcgagtatgtgactgtattgagaaaacattacaagatctcaaccaaccataagttcagacttcagactaatctcattatcataagtgtaagtaatcttgaaaatgtgaacattgttaccttttagatccatcgagtaggcatccagaaaattgttgcctttagatcaatcgactatggatcttacttcatttgttgccttttagatattttaggtagctaaaatttgggttaagatagttggctactaatagtactgtaagtacatatataaaggtatgtttgtacgataacttatataataagtctatgatccagaaacttgactgcaaaagagttataagcactaatcaataatctactcttcttgtaaattagatttgttggaaaacaaacaaacatgatctcgaaatttgaactccatctgagatttgattaaatacactggattacaacaaggagaaaagagagaaaaactttaaaagatctctctaatcctaattaaactcactttacataacttttatgcaattaattattgccataataaaacaaaaattagtgttaattaaggaagaaacgtaggaatggtagtagaagagtgttggtgatgttgatgacgatgagcttgatctttcatctccgccgtagaagcatgaccacaccggtcacatctcaccggcgtaagaatcctgcgacaagaaggacaagaagacctagaaactagccatttgtcaatacactccacgtggaaagaatgaccacaaagaggaagcactcttatttcttcaccgtcggcgaagtcagtgaggcaaatagcacattccgtcgagtctccctcttcagcggcggcgccggaggttgattccgcggcggtgaaagtggatcttggaagagactgaagagctttctttttcaagcctttgttcggtgacggcgaatctcctccggctgtaaaccgccggagccaagcgcatcgtacgacggcggcgagaccagcaacgcagataagagcgcaaagaagagccgacaagatcaccaccatgtcggattccgctgcgatcatctcctccgacggttgtggtggtggcgccgccgtctcaagtaatcttgacggtcgagtcattgctttttgagctttggagacttttctttctttgtgtgagtttgaagacaagaaaatgtgtggagtgatgaagataagaaagaatcttgatccacgttataatagagacacataaaggatacatacattatgatatacatctttacttatataataatattgcaaacaaataagatatttgtaatatttaatatcaaatctgtatgataataataatacacgcagaaaagtttggatgaagggaaacaaaattagtaagtattattatttggttgtttattcgaagttattggctgaattagtgtttacatgcaatttgcatctcctatttagagtattgttgtttcgtgtggacacatattctgtttaaaaacaaacattttgctcttaatggagatgcatctatctatctccaacttcttagatcacaaaccatttttttcttaggattataaataaataaaaaagtttattttcttttcttgggtgtgtgtatgttcaatttttgttatgaaattctcttatgactagtcaactgatgttgagatcatgatgacttattttgattttattctatatattaaaaatatttgttgtatgttatttaaaattcagatagtgagagagatgattatattttttgaaattggaaggaaacttggagtaaataatataagaagaaaagatgggtcggtggaggttggctttataggttctgttttgacgaacacattatcaaaaggtataagtaagctcttttctcacctaaacggctaaacctaccttcgattagaccattttatttttaattctcttacatttatttaaaaatattttggataatatgattttctatcataataaataaaaatagatggaaaaagacaaatgagagatcaaattgtggaaatagtatgttattttttaataacaccggccaatattagcttattgcacttttatttcttaaaatatttttaaacattctagtttcttaatatcagtttttttttttgaccagccatttaaccgaccattattagtatatacgatttatttttaagctagaacctcgaaattcacattttgcttctaatgtatttggtttttgtttaaatcgtcttttaatatattttggatcttgtaagttttgtttttgtaagcctaggtgagatctggattctaaatctattaccgaaaacagaatctttgaaagtggatcaacgtgtccataaatttggtagcgatgcatatattataaatctaaatactgtaggatacaatttgacacgtaatgtattggtgaattttaataggaattattaaaccgcaggtacacgtctattctatatacttttgatattcgtcactttaaatatgaagttcacacctcaaccacttgactcttttatgactaaatcaagctctaaaccgtgtctaaaccgtgtctaaaccatatataaagtcaatctcaaattctcaataatcattctctttacttataagtttataccaaaccatattggttcaaacatatattaattgtcacttggaaccaataccctcaacataaacttttaattactagaccatgcatgatgatttttttaataagaatatctatcaaaatatattggtttgatatatgtacctttaaaactaaatgatacattagacactataagatataatatattagcatctttttgaaaatgtcgtcacttgtttataaactgataatgttttcctcttctgttagcattttgggtagctcataacattctataggaaaagaaagaaatacaactttaaccaactctagtttgtgactttagcagtataaggacacccgaaatggaatctccttagctaaaatgcttttttaaacgtctctttatctgaatgcaagacatgtgaatcttactaaaatacaaagcaaaagacaaaactaaaataaacgaaaatcaataatggatgaaagaaaaaaaagccgttttagccaaagttttttggtttcagctttaattggtcttggacagaagagtttatgtaacgttaatagcttttaaattgttatttgaaatgttttcatatgttatgctttcggagaaattctatcaaattgagtttctattaaatctccttaattatgaaaactgggtgcacatgtgcttgtctgtctcttcgactttattttttttgttaattaaccaatctttattgttgttgtgtttaaagtgaaaatgccttttagttttaagttatctgtgaagtaccaatcacagggattttgtaaggaagccttttatcatcttttagatatcaaaatgatatttgtatatcccatgtgctcccctctctgtgcatagcctatccatcaactatctcaattatttagcaccattataatttcatatataatgcccagtcccaaaatatagacaataaagcaaagcgaaaattatgtttttttttttcctatcataatactgaatttttatgtttctctatcttcaacaaaaactttaaaaaaaaaaaaaaaactttactagatagaataagacgctaattaattgatcatttgtaaacaatgaaattagtattgatgctttctctgtttattttcatttttgtctgtttatgtagtttaatgcaaatttttgattttcttctgaaaattagtgtacatatatatattttagcgtcactgtaatcttatttcaattataaatatctggtaggggatgttattattttatgtatctatagatagagttataaagatagaaatgttatgaagattctattgttattcaattaagttttttaaaaaattctaccaaagtttaatgttattagtttctgtatttataaaaaaattgtactcttaactttttcataaaatctaaatttattggattcataattttgtacggtcaataatatttgtgtgttttcaaataaaatgcaaataattcattctgtcattatgaattaaaatattcagttatttttttattaattctacaatcccgattctataaaatattctctgagttcttttaaaaaaaaaaaaaaacagaaaaaaatcgagttgagcttcgcaatgagactccgctaccctatggtttttttgtcaaagcggaaccgcatgatggaggcccacgttttctccttaagagatgtttgatatgaacacaaattcagtcacaagtgctaaatgcaaaatcgtacacgaacaagagaaatctgtagacaatgaaacatggtttgggaaaaaggtcaagaaatacagtagtgggcaactcttttcccgagcaaaaaaagttttaaagcattattaataaaaatagaattaattgtctgaataaccctaaaaaataagaaacttatacaaacaggcatttgcgtaatgacttatagaaataggtacttttgttcttgcgaaatgacggatttaccctcattcatctacaataataatagctgagacttttgagaacgacatccatggtgaactcaggcaatagaaacgacggtgtgtttttttaactcagcctctgcatttttgttgtttctattatctacaaataaataataaaatcaaacgaaagcaaagagaacgagaaacagagtgattcaaagtggaagattcacagataattcacaatgaatatcatttccgatttcgattttgcaaaataaaaaaaaaaggaggaaaaaagctatgaagaagtctatgctattactaattcctaccatataattttcaaattgggtttaaaattgaagatgaattagagactgttattcaatttgtaaggagtaacataacaaattagagttcaagttaaatattttgggaaaaattaattgatttggtaagtggctaagattggagtccttgggtttcatagatactatctttttagggtatagatttcttctatgagaacttgtttaatgggaaccatcaacatgattaaactagattttaagtttctagaaaaaaatgaagaaagaagaagaacacgatggagaagaagaaacatgaagaaaaagtaaaacacaagggcaaatctgtcaattcgcgtgtatgaaagttccttttttcaaagcccaacatgaaagtggctatattcaaatatttttcataaaaagtacctatatcaacaataaccccataaaaatattctaataacacaatgttcttgttttggcaaaaatgtaggataataataaggataatttgcaggccacaccctttgaccatgttttattttcagggattggcaaagtcaaatgtggttttcacgttttgtcttttcagctgaaatttgaccattttacccttgctgctacagttgagaaactattgaatgtacggtttagttagtcaggtttagttaggtacactgttccggtttagttggagatatttttgtttcactttgaggagtgcggctgtacagttagaagggagattttttcttttaaaaactaaatgacatcaacatttaatggcccaaaaagtttagacgtgactcttgtcacaattaatgcaaaatcatcattacatgttataatattataaaattattgataataattgttgagttaaagatgaacccagaaacaaacattaattgctaacgtacattgatgttgaagatgtgttgatcttgtttatttacgaagtttggggtcaagacaagcattatcgtgtaagtaatgaagttttaaagattttttttgttataatacactatgatcttcattgtgttcgaaatcaattttgtttttttataaaaaaatccagaatttttttatttctaattttgttggttgaaatggtaaatgtgtagatatttatgtttataagtgcgtataacgaatttctatttgtttttgtcgatataatcatgttttcagttgcatttattgggtttctcctgaatttatgaagcagttgggtaatggataatctcgtatttactatggtcggtgagtggagatacaaagaagaaaaatggaaatttgaaccagaggaaaacatgtttggtcgctgtgtacgtgttaaggaaaacatgacgtacacggaatttgtatgtacactaagcgagactttcagtttgaagtccatagatcaatcccataattagttactggatacgggagagatgttagtgatgatagatactaaacgccctcctgtctacattgacagtcaagtgagggtgggatacgattttttttattcgtggtgggtatccttctctcaacttgtttgtctctttcattacaaccgtcaagacactcgggaataatgtctctaggactcatggtgacgatgctgaaagtgaccgtgtgtgtgatagtgttttaaatgttgatgaaaataatgaggccatagattagtaagacgagattgaagacgataaaacagatgaggatgaagatggggggacaacgaagatggtgatgggtatgatgattatcagggtgacgatggatctatgggggaagtaccatcgatcctactattgatggtagtgaaagtagtggcgaagattatgattacaacaagtggaacgatgaaattgtagaagaatatggaatagggaatgttgaggagaacgtcattctcacacagctgattgttcaacatccaagggaattcagtcttctgttggcagagtgtacgtacacaagtcagcgtgtacctggcggagataacatttctcacccgggtgaccgtacaccagctgtgactccaagaagtatgtgtcaacatggtttgtaccaatgtacgtacactatagattggagagtgtttttaagaacagaaaagtcatacaacaaacaatgtcttatctcgcaatcaaacaatctttttgctacaagcaacctaggtcatatcctacaagattggtgatggtatgcgttgatgatacttgtccatgacatttgactgctcaagtcgtcaagaattcagaatatttcaaaatcacatcgtatgaacgtcttagaatatatctcgcccactgccaatattggtttaatattgtaccaataaaattttcttaataatttaatttacaaacaaagatgtacgtatattattacacatgtacatacattaatttaccaacaaaaatatacgtacattattacacatatacgtacataattttcaatatgaggaacaaatattatttcaccatctatatctatttaattattatgtatgtatggagattattgagatataagaatacgtaataaaatagcttgacttattagaaatcgtaccatatacgttcgactaaataattttgtgtacgtacactgtaaattgaatatacgtacacagaagaaatttaatgaagggtataattataattttccagtcatcttcaacctgtgtatccttttctgcaaacctaattttgcggccatctttagcagttttctcaaaatctcattttttatacgttttaattactatttatatataaatcttgtaaacctagagtatctttagtttaaaaagctaaattgtttgaatctgtgatttttttttgcattttgttcatctctgaaaacaagaaatttcttcctcaattttggagttcaatggagagatgtcgaaatatgaagaagtggataatgaagtttgaacttctttctacttctctttcaaatctctccatctctttcttttcctctttttcttcttctttggtttcttcgtttcagtttttttttcttttttttttaaaactgaaccgtagaaactaaaccgaaaccaactgctgtggggtggttgatcctattaagggtattttggtctaaaaaccattcaaaagacaaatggtgaaaaccacatctcactttgctaaatcatgagagcaattctttttttagccacttctgtgaaaatttctttaataataatctatgagttttgctcaagataatttatagaagattggaaaagcaataaaagtacaatataataatgcaacatgttggagatactttataaaagtttatgattatcttttaagttaagaatcagtgagaatatgcaaaagtttccacgagaaaatgcaatatgttttcggtcatgaatgaaacaatggaaatgtcaaaaggaaaaaccctaattaagggtagggtaatgtgctagtcaagattttacttcttcaccacggcagtgatttacaaaagtattagacaaataaaccggccctaaaccctaagcgagtgatcactttggaatttaattaacgacttaatgatcagatagattaaaattcgttataaaatcagacaacatttactacatcttggtccccttaagattcggttttaacttctgccaaaatatctcctaagtctcctaagtctcatgagtgttgtccataatccttcttgatccactacgttaagaggaaccgggtctctgaaatctgcttttgtgcttagctcctcaaaagcgtttacaaggttctccagccttgcaacaaactcgatgagaagggaagcaaacgtagctaaagacaaagaactcgcgctttcgtatactttatatactgtctcatttaccacagaaccaccaatgaaggacacacttggccatgtctcacggtttcttaacatcatactctctgttgattcccatatctgagattcatcattaccactagctggattctgattgttgctgctactgttggtatcccaaatctgacttaaggatttgatcactttggtctcgtgagcttcttcttcatattcttctgcttcagctttctctttagtagctgcccagctttctgagttcacaagaaggtaggatttactgtctattttcatctgtagctcctctgctgcacgttgaacgtcatttagaatctctcccgggcctagattctccattttctccactttttctccaatcaaacgcagaacttttgcgccttcattgccaactctttgaagctcatgacgaaatgcctgtcgtttctctggagctgcctgtcatataacaaagccccattaatttgtaagaggaataaaatgttcttatatcatgcatgtaagtgtaaccaaattaacaccaaacatttttatttgtctattaactaagggcatctccattggggggtctctaatatagagactctccattaacatataagaaaaaataaaagaggggagaactcttggatactgatgcgggtaatactaaacaatcatattctacacacaagcaaaatccatcaacttgtaacatgaaatagtaataataaggaacctgtatctctgaaagtatgcaaccatgtatcgccatgacggtgaaagcacaatgccttactgcaccactaagtttgacatagtttttccagggatggttaaacgttctgtaaggtccatgtggaggctcccatatggcaaaatcgagctgcgaaaaaagaggaatttcttaaatctcaatgctattaacatgcaaattctttagttgtctcaacttcaaacatatgtaccagagattcttcctgatttgtagattgaatagcggacctgtacccactgtataatggatcatcagatgtttggtacgtgagaatcttcgagggtactctctcatattccacacattgcaagtagccatttacacatcctaattgtttaatcaaccaaaacctgaaatatcagttcaaacccgaaaaggaaacaagggacaagtacataaaatgccaaaacctgaaaaccccgaaactaaactaaaccataaaccagattgcccaccatttccttttcaccgtagagttcatattaataagaaacaaattccaataactttatgttaaaattcataatcaaactaattgtaacatttatttcttaaaccatttgtattcaagatcttcatttcatatatatacacatctataatatgattttacattttacgaattggattggtccatcataaaaaaattccatctttgttttcaaggaccattgaagtaatatttgtttaccttctagggaatttgccacactcttgaaattattggccaccagtttatggagatcctccccggcccatattggaaatatgaatatattcacaaccaaacatgtggttgcaccaacaacaataaacaaaaacctgtaatacgccgtgctgaagaagtctccggtattgttccccgaaaccagaacaatacagaatgtcaacaagaacaccctgaatgcgtattcatatggcttcatggccgggtggagttttgaataactagcaatgaaacctggtaggtcaagttcaaagcgaaaatgttactatttatcttcaaaacctcatgtagaagacaagaagacaaggaaatgcggcaacctgctaggaaaatgcaggttatgatgatggtttgctcgaaatctcttgataaaacagagagcctcgcgatgccaagagcgagccctccagcagatactgtgcctatcgctctgttgaatcctttgaccaaagttgctcctgaaattaaactttgagttagggaaatgaatttaagtcgcccaaagaaaaattatatcaaagctcacaggctacgagaaatttgagcgaataaacgagcaaataaagattaaaatgtgataagcattatgcatatgtcataaataagaattagacaaaacaaattcatgtgataaaaaagcagacacaaaattcaaaaaattattatccaaaaaagaataaactatagttgtatcaatttattaatcttattataactcagcataaagtaactatcaaatcaattcagtatacactaaatactaaacccatagttggataaaatgtatttatgaatttaattttatttaatttttaaaattgtttataaagtattttcaaaacttcataactactgaagtattttcaaaaatacataaaattatttatgaagtatttatgcatttatgaagtattttcaaaatatttatagttggataaaatgtactcaccaagtcaaaacttataaatttaaattaacttaatttttaaattttaaaaactcgagggaaatgaaaattaacaaattgttaaaactaagataattgattaatggcggaatatggaactgcctagtgctgctgattaggacctgcttaatactgtttaattaaaagtaaacaagcaaaccgtttttactccaacgcttaagatcatctccattgccttacctctcatgtgtgtctgaaagactaatcataggaaaaattaaagacattctctttttggatgtctaaaatatctttcctaaaacattttagacatccgaaaagaagaatgtttttaattttaatcacggttagtctatttttaccatggttggtcttggagacatcaatgagagattatgcaatggaaatgttcggagagataatcatgaacaagaaactagaaaagtccaatcaaacaagaaacatgctcgcccaaattgaatgaatagtaagaatcaagaacgaatgaagtacgtaccaacggaatactcgaaaaccacgacgacagtaaggatgccccatacagagtatttactagcatcatgcaacggctctttgaggaaaataacaacggagcagagggcaagagccattcccatcttcaccgcgaagaagatccttcgacgatcggaatgtcccaactcgcacaggtttgtgatcttgcggaaacacatatctgagtattcattctgcgagagaagcctctctctgctttgctgatgaaatggacccattttttcccctaaattactctgaagagaacctttgttgtgtacattaaatagaaagaaacttttcatttgtgtcaatggattaatctatacgtacgttgcaattactttcttttcccattattccattaatgcaatacttcaccacatcatctctaaaaaactttgtaagtttttgaattttacctttttcggttccttatgtgtggacctgtgagtgggtggacccaattatgaagaggttatttattacgcgggtattttatacctaaagtttaggaaaatgtcaaaacaaaagttgcatggttagtgttggctcgtgagtaatgtgacttgtgactttgacattttgaaagcgttacaatttattacatatctatccaccgctcgctcaccattcttcctttcaaggtcaagcctacccgctcttcagttgatatttttcctatagattcttttttgggtctgattagtaattcggtatccggcttactgttttaatgatttacaatacaaaagcgattaaaagcattatcagaaccgtcattctctttttagacttcgaatggtaaccgaaccgtaccgtgcaatgtataatctataaaaacctttcatttaatgaattttttagggaagttgtactgttttaagttattcgtagacacgtttatcttgattaatgaaacacttagcatgtatagtacaaagatacacatgcatgtgaaatggacaagttattaaaaaatcattaacctactgtaaaagttatttgtaagaaatttatgccctcgttttgcttgattaatgatatacttcttctgcaagcagatgactagtgatcagtgtaaaaactagatgatccctcgtttaatctcttgtccaatttatctattcatgctttaatcgcttccgcattttaattcattaaaagtttcgctctacacaattttctatttatctaatcaacaaaaagaaaagtttacagaaaatatcgtggagagtagatctccatgagttaaacgaatactctcatagagacaatacatcaatccttagaaagccactcaaacgcagtacatgtatagcccatatgggcctttatgcatcaaacgtaatgcccatcgaaaatacgatgaattaactaaaagagacttttaagacaaccgtcacctaagccttcactttcccgaatgttcccaagaagaagttgtcacctattgacaacaggtggtggttacaccctttcagacctcatcactaagtgttcatgagtttatagtttaagagtttttggtttttgttttttaaagtgtttttttttttgtgtttttcttttttacattgttcgtttatgttatgttgttattcagtttttcataaatattcaaagtttctcattagattgattgattatgagaatgccaatgcaatgatgtttagaccagttggccaatgggaggcagccaaaattttaagcagctgataagatgtgttacaaaacaaaaaggcttgctcaatcatgtggcctataattaacttcttaattaaactgtggtttgctaccactcatctcaattcgactttagtttaatattggttaagtagaaaactgaaaaatcaaacaaacgttatgatttatctatataagagaagattggtttagaggtaaacgtgatttttttttttgaaaaccctaatgaatttagggttttggggtatgaaatctatataagagaagattgtaccgtttcttactttgggagaaacggtacaaaatgatgatgccagacaaccaagttttggggtatgaaatctatgagcttagctctgattcatggaggtttcttgatgtcctccctccgactgctttccatcatctgctaatggtttgtctttgaagggatcggaaatgcttattggcttaaaaggtactgcttacacagttttgattttacaaccgagagatttatatgaacattttactgcttaaacatttttgtcttccgccatttctgaaccgtgattatatggctctatcagttgatagagaagaaaaactctcactgttacatcggattgatgaatcgaagatggagatatatgtaaccaagaaagtacgtagatactgatgaagttgctttgttgtggagcaaattctctacagtggatttacccattggtggtaatggtttcgagctttacacgagtctattaattgacgaggagaagaaagtggccttatgttgtaacagatatttgagaaccagctggaaaatcgtttcgagctttacacgagtcttttaacctttttactaaactgattcttaatatttgtccctcattttcttcagcctattttaattaatatggtcatcaatacattactttatcgccacggcattgatttacaatagcattagataaatgaaaccaaaaaaaaaaaaactctggagtgacacatctttactacgatggttctttacttggcgcaggcttaactcgaaaagaagtctttacttggcgcaggctacaccttcacaatcctgactagtctcaccggtcttgagatgattcattactcggagcaggcttgacgaaagagaactctttagaatcagtttcagtgtcacggctagtctcaccggtattggtcttatttggttcaactttcacaacaagctcgaagcttggaggagatttgggaggagtcaaagcttcattatctgtgtcgagatccgatgtttcagggtcaagtccttcgtatctcatcgaatgtggtgtggttttgtaacgctgcaatgaacgtacagacgaagtagacctaactgtcgatgccgtagggctcgcacttccatctccacctagtctcttagtagtggctttcacacctttcttcttcttcactgccattctccatttcttgagtgcttttgacgtttgttcatcgaataccgattttttcatccgagaacccatctaaaagtcacagagctttcttagtttacatatttaaacagatatgttcagtttcagtagcatatgaactaaggaaatttacctgagttacgagtgcgtaaagaggaagtgtgatgtagctgcaaagacacaatactcctaaactgcaagagaaaaaaggaaacaagattagtatatgatcatgttgtgtagagaatttcaagattagataacacttacgcaatcgctacttttacaagtgcaatcttgaaattaggatggtagcaagaatctgatccaaaggaatactgcattacatcaatggatgtaaacagaggattagctactcttgtaaccaagaaaatgcattaaaaagcaaaggaaaatctaaagtgttacccatatccagaagaaataagtgatctgaaatgcgttctgcaaaataaaaacacgatttaagaaaataatcgaaacagaaaagagaggatttgttattgtgttgtgagattttctctgtttattaagtacctgaaacaaggcgaaatgcatgagatggagaatcaaatggggacgaccgaaccagaaatactcatcgttgccttgtacaagcggcattccttgaactaccgcatgtctatctgtgataccaagagccatccttgtcataatcgcttgaagctttgtccctacagctaaaatgatcttgaaaacaaaaaaacaaaactagtttgtcaaaaactgtgagtccttaaagatattattatttggaagatttcaacgaattacgtgaaagataacttacaataaccggtattgcagtgccgatgaacatcatcttgaagcctgaaataccaagcaagaagattagaatactgtccattgaacaatgttttatacacttagatactcaccgtcaatatttaggaggaggaatagcacaaaagatccccacaagacagggctgcaataagacactatcattagtgttgaaagaaaattattcaatgtaagtaagagagtgttataagtttacctgactccaacgactaccttgaaatcatcctccaacgatcttttaatgtatttttggaagttaaattgacttcctggagctaaatgaaccttcataaaccacaacaaagagactcagcaagatcaatactatatactaaattgacaaatggacccataagttgaaaaaactcacagcgatgaaaccatttctcaatgtcaaatagtcagttctcccaacggatctgaaaaactgtctgaaaaagcatccctgaaacatattgtattaacccaaagtgagaaccaggttaaaaacagttcccaactgtatttttgatatgtgtaatgtgtgttacattatctagagctgactaagaagagaatagaagcaagagggtgatgattcttacaacatagaaaaagaatggaatccgggtccagaaactggtgtgcgctctcacaaaagatgtttcatgagttagcctgaatctggaagtgtctataaaaagcaagaacacacagaacacagagtcactaaccagtgccaaagacaccccaaagatttcgaagagaaactataagaccagatttaagatagagaagactcaaaggtcaaaggtagtgcataagtatacctgttgaaaactcgtaattatgggatgatgtctcattctcccaatgcttccatccgcgaatctgaaaacaccgattatctttaatacaaccaaactttccggaaacgaaaccgagatgttgaactataaatttgaaatggtaaagtaccttcaaccttccaagcatcatagttaagaagctgtaaagaacgtggaaaatggctaagaagaatataaggatgtgcaactgatggagtgcctcggcagagataagctctacataaccctaaaccatcattaacatcacacgcattgtatcatttctcacaatcttcggatcagcaagacaaatatgtgactgaatgaaaaaacagaactctcacctccttcgtgcatttagtgggagatgcttcacctccagataaaaatctgtgctcaaacgacaagagtctcctgtgactttcaccattgtcatcatcctcctttttcaagttaggagcaggacacgggagcatcgtacgagcaacatgtgaagggatacaaatatccaaaatgtaggtttgtccaaatgtcagaagcaaagagatgaatccaagaaccatcagctctgcaacacaaaagaaacaattcacatcacgaacttaatgttctgtcaaagcctttggctaagtaagcacacatgttcaaaattccaagtaatcagaagaaattttcacctgctttgatcttctccaaagcgtcaagaagagctgtcttgtgccgatcccatagaacctattaatcaagaacaacttcttcacttcaagacaaatttgccaattccaacattaacataaacacaaaatctcagacaaagacagtcccttttcacaaatcaaacagaacccatctccaatataccctcaaattcaacacaaacaacaaaagtacaaagatttagcaaaaacccagaaaaaaaagaacacacctttccaactttgtgaagaagtttttcaagaagaacagaaacaacgatgaagaaagtacaaacagcagcaacagcccaagtcggagtttgattaagctgtttatgtaccactttcttctcatcctccgccgtaaccaccgtcactcctccaccgagaagacaccagagacagagacaaatcaaccgccgaagcaaagaaccgtcgatgattcccataactccgcgttattttagtttggctgtacctgcttcgttaacttaatactgtagaagtttgacagagtgatgagctgtctttaattcacatttgcggaaactcttactataggtttcttggtggtttcacgcggttacaagaaaaagactcgaactttgtacctatttcgagaaacttagatcaaatggaataagaagaagacgcaaaagtgaaatctgtctactgggaaattgtagattcctaaatctttagattgatgatgattaatctttttctctttcttttggttttacgataaaatgactaaactctttatttattgtcatttatggtttttaggacagaggaagaagaaagagagaggagagtgcgaattaaagcgcgtgagatagttttttaaaaaaggttgaaagcagtgaattgtggctttgattgagaaactgtgattgtctttgacttaagcaatatcaatatttggaaactataagaaaatggatgttttgatacatacatttttagtagtttttgtattcgaatatgtaactaaatttcgtaactttggattcttagaaatttgattgcatatcgaaattaataaaatagttatttaaaaaaaaaacaatctagggaaaaatgatgtgtgtgttaaatgatacctctatttataggaaaaatatgtatacaattatataatttaggaaagaaatattttttttttcaattgaaatactcaatgcacttaatacagaataaatatttttattttttgataggaatagagaataaatatttatatataagactaaatatttgaataaatgtctttggtaaaaagaagtatataatgaatccaaaaatgaaaaaaagatgttgatgaacaaaattatggacttgccacataacaacaatgactctcttttaatatataaactatttgtattaagttaatttttattgaaaaatatcatagttaacaagttcttaaattcttaaaaatgttttactcgtatgtcaaatgattcatcaaactattttaattcctttcttctaccacatatgatagagcaatttccacctttagaccttgatcatgtctgacatacatacttttaacatatgtgacgcatcacataactactagataggctaagattgacatcatgctacagccatcgaaaatatgtaaaggagtcataactaacgcgattcgatctagcatctagccattacataataatataataaataaatccgtgttagataatcttttttatacaattttttctcatttatacttttaaatcaggactggtataaagttttttaaagatatgaaataagacctaattttttgaacagtagaaaaataagatcaaaatatgatagggaatctcacttctaaggaatctcaaaattgatggctttgattaattgtattttgcacaatctatgttatataacttcaacaaaatcgaaagttttttcccttaatacagtatgttttgctagttgatctacaatttaatttactttcgatacttatgagcaatgaatactaggttcgattcataacacaaaattgtccagaaatttaagcggttaactggagttgtaagctttttcagaatagtacaaaattgtataaaagatttgtaagagaaaattgtacaaaaaaaggtaagagtaaaaaaatttgtaccgtatttgataaaacttttgtggttgataactgtcaaaactattcaaagtggtacctctttgataagggcatcaccctaacactattttagtgttgaaataacactttatttggtgtaaatttagcattaatttttttcccttctctaaccacaacaccaaaaatcacactaaatataatatcctctatcattatattactaaattaaaaattatccttttttacttattaattaatataaataaaaatcaaaaatcaaaattgtacaaataaattacatcatactattagtctatgccgaccagaaatagtcaattaatatttcaaagtttaatatgagcttcttgatctttaatttgtttatgtcgagttaaaagttctatgtttttaatgattaattaaaaaatttatgtattgttaatcaatttcgtacttattttaatattttttctaattataattcagatatttaaaactaaaaaatacaaaaataattttgatacattgttttttagttacaaaacttaattagattattaaataacaatacaaattatattttatctactataattagataatttttttaaatatataataaaatgaaaaggaaaaaagaataagttttttaattatgcagttgttacagtcacacaccaaaaataccatttggttggagacaaaaaattaacattgccacgttaaaatagcgttttgcctttccgttggacataacctaatggttaccatttaaacctactatatggaatttcttgaagagcattttaaaatcttatgtcgttaatattaagaatactcatttaatctcttcattcaggtcataattgtattactttatggctacgaacagcataaagatagcagaaagttagactgttagagactgggaaagactattggtgttctcctttaaatcctttcttttttttttgctttctatgctttattagtttatttgatatcactttctaatttgtttcacattctgtctagaacataaatctttagcatattttggctttctttttcatatttcttaatcaaaatctaaaacctctttctgacaaaatgattatattgttagtatattcaaatcagttaaacatacataattattttccaaccaaaaaaattattgatattggtacactttattttgtctattcctgcggatttgtggatgtcttatattgaaagttttggtaatgaaaaaggcaatgttgcttttgtctttcttcacctaaccaaataaagtaaaacaaagcattgcatgttgataattacgtcaacctcattttgataataggacatttctaaatttctatacctgcctactgatacgactatatggatacgagtctgagtgtatgactatgagagaaatatatatatatatatatatatagtggtaaaatctgattattgttttatagaaaatgaggggacattgatgaagagtaaaataaatgaccaaatagaaactggattttttttttattgcataaacttgttttttttttttcaaaatggatctttatttgaaagttgaaaccctttcttttaacaataattcgtaaacttaattttttgctatcgatcttgtttaactttgagtagtatttgaaactttgaatactgaaatgctttcatattgtccctttggagacatccaataaagaataaatcttttcatatatatttcgtaaatatttatggaactcaatattaatttaaatgtattaaatgtgatactgactgatttgactaaaatgagttttagattttttgttatttataaaaattgataaaatacctgctgttgtaagtagaaactttagatcttgcaagcttgcatttgtattgggtacgaaaataaacaattgcgaacgcatgaccccatgctactttaggcccatatggacaatgtccagatagattaacagcaaagaacgaggcgtccattacattcagtcaatattaacccatactgggcctccaatgggcctccaatataggtaacacattttgagaaaaagaatttgcgaaaatttattaattgtcgatttgtttgtttttctctttttttttttttgtgaaccaaattccataagttgttttgattcgaaccaatcttgatgatactcagttttggtctgtaaatcattcctcttcaaaagaaaatattcaaataagaaaacataaggttcaactttttctagaagaaccgagtaaactgcctcacgggtcaagattaacacatattttgttttcatcttaagtgatacgataatatatttttgatttcactactctataaatgaaaaatgtactctatagtgaatggttaaaaatgtaacaaaataagaatcaaaccaggatgatacggattgtcttatactaacggtttagaacttgtatatttttgagttttaaaggatcccaaattgaggaatatactatagcatggagattatttatgctaataaatg

SEQ ID NO: 241 - DNA, 78344 bp, Arabidopsis thaliana
aagcttcaagcaactacaaaagccagtttttggcaaatatgaggttggtcatcactgtatattcaagagacaagttcttacgattgtttaacattcttaatgcttaatactgaaatgagggttttgaaattttctgcattctagtcatgagttgaggacaccaatggctgctgtaattggattactagatattcttatatcggatgattgtctttcaaatgagcaatacgcaacagtcactcagatcagaaagtgctctacagctctccttcggcttctcaataatatactggacttgagcaaggtgagaaattataagaaaaaaaatcttatttagttttgatataggaagaaaaaatcttcaagctttagtattacatctgatgaccttaagttaggcaatgagtaaacattttagctgtttcagctgtgcttttctcgaaactagtatgtatgtgtacagcctaaaaagatcaatcactctaatttcttccttttccacctcataggttgagtcaggaaagcttgttctggaagaagctgagtttgatttggggcgagaacttgaaggacttgttgacatgttctcggtgcagtgtattaatcacaatgtagagacagttctagacctctctggtatgactcggtattatattgtagacagccaataatgaattttctttgcaatgaatttttgcgttatgaaatctcatatattttgctctttttgtagatgatatgccagcattagtcagaggagactcagcaagacttgttcaaatatttgcaaatcttataagcaattctataaagtttacaacaagtaagttttttgaccatatctactttctcttctttttcattacagagatgcattgctaatcataaaaagatggttgctttgcagcgggtcacattattcttcgtggatggtgcgagaacataaattctctacatgatgagatgagcgtatctgttgacagaaggaaaccatgggctccaatgaagacaaaacaggtgcaacacagaaatcacttgcagaagtcttgtaagaacgcgaacaaaatggttctttggtttgaggttgatgatactggatgtggtatgacacttgagttccctaattatatgtcatttcgctatccgcctcatcgatctcccagattctgaaaatctctttattgtgtaaatcttatcttcaggaatagatccaagcaaatgggactctgtttttgagagctttgagcaagctgatccttctaccactcggacgtaagtgatcatgattaactgcacgcagtgaatgtttaagcaaaactttgccgttagttgaatcttatatctcactagtcttatttttcttcaggcacggaggaactggacttggactatgtattgtgcgaaacttggtgcgtcaagttttggaactttagaatagaattgttttatagaagcaattatatgatctgaaacctactttgtaactttacaggttaacaaaatgggtggagaaatcaaagtagtgcagaagaatggcttagggactcttatgagactgtacttgattttgagtactcctgacactgtagatcaaaacatccagccagatttctccaaatacggtctcgtggtaagtaaatttgggaaagaaataatgacgaatgcatcataaattaaagcttatgtgtttgtgaaagtgttaatggttttgaatgctacaggttatgctttccatgtatggaagtacagcaagaatgatcacatcaaagtggttgcgaaaacacggcattgcaactgttgaagcatcagactggaacgagctgactcagatcattagagacctcttggagacgggaagccgtgacaacagctttgattcacagcacaatatatctgatccactgagagcagagctttcaaatatagtagaaatcaagaaccctgtgtttgtcatagtggtggatatcggagtacttgatctcaccacaaatatatggaaggaacagcttaactacctcgacagattctccaacaaagcaaagtttgcttggctactgaagcatgacacctccaatacagttaaaacagaacttagacgaaaagggcatgtcatgatggttaacaaaccgttgtacaaggccaaaatgatccagattctggaggctgtaataaaaaaccggaagagaggcttgtgtaatgacttaagaaacagaggaaacggaagtgatgaatcccacgattgcttagaaattgatccaacacaattcgacacttgcagttccgatgattcctcggagacatctggcgagaaacaagtagataaatctgttaaaccaagcaccttgcactctccagtgcttaagaactatctcatcgatgccactaccagcaatgatgactcaacatctgcaagtatgactcaaaagaacccagaagaagaagattggaaggatcggctgtattcaggaattgcgttggatggaaagaatcagaaatctcttgaaggtataaggatcttgctggcagaggatacacccgttcttcaacgagtagccaccataatgcttgagaaaatgggagcaactgtaactgcagtctgggatggacaacaagcagttgattccctcaactacaagtctatcaatgctcaagctccaactgaagaacacaaatcgttcgaagaagaaaccgctaacaaagttacaactcgggagactagtttacggaattcctcgccttatgacttgatcctcatggactgccaggtacaattacttttttcaattccacatgtaaagaagacatgacaatttattaaacattttctcatggtagatgccaaaaatggatggatatgaggcaacaaaggcgataaggagagcagagattggcacagagctgcacattccaatcgtggcgttgacagcgcatgcaatgtcttctgatgaagcgaaatgcttggaggttggaatggatgcttatctcacaaagcctattgatcgaaagcttatggtctctaccattttgtcactcactaaaccatcagcattccaaacttcattgtccgcttgaagaatcgggtaaaaatctaacaagtgaacttttttagtaggttcaggatcttgcattttgtatatatgtgaatttgtagttgacgatgaggtttttgggggtaaagaaaatcctgttttttggtcattttttgtttactgcaatacgaagaatgttttgtacttaaacattgtatacttgttttaaagatgtgaagaagttaaacgaccaagacaaagtttcgcagcttttgcagcttatgtttcccttgcggaagcaaagttcagacaatgcatgttgtttcgatggtaagtaagagaaaatgtagttcagttgtaaaccggccaaataaaaagggttagctaaaatggcccatgcaggtttcgaacctgcgaccttcgcgttattagcacgacgctctaaccaactgagctaatgggccatttgttcaaattcttcacaagtcagttaaacttcaaaagcgaaatgaagtgcatgttgtgaaatggcatcgtttagcaacatgactatttttttttggaacttatatgttgttctacacgaggtaagaacggaggcgctggctagttgcatggtgaagactgaagagagcagcttcatctttttgagattgctctgtttttgggtttgtttctcttgttttgaggattgtgtgatggatgagaagtggagtttgagaggtttatttataagaaaatatattaaagaaggtaatgactggcatagttgaatgcaaaattctgatttttgtatcacaatactgaaacattcagaacttttaaagacttatatgcatcacaattttttggatgaagtattcaagacaataaaatataccaaattgcaccatttgttaaattagaattggaagaatgagaacaagtaatatgttcaaattagtagacttaagtaaagttgaagtggaaaatccatcatctctgttttcttcaactagtcattgaaatcgaaggaagaatagagaagtggtaagtgcaatattaggtctcagctaaagctggaaactattcatcaataaacagaaataatcgtttttttaaggattaagagagcttatcacaacgaactctggaacaatttttaagcccaatgtgttttcttcttaagccttcactagaagagtggaagagacagagagacagagagagatacgtaagagaagcgtagagaaattacaaaatggagcaggctttttgtgctttgcttttctttttcttctgctttggaggttgaagaaccactcggatcgctgcatcaaatactcctttcacgttctgcaatttcattaaaaaaaagctttgagaaaagctaagtaaagaagcagagtagtactcaaaacaaaagggaaagtttttgtgtcttgcctcttgtgtttttgaactgcactcgatgtatgcgggagctccaattagtttcttcagttcctctccctttgatgcccaaagtggtgaacggttaaaagggttcgtttaagtaacaggctaagtaaattgacacatttcaaagaaaaattctgtttacctgagcagtagtaattggtacagcgccagggtggtcaatgaagaactgtttgtcatcccgaagatctggcatatatgatgaaacacaaaacataagcaccagacgaaactcataactattaaaagtaggtctagacggatcagacagcaggccgaaagttaagcattggtattaaaagtaagaaacagaatccgttacaccaattttggcacaacatcttgtataagccttttctattaggtttataattgctagacatccaacagctgcttacatgcatgtagttgtctcttacaatggaggttaactatcaagagaaaatgtgagatatgatccataacgtatcgcggaattcattaaaaatgatgacgaaacatcacagacaagcttgtaaacctagattatttcaggatttgtgatactccaaaatccaggcctagtttccgctagacacaaaagagctaaaaggtactacatggatatatcttggacgtgaacaaatcaaattagcagacatatatgtcaaaaaacgagcttacctagtttggttccaacaagaactatagggacaccaggggcataatgcttcagctctgggatccactgcaaaacgaagataaagcagcaaaaatcacaaccaaaagactttcttcagagtattcatatcaaaacttgtagcaaacattcatttcaaaaacgtaccttcttggagacattctcataactagccttactgataagagagaatgctaagatgaaaacatcagcaccgcggtaactcaaaggtcttaatctgttataatcctcctgccctgtttacaacaacaaaacaaaagtttcagaccccaaatcccatagctgccgctactactaagtaagatccctattatttagtcagtacctgcggtatcccatagcccaagattcacagtggctccattaacaaccacatttgcgctaaagttatcgaaaacagtcggtacataatcctgttccacatgaatttacaagattcaatgagatacaaagctccacaaatcctcataacaccaaaaaaaaattatggatcgattcatgtattgccacaagctttggtctcatcaatcaatagagaagacaattttgaagcttgtaattcacagaacacagaatatgattcaatctaaggaaggaacattataccgtaggaaaagtgttgctggtgtaagaaatcagcaaacaggttttaccaacagctccgtcgccaacggtgacacactttatgaacctcgaagcgctcatttctcttcttcttccttctccaccagaaatggagctacgtacgtctatgtatgatcacaacaaacaaaattttgaaaaaaaaaaaaaagaatctctaattcaaaaatagcaacctcagatctacaaaacctgaggaaacaacctcaaatataagctctcaaaagcgttttatttttcctttcaattcaccatctccggtacaaagggaacaagaaaaaccctagaaatgtgaaaagagaggaaaccctaaattggaatcggaaatgtgagagatcaaagaagggatcaaagaagaagaatggacgacgttaacaacgatgaatcgaattctagagaacaacaacaagggagagagaaagagaaagtagaagaaatgtgatggccggaaatttatgccattgaagcgttcacaaaacgaacaatctcctccatcaactttctccgattgttttgctttttttttttctcgtttcttttctgttttattttgtttttaaaaaaatttaacctacaatttgttttttttttaaattttattattttttcaaaattttttaagttgatttcgtaaactgaatttctattgatatatttgaaggctgaagcctcacaaaggttgttaattatgcgttatacaatggtattgaaaatgtttttatgcgtcaataatcattcaacagaatacataaaatgaatacttttttcatgaaggacattatctaatatgtaatatccaatgttaaactcagaatactaaagattcgtataaacacacatcaaactccacaagttacagaccatgaaccgccttgaaaatccgaggaataaaactagacctaaacccgggtttacatttcgagcagcaagcaacacaatatcagtccctttccgattctcaaacgactcaaagcaaagctttttttttttttaataaaaacaaaccgacttcttttgaccaacatgagattctatactttgatcgcctggtatctctcaccaatggcaccctctttctgcttttggaactccatgaactcaagcgtagttgcaaagaatgattcagcagatggatcagagggcatcgattcttcgttcttgatcagttttatcaggctttctactgattcaactgttatctgtggaacccctttctcatagaaatagaggtacctgccataattcacattacataatgctgcttgctgatctgggaaaatgagaagtaaaacaaacaataaaaagcgcttacttgtttagtatctcgatgaagagggtaacagaccctgtactaccccgagctgtgttggccacttgttgagccgaatttgcaattttaagcgctcgtttcagacaaagtagaaccctgatttcaagtaagaaacctaatgagctattttaaacacactgtgttctatcgcacagaagaaagtattacctttctccatcttgtatggtctcacgatcttccagccagaacaaatgagaacaggcataaacagctcgacattgatcaggtttctttagaagtttcgctgcatactgcaagagtataagttttcccttgtcagcctttaagcagagacaattgaatatggtaagagactaattatcatatcatgatgaaatacccccgtagccttgtgcgttaatgtatctctattctcaacaccaaatacttgcatcctctgcagagttccaattataagttgtaacgcagtcacctgggcctttgagtcctgttcaaaaggcaagtttttgacgcacgagagagagttaaactcacctacttgctttggtttagacacgagacatatgaacgtccgcgaaaacataactaaccgaaatttcttcttcgtataagatgtatgcctgggtgaaaaattcgtatgcaattggttcttcatcacacttatccgcagcctgatgaaataggaaagatctgtgagcattttaccgagcaagtgcatactaaataaacaggtacgtagttttacctcagcacattgcaagtacaaccggaatgccaggtcaggtgatggaacattaggtagcgcttcgataatctgcaacaagcaaaaaaatccaacaataaatacaagaactgatgactgtagtggagacagagcaataacagcagtctctttagctaatatctacaaactgttgattgagaattttcaacgttgtcaatcagcttgtatgaactaactttggctaagttttaaaaaagtaatgtagctctgagacacattgttctacctaaaaacagatctgaacacacaaggcagtgaaaagttatgaaacttacctgatttagaaattggaatattttagtagcagtaacggaagcctcttttccaaaaggattgtctccttccactggcaatcgcctgattagctacaatttaaacaaaacagacaacaaaaattacagaatttgaagaagaacaaaattaacaaactatatcagatactcttctatgcggtatggcacataaatagaaacaaccaaaccatgtcatcgcaaattaagctcaacataaattatgaggggctttaaagaataacttcgcttaagaaatcaaacctttagagtagaaacaacaaggggaggaatggtgaattttaagcgctttggccctcctgtcaggaaatgcttcttcaggacattgactatctgaaattcaattaaacagcttcaaacactgaaagccaaaaccttaatagaattttgaaggaaatgatgactcctggggataagtataatctatgtctcagttgaaaattacaaacaaagaataaaggcaactgggaataaatgccattaaacattaaaaatattaatgtaagccaataactagaaagcctaaagtcagcataaagatatgacacacattaatgaatctgaatgtgcaagagctcaatgcaccttaaacatctcttctgggtcatcattatataacatatgaatgagaagcgcaacagaattctgctcctcctgaaaatcatcttcatcaacctaagagcgtagaaaaatatgtacagaagtcaaaatacaacttaatattggggtcacaagtgattgagaggatattaagtacaagatagaaagtatctcaaaatgcttataacaacctcaagaccttgcggctcatccaaatcgttgataattcctttaatcagttcaaacaatgcttcaacctaccaaagtaaaacaagacaaagaaattcaattttaccacacaaatagttcaacccaaagggtaatggcataaaggtatcctaccttctccgctgtagtaataagagtattgtttttcataatgcttcgaactataacagtagccattattctctttgtttcggtatcaaggtactccaccacgaggggatagttagttagtttaagggcggtgacaacatcattatacttctctaagggagcacttaaaagcgagacaagctcctttgttgcacgagtgtcatcaatctttccttttccggacagttgcttaacacatgatccctgggaagagttagtgaagaacattaaattcaaactctttcacccaatgtaccctattccagcaaaaaattcgtataagatacgtagtaggaagttttctgcaaatgtagcgtaccataaacatgtataaaaaagcacatacatataacagaataatacataaattcctgaaccaatatccgctacaagaatgataaacaaagatgaacctgaaatctgtttttttttttatataaaaagattggcatcttttgacacaagtatcacaaatttagcaatgtctcagcaatgtgaatagaatgacaagataatctaaataatgagatcgataggccactaagcaacattgacagaagacggagtatttaaacttgagttaagaagagaacaataggtaaatacagtcgctataagaaaactgaccaacacttggtccgcataatcaagccgatcagggtgaacgtgaagagtaaacttgagaagggaggaatatagggttactgcactcagaataggcatgtcttcttgtgcttctatcacctgcaacatcatagtattcccacttaagaaaaaaaattcattgggaaaaaaggcgtcaaaaccacataatttaagaagtgaacacatgcagaactgtgttaattagggtcacgctttgcagcggatacatccaacagataaagaacaatgcatctttctagatgttgacggaatcgtctaaagtgaagagtttcacttaaaaaagaaatgtcaagcaaaaaaatagttgggccttctccatgtctttcgtgatgctaacaagtccagtcaacaagatttctaagctgtcattactttcatactttcatacagaaacaaaagtgtaacaggactcacagcctacaagtaatgttacctttccaattgcattattcaactttgagaaagcttccacttgcaggaaataaggtaatacttccgcatttaaggcagcataatttgacagcctctccattaaacgggaaagcactgtcatgatgtcaactgatgcctgagaagaaaaccaaagagaaagtgaaaaaaacaggaggttagtgaaccactgacaccaaaaaccccgacagtgcagttgcaatcaagttagatgattaggagcagagcataatgctaactacgagagagctactcagactacctgaagttgaggacacgccccaagaagtacatctagagtctgcaagtgatactcgtcaggaaaaacttgaattatacagtctattaggtaatattgggcaatctcatctctgcagttcacaatctgagaaatcatcagaaaaacattagtttttggttagggaataagttaagtttgcaagtgtatgtgtgtttacaggatataatattttacctgctctaagactctaggaagaactgtatctctgtacatatcaaggtccacaccttctaactgactcagcacgtgaaggttctttccaacctgataagtgagggaaaacgtacgcttccatcagtacaaaacaaacggtcggcacttcagttcactgttaccagctgaaagaaagtcatattacaaggtcacgaagctcgcccctctctttctcccgtctctccttttctcgagcaggtccctgcagaccagaaagcccgataggaagcttcaactcaggatcatcaaagggtaatgattcacaagcaatacaacacctgcatgatcagaatcatgctctcatagtccaattaaatctccatgaagtgcaaacattctggcaagctcgtttccaaaatgagtagaagggtgtataacaatcttaaatcataactcacctgatgttgcattctgacccagagtttattcatctcagtaaagttcagtagtacaaactccacagcatctatgactgtatcagcatctctgtagagatttgaaaacgagtcaccaactagatgaatcaaaatgattttaattaatagccaacattctatatgaagtcgaaagaaactagggatctttgtctaagaagataatttaagcacaagcaagaaccccatgggagtcccagctgctatgaagaaacccaacaatagtgtctacatgcttacccttcatactcagaaccaatgtcaggtaatttatctcgactaatctgcgcaaggtaacttcttaagaagagaccacgtagaggatgctgaatcccacggcacatctcaacaagatctttaagaatttccttggcaggagcttccttggttttgatatacacggatcctgctgtacataggagatacctagggaagggaaaataaaatgaacaaatattactttagctagagaagtgaacagactaaatatcagaagaaatgctagcaacatcaagtagtaatcaaataaaccatctttaagataacatgaatttgaactaagaaagaccaaaatgattctttacgaagatacgatcgataaaaaaaaacttgccaaaacataggaacagacagcgaaagggaattgtatgagagtaacttacaaacgcggtaatatgttaccagcatgctgaaccagctcatagagttcaatgactgagcagccacgacgagtttcttccataaagaaaatctcaagtttcctcaattcatcaaaagctctcatatctaaaaaccatcaaatcagatcacaaacaaaaccctattaagtcaattaagggattgagcgaaataaatatgatcaaggtagatcagaagacggaaacaactcacatagatcatagtacttgtgaggtgatagcttcgaagtccgtaactcgcttagcatctgagccgaatacttgagagcatctttcagattattcgagtcctaattaaccaaaaacaagacaagttttttcccaaaaccaaaattagggttccttcaattctacacatcaatgaaaagtacaaatttggaaatttctcaatttcaacgaaaatagtcacagagaaacgaaaggaagaagtgaagggaaaagcagaatttacaatagcgcgttgcatgtaaaatgcgttttgcttgaaagcagcagcaccggcggcgagccatttctcttcatcttctgatccgtctgcgatcatcttctgatcttcgtcttctctaaatctcaatctcgatctctgggtttctcacttttcaggtttcaaaaaaaagaccttgtgaaagtctttggatgggaaaaaaattatgtcatgcttcacacgtgtacgttttcctcgctatccaccgttcgttgtttctacttaactttagatctaacggtccatattctatttcatcaaaccgaataaaatccagaattttaaccgcaatcgtttctgctatattggaactcaaccgaaccggataaacaaaatttatttcaattttatattttatgtattatgaataaacatatcaattaatataaaatattgtaactactttgttattttattatatttttgatttgcattttgattaaaatcgaaccaaatcaaattataaatagttttctctgcaacatggataccacctgtttggtcttccaatgttgttttctgtttaatgtgttgtctgtagtttgaaagtggattgttccacttttgtaccgttggcaaactctttataatgagaggcaacacttatgagaaaaaaaaaacaaagatcgtaaataagatttacgattgataaggaagtagccaaagaagttcgaaactctcatgtaatttactatctaaccagcacatatatttaccatttacgtaattggtgatttactatattaccagtacatctacaaagaatcacacataattctgagtttcttaagtttcaaggctactctaaaatacttgggaaaactatatgttggtcatgttaaccactctctctctctctctctcactctctctcgaccaactttgttgaaatcagaacgggacagtgaatggcaatgcgtgtacttcggcttcaggaagaaatctagcagtcggccacaccatggaactacttccctggttggttttctgattgctaacttgtggacttttggctccaaacttgatgaacaaccaccattcttgatcttcagagtcagtgagcttgctctcaacccgatcaggagcccagttctcgataagattcaagagttgcccagccatggaaggagggcatttcctgcataatagcttggaaggtccaggggtttcttgatgactagaggtcggtttctcttgttccagagggttacatgaagataatgatggcatcttcttctctttactaacttttctgttatctttcgaaggaactgacttcttctctttgttgagttttgttgtgatctctctcgacgaaccaaaagttggatctattcttttctcttgacagacccttgaatgaccaacagactcattaggagcagtagcagcttgagaagcatctaacatttcccgggaaaagcgctgtttttgatccttgctggtcatcatcaccccatcctcaggatcttcctgccctttgtcaggtaaccgagtccgtatgctggtttctttaaaccaagaaagaatgacaccataagcaaacagacccaacaacaagtaaaagcaaacaagctcaccagagtcgttatgttatgcctaccatcaaggggctgactctgaatttgctttggtctctcattgctatgaagagtgctatcacaagaattctgagacgatgtttgaagctcaagttccacagtctggcagctcttctctaacaactcgacctcactgcttactaatttgccactagcaatggcgccttcatctttccgccgtctcttatgccgatgcttcctgctcctccccgcctcattatccctatcctttctatctttttcattcctcttgtgttttctatctttcttcacttcctcctttgccccctggatttccaaaccaatgaaagaaacaacaataagtgtccataactttcttatccagtaaacctccaaaggacaaagaaggagagtagaaacacacaaacaatgtagaaattgtcaatgacttactctacttctataagttttaggaggctattcaatttcaaccacatttgtcagtattcagtccaatgaatcaatttcatgctttgagataaattagttaactttttaagtaagatttgaattcccatctatatggcaaattacttctccatgataatcaaagtttccaactttgacaaaagattatcaaaatcaaagaagcaggaagctgagcaataaaaaaatcacatgaaccaagaacataaaaaagaaccaaagtcatggacttttaaattgctcaacaaatcaaccttgatcgattcgatcagactttctttccaaacataaccaggtggtggaaacggataacaccgagacattctcacacgatcacaaacaaacaagctcagagacgaactcgcgaaaaccctagattggtttacgagggaatcgcaattgggtttttactttgggggcttttgttatccagggatagtgataagaaaatcagattcgggagattgaagaatttggtattgaattcgagatcagagaagaacgaaggaggtaacgaaaattcccaggcttcgtagctctctccgatccagaatttttctcgttaactcgttgcttcgttatttatagaaaaaaagaggatggggttgataacgaacttaaggtgtgtttggaaacaggaatagcactaaacgatgtcgtggttttgtaggttacttgacggtgcacgcttcacatggaccattgtttcgaaccataagacccaaaagcaggcccatagaaaacaattgtttctgtttttttgacattaggcccattaaaatgttttttctattttttatacatagcaggcccataaaattttaaatagaaattagaaccatttgtataactttttttttttgtattttaaatttccattaattaaaaaagattccaagctgaacccagctaaaacaacaagaaaaggagattacaaaagcttacctacttaccaatctaacaaacaattctaaagtagacaagtgtgtaaaatggtcgatgggggaggtacctttggaatctaggaaatggtcgatcaatcattgaaacaaaaaaattgataattttttcttggaccaaaatttttgttagtttctttaatgttagtaacttagtattatagaatactagataagatccgcatatttaggcgggtgtaaggtaaaaaaaaataattttgatcgataatatttaaattttgaatagtacaatagtaatcaatattttttctttgatatttaacttaataaaatttgcttcatttcagtcttttgcattctattattattttacacactcaatcttatggatgatatttgaataataaatagtaatccacatttattttatatttagagaaaaataacttaaattcttagtatcccttctcagtatgtgtcaagtgtgataaaagatgcaaaaatgtagagaaattaaattctatatttagatataaaatgtatggatgatatttgaataataaatagtaatccacatttattttatattcaaagaaaaataacttaaattcttagtatcccttctcagtatgtgtcaactgtgataaaagatgcaaaaatatagagaaattatattcttagtatctcaacggtggcacagatctctgtgtccgttctttgaaattgagtaaggagccatctttatctgaagagagctataacgccatgcttcatgtattggatgaagtttttagaaagtgcgaaacacacaagtaacctgatcaaaatgtgaaagggtcagacttggttgcagcgcaagatccttcaagacatttaaaaacagtacaacacattggatgagactacgggtgacttaagccaggtttcttttattctcagctggaatataaatctcttgatcgtatattttaagatagcctagttagtccaacctggctttcttcttgtgaaggattgaaggaacattcattacagctagcaagctttaagcattgctggattacaccaggcatgggagctgtgggcatatggcgcagagacatagaaaccggtactctattcttgataactgtcttagagctcaagtacatgtctcatgaattggtacacgagaaaagtcctttatagttattgagctacagagtataaaaaaggttcatgtacaaaacatgctctcactggtacatacgtaactgagtttattttggtgaatggacaaaatatgcactcactaatttattttctcgacatttttatattatttgtatctaaaatatttgttggatatttgccaaccaacacgatccgataatgaagtttctaaaaaaaaaatctaaataaaaaatcaatagtatttcaagaatatattccaaattaaagggtatattatcatttgtatttctcttttaataatgtagagatagattttagaattaaaattttttccttttcttataaatatatgaacaaatttaaatttggcatgtctctcatttatgttaatgactaactttccaaaactaaaacttatataataaaattactaaatatataaatattaattaatataaaatgaatagaacaaatcattatatactatatttgtcttcacaaattataattgtattgttagagaaaaaaagaaaagaaacaacaatttatttttctatttttgtgaaaccctagatttgaacatcgctcatttcttcttcctacctctccatagatttatcatccttcaacaccaattttgttattattattcatcgcttctcctcatagatttatgatgagtaaaccgagatggtttcaagtattgacagaggaagacttagatggaaactaccaaaagcatacttgtggtttccgaaaaaacatcttcaggttcgagtcctgcgacgtagtgtgccccgagggcatagatcccaaccatattcaacctcatgttcaagtatgttctaatttttttctatatgccctaattatatatattactttatcataaattttgcatctttgaatcagtgcaggtgtgcaccatgcttgatcttaacgcctttgaactgaaccaaatctctgatctctttgattgttcccaaattcaagtaacaaaatagacaaattgttctcatccaccaatttctctaaaggtaatttatttaaacacatgattgatattttttttacagaatcatggttacgttggagggaagcagtttataatgttgaggccatggagagactgtgtaagaaatacagaaggttgcactaaacatgtccaagggattaattccaagttctgcactttcacctgcaagatcgaacatgttttggagcatgaaggtgatttgtccagcattactagactttggtcgtcggaggatgattcgagagaactgtcagaacacgttggtgatttagcaatccatccttgtggtgatccagagagaatctttccattaaagaagaggtctcgaagaagaagagagttttttgacagctactacgaagacatctatgcatcatactagtttccgagatatctcttagttctattagacattgttcacatgtttgttttgtggaaatacagtttagcatattatcaggagattgttattcttggtttaaaatctacatatagagaacccttctcttcctaacgatagctaagcaggaaacatcatacaacggtacaaactagcaagtgtgcttagtgatatgtctgaggcaaaccaaatgagacacgtgaaaaagaattagttgttttatcaaatgatggaagatagttatcacgaagggttaaataccgattagggatgaatttgagtttttggtacggtacaaagtttgttaattggttcgagggactaaacgtttaatttgtttgttataggtgcttgtgacaagattataaaggtaatgagataatgatataacgagttaactaagtgataaagaacgggaaatgaaaagtaacgtaataagaacaatgatgatgagtttgatttaccataagtggtgcaagctacgttgatggatgatgcttaacgatgatggctgcatgttttacactttttttcaaaataaatatttagctaaaaactcacgcgtaaagctaaacgcggtagaatggctaattcgtaatttgcaactcgtgcaagcagactccgacgtggcagtgaaaaaagaataatctacattcgataatacgaccaaaccatcaccgaaactctcgtgactcgtgtactctcacgatcacattagctactccactatcttcttattttcttcttctttttttggataatcactttgacctctcgttccaagactaataccttctccacaagtaccatctctgtaattcttgactttcttcaacctatgaggtgaagcatttcaacactatctcctctcttacaaaaatattctaaatttctatgattttccatgtttgttcactttgatttcactctccaagaaacatttttttctccgatgagtttacacttaaacagataaaattttcactttaagaaaaaaattcttaaaatgttctctgttttgaagatctttaacgtagtagagaattttattgtcgcagtcgaaccataatgtgattccttggtaacttcaaatctctttgttattcataatcagaatctgttcacacgaggtaaaagtctcaaactttcttatgttctgcttcgttttaggtctcaaaatttgagtttttgagctgtttttggttaggaagagaaatggctaattcatgggatcagttaggagaaattgcgtcagtggctcagcttacaggcatagacgctctgaaactgattggaatgatagtaaacgctgcgaatacagctcgaatgcacaagaagaattgtcgtcaattcgctcaccatcttaagctcatccgtaatttgctagagcagattaaaaactctgagatgaatcaacgttcagagattcttgagccgcttcaaggacttgatgatgctcttagaagatcttacattttagtcaaaagttgtcaagaaaaaagttatctttacttgttggctatgggctggaacattgttaaccagtttgaaaaagctcagaatgagattgatctgtttctcaagatcgttccactaataaatatggcggataatgctcggattcgggtaaattcgcttgcattgtttactggtttcttgttctttttgttgttgccatagttataatgatttgttatgcaggagaggctagaagctattgaacgtgatcagcgtgagtatactcttgatgaagaggatagaaaggtgcaagatgttattttgaaacaagaatctactagagaagctgctacatcggttttaaagaagacgctctctcgttcatacccgaacatggggttctgcgaagcgcttaaaaccgaggaggagaaactgcaacttgagttgcaacgttcgcgggcgcggtatgatgctgatcaatgtgaagttatacaacgtttgattgatgttacacaaactgctgctactgttgaacctaatcttgaaaaggtgttgactaagaaagaagagcttacctctagcaagaagagagatgatttgtatgacacggatagtagtagtattcgagcagattcaaggttaatcccatttactccgatatagatgaaaatattcatatacttaatgtgttctcacaaaacgtgttgttcacgtttgatcattgaaggctaatgtttgattggtgtctaatggttgaatgtagatcaacgtcttatgtttcatccggacatgaactactttcgggaagatcattgcaacaccgtggaaattggcacgccgacttgctggattgttgttcagaaccttgtctttgtaagccctctcattctgtttttatctaaccaaacaatgttccacgctttcttttctcgttaagattgacgagtgacacttcaagattcatacttatctacttttgaatttgtaaaataaggcttgaagacactctttttcccctgtggtacattggcaaagatttccactgtggcaactagtaggcaaatctgtaagaaatcttatatgaatgcagactagttttttttccatgtatgagctatcaagaatttgatacaaaattttgattttatggttttacagcttcaactgaagtgtgtaagaacctaatcgtgtattctttgatactctcatgctgttgctatacttgctgcataaggaagaagcttcgaaagacactgaacataacggtacatcaattaaacctctactttcttaaggtcgtgatgctaaggtttttacggatgtcttgaatttgcagggagggtgcattgacgactttttgtcacatctaatgtgttgttgttgtgcccttgtccaagaactgagagaagtcgagattcatcgagcttcttacggtaaaatatatacatttacagatatattaacatacttctgaatctaattagtatttaaagcaggtacagagaagagtaataaggaaatgagtccaccaacacctcagtttatggaagaatgagacttgtccagcacgaaacagaacccagttattatgatgaaatgaatcttcttatttcattgttgacattaagatttaacgtaaattagtttgggaaaaatactccatagagattctaaaaccttccttattctatactagatgcaaataggtgacaaatcattgttaacaatagaccttttgaagaagaaaaacaaacatttgtggttgaatttgtaagttataatatgaaattttcagtgcagaaaaataaggtttcatgttgtgaccaaagaaaaaaaaaaagagtttttcacgttagttttgcagattgaatattttgttcatagcttttggtattttgaagattttattttcgtcaaatagaggatcaagattagctgattctttcccattttttatgtgctgcctgctaaataaagttaagaaatttacactgaataacatgtcatctctatcatattgttgttaattattcctttagattggttccaaatgtttgaggaagaaggtggatgcatcagaagaacaaatattattggatcagaatgaagcaagcatttgtagcatctttaaagttgctacaagaaggaagtcagcaaattcattgcccaacttttatttatacattagatgttaccaaatttgctcttaggtgtttattttgtttctctgttgtttctggttactaataaagccaactttataatgtgagcatattcatggcccaacttttattaaaacattagatgctaccaaatttgctcttaggtatttattctgtttctctgttgtttctggttgctaataaagcatacacaaaaagaagtcaaccaagaaaaaatcttcttagcatcattatgaagacttatatcatctgacaatacagtgcagtaatggcttaaccagtgaaaacagaaactcatgtactagctagataaggacttgacttggcattacaataatagaggttaagtagagaagaaaaaaagtacaaaagtcaaaagagttgataggaaaccagagaagaagaagaaagttagttgctttctttttctagacacttttcttctacacacacttttcttttacattacttaccaccacaaatttaacttagctaaaatgtacaaactttttctgtttttctcatcttcataagaaacacttgaaactcccccaaaaagaaatagtagatttttctcaaaatggagctgtggaagaccgttgtagtgttttctttacttggttttgagttgcttcggctattttcagctgtattttccaaaaaacagaaaaataaaaatattggccttaagtagcagaatcttacattcacaagaaaaagttactgcaagaagtaatgcacaagtttctcaagacaaaattagactaaggcattaaagcaagaagtcagtgttagttttacctgctcttgttgtatcttgagtcttgcattctctgtctgcaagtgagcaatttcaagctcaagttcgtttgtatatgcctgaaagatccatggaccaattttagtacagaggaattgttgatttaatacgagattctgttgatttagaggaattagaaagtagaagagtgaggagagacacattcctgcttcctagcccttgaacgagcagcagattctctgttcttgatcatacgcttataccttctgtctcctctagtatcatcagaatcttggcctcttttcttaccaagacaaccaaactttgcagattcctcaaaggagcgagggttagaagcaagaagattttctgtggtatcaagaaactcgaatccaacaccggagtttaagctgaggacagtggcaggaggcggaagaggcagagagccatagagagcagtgacaatggtggaagaggaaggtggtggtggtggtggtggtggttgattcagaggcatgttgaggaaatcttgaaagatggagttattagggttttggttctttaacattggttcatgaccaatgtttagttgccgatggtagtgaagtgaaccaaggttgatttctttccatacttcttccatggtgacttgagatttgttatggcctagggaggatgatgttgataatgatgatgatgaagaggaaattgaaaaggcactatggttgttgatcttattatgctttgctgatgacaacattggagaacagaacagaatagcatagaatgctttgttttttggttttgggatgtcaaatgtcttatagctttgagacagagagagaaagattgtgaacttcttgtctctcaatggtcatttctagtatcatgatggttgggtccagtagtagaagaaacagagatgtaattgttctagaaagaaaaaaaacaaaatcaaaatatgttaatgtaatgactttttgtcacttaatccaaaatttgatagtgataaatctatagttatgacttatgtgacgtcaaactttttctcctaagataatcatttttatgttacagaaggaattatttaccaattagcatgaatgcatgatacttaaatctggagttggtgggtaaagagattctttgttttgaaaaggtaaccaataagctatggttttggtctcactttaatatcacaacaattcaatagaccctttaaatcgctttcaagtgtgtgtgatctttgctttaatttttaccaacttttctgtttgtttttacctttttgtaattatatattttcaacttttctaatagttttgcttacataatatatctctaatctatcttcaaatccgatcaaatagattaatgcactacaaccacttaaacacgtatataaaaaactagatccatgacttatgagcaccatatcatatcataatttgagtttgacctcatttcgagttaaatatggttttgaaaagaagaaagaagtgtatatttgtattatgtcattacaataatgtcacaacatgtgattatgaatatgaaagatataactgtatatatttatctattttatacattaatattggtagtggtaatggaaagcaacttattggttgagtaaaagataactgagcctgatgtgattgatttttcaaagttcccagaatggagaggcttataatgccaaaggacaattgaaaaaaagaaaataaaacagggtcatgaaattttatatattttacaaataatcacatttcctcatcatcatattctttttctgattaatttattttatgttttagatcattgagaaaactattcaattgtgactaacagatatgttatatgttcctcatttcataaatgatgtttttatctaaacaatttcgcattttcaccatatcttagcataaaaaaaaatattttctttctaaatcactttcacttagaccatttccaatggttacctctatatttttctatattttaaaaatgattatatttagaggcattgtgctccaatggtcacttctaaaatagagttttttaaaaaataaaggaaaaatagagataaattgtagacatttctatttatagagatacaatgtagatatttctatttttcttttattttagaggtaactattgttggaattaaagcttagttattttataaaagacccaatgagaaacatacccaacaaccattagagcacaatgtttctaaaataaagtcacctctgtaaatagagaaaaatataaagatcactattggaaatacccttaaccaatcgaagttgttttatattttaggttcattaaaaaattcggcgagccgaagtatacactttttgagagaattagttggatagtaagggtatggatcaccacccgaaaaaaaaaaatcattttctatatagctttgataccactaataataccccagccaaatcaaacatgaatttgtttctgaacccaaaaagaagtacccgttctgattcggtagaagaaaaataaaatcgaatacgaaaccatgaaaatctcttaatcgaaattaataagtaataacccacctttttgtccaaaaaaaaaaaaaagtaataacccacccatgttatgtttgtctacggaccaaaaaaaaaagttatgtttgtctacgagtccaaagacaatgagattgacgtggcaagctcccatggatagaacaagtgtcaggtctgtgttactctttccccaaacttcattagctttaattctcttcgtattaatctttgtccaatatatcctatggacctttcgtttcactacatattagacctagtttagactaattttagatggagcttttacagaaatgagtaatatttggcccaaaaatttgaaattgagcatttttacaatgggcttatagagttatgcattttctatgaactgaattgacaaaattactttagagtttaattaatgtcatcttcttcttctttttcgatggcttcacaaacatttctataccaacaaccttgttctaatcaacccaataaaatcaagtaacttctttttaatggaagaaagttaaatcctaaatggatactatatagtgaacccaaaggatccaatcttaaacaatagtcaaatctattaagattccaatggttttccttcttcctcttttaaaataaaacgagagatgatagaattctgattgatatcgagaaattaaaattcagaaaaggtatggatgataatcgcttgcttcgtcaaagaagaagatcaaccacgctagatctgaatcgaaattttggttgaggtgatggagaagtaattgagcatcaatggtgagttcaacagtaggtttcatgtcattgaagagccagcaaaataatcaaaatttctgggatttggctataatgagagggaggcagttggctccgtcaatggcagcggcggaggtggtagtcgcgacggcgagaaaaaaaataaaagagtgagtgtaagctgaaaggggtgaaaattataaaacactatcacctataattacctgtttttgggagtacattgaaatgttcctaaaatcacaaaaacatacactttaaagtgctaattccataattgattcaactttagatatgacaaagaattaggaaaataaaacaaaaaatagtcttaaaatgattcagtagacgtgactcgtaggcttcaaaagaagacagaatcgcaaagtacagtgtggttctaatagtgacgaaaataattatatatatattcgttattattaaaatcacattgcattttattcgcaattaaaccgcatgtctctatccaaagctctagatttcaaatgatgattgttctgtatggtgtggttgcaaccctaatatctatacaaaaccgccctacaattcttcacaattatctagcacgtcttcattggtaagttattttctctttctattcttttcataggtgatgatgttaattcattctgctcaacctgcttatatggctttaaaaacatgtatattactgtttcaggaaaaagacatgttatcactattttaattacaactagtaaaaatattgaatttaaggtgatatgtggtatgtttataaaggtattctaaattgagttatattagttctatataatgtttcaaatgtattttataagttctttttggttaaaaagtttatataatatgccgtcaaccaatattatcgattataaatgtaaatgtgaaagaagaagaaaaaacacacttctatttgcatttggcttttacatttacgatttatgaaaatacattcgaaaatactaaaattttatgtactattttatatataaacataaagatatacgagaaaggagaaaagaaaacatgaaagcctatagtgttataaaaatttactatcaatctcagtcaataaatgactaaagttccaaaagtttttctgttgctttattatctttttatcttcttaatatgaaccgatggacaacgagaatgcccccatgagtttctttgactgtgatgatttcacttggatatgcacatgttataataataggttgtctctgaatcgtacgacggtaacattagtagttgtaataattatattatattatttaaactagaaagcaaaacaaaacagaaaaaaaaacaaagaaaaagtaagagtttaaatgccaaatgagtgctaaccgttggatggagaagacggttgtcttctgtgctctgcaactccaattggtaagaatcatttgaaaactactctctttgttttctttttctttgtgtactttgtttattgatatttaggttttatttattgttttcttcaattatttattgtttgatcaataattgtgagtttaggtttcgtagacatggtcatgaccaggtcaccgtgacctgaagctattggtttggtcgtttctatttcagtcttcttccacatatagctactatatatacatatatatatatatatataattttgatcaataataaaaaaataaaaaaatacatgttgcattataataatttaatttctagttaagagaaaaagaagttctatctaagagtgtttaattttttaaagtctttaaaaacaaatgttgcattaatagtaaacgcaagttacatatgaatttcaacaatatacatatatattatcttgcaaggagagagttggaattttggtatctaaatttgtgtatgaaaattgtcatttcattttgtagaacaacctaattaaaggataataatcgataggttgaactgaaatactgaagatggtcaatactttatcaaaacaaatgatggccaaggcaaacctttggtaacaacgtaaagaatatatgatttcgaatgtttgataatgattctacagttataaaatgttcaatagttttcatgttcttaatcaaacgaagatagtatatccatgtaaaaataccttaaacttattaacaaaaagggaaatatttttttaaaaaaattacaaaagaaaaccatttcaacaacctgataccaaagtatatttcatgaaatataggagagagactagggtatgcttgtacggataatgaataaagtattatatgcagtttgtctatatgaaatgaatggtgataaatagttgttgaaaactttaacaacaagtacgagaaaacaagacatcatcaccataaatatgcgaaaaaatcgggaaaacgtcttcgatcggaaccagaaaagatttcagctgaaaacaagagtcgagatgaacattagatgacttaaaaaagagagggagatttacataaaaacgacaaaatcaatctcaactatttttacacggttttttccaacccaaattctaatctcttgcatttatcaatccgaactctcatgtaattttcaaataacaaacctaaacgatataacagttaaccaatgtaaaatatagccattattaaataatgtaataaacttgaattatgtaaccgttagttaagtgaataaaaagaagaagaagacgtgtttggtctttgagatggtatgtttaatttgtggcctcgaggaggaggaacggttggatggtagcctccaaaccgaggtctcaccagtgtaacctaagccatgaaagtaaagtcagataaaaaaaagaagatgagcgaagacaatattgttcttagtgttcttcaccaatatgccttataatacatttgataaggaactcacactcagattctttcaagccaagaatcagttactcaaaaagggttttgacaacactcactaaacgaggtagatcggatataaagaaaaccattagaacttttgtcacaagaaatactagagaaaaaaaaacattctggtcagttctttatgtttacccacttctttgtctcttcttaaacaatcagaacaaagtgtaatgcgagtaagagaacaaacaatcctatgacatatgttgccaaaggaatgaagcatctgttcttctgcgtcttattgtttgtattttgacatgaagcaaacaggcaagttctacaggaatccaaatgggtaaggtacaggattcgattctccgcctcttcaaaattctttaaaaataaacgaattgagctaatgaatcaccattttgacatactacatcaatgggatttttttaaaaaaatatatacgaattatggattatattaaaaaaatcatttttaagtagttatgcaaacattttgtctagtttaattaggggtaaaaaaataatttacgcacacatattcctatcatgattttatggtttttaacttcctcttttttttttatatgaaaaacgaatttttgaagtagataaaattaaattcagcattttcatattttataaaaaaatattttttcgaaaaacaattattacatttccccttttaacatgtttttataatatattattaaacagccatttatatattttgtcaagtaatattaaaaaagtatataatgtttattcattttcaatttatttgacagaaaatttaagaattttgtatacatattaaatccatattaatataaatacattttaagtatatatactgtatatttttgcaaaatgtaaacacaaaaagttaacagatttttttatcaaaatggaaaaaacaacacataattacatactttcattatgaatttcaaaacagtaaataagatttgatgtaaaaaaatttgtaaatgagactttaatataagataaattactattttcttcattgcactgtatcttattggttaaatctatttacatcacaaccccatctacaacaaaacttcaccaaataactagtatataattgttaaaaaataattatcatatacaacatagaaaaaagtaatacaactgtagtgtaatatgtttttggtgatttaacccaattatcttctaaagaatacaaattgatggctaaatatatacgtgtaataattaaaggatggccaaaattgagaagaagaacaatgaaagtgagatagagagagaataagcagcagaagtcgtcgacgtgtttggtctttgagatggtatgtttgtcgcctctgggtcaaacgaagaagctggcggtctagccgaggaggaggaacggttcgatggaagcgtccgagccgatgtctcaccggtgtaacctttagccatgaatataaagtcagattagaaagaagattaggatcgtagtgttcttgatcaaactatgctctacagggaagaacaggtgataaggaactcacaatcagattctttccaccccagaatcagtttctcacgatcaaagacaacgcgatagccagtcatgaagttctctgcaaattgtaacaaggaagaattccgataaaaatcttgcatttgaagtgtagtgagacaacattttttggttgagttttccaaaactgatacttacgtccaatgatgctaatgtcttctatcttcataatggctaaacagtagacatctgtgtcctgaaattatcaatacgagagagcttaagtaatagcagagactgtacagaggtgcgctgtaatataacagaggcctaactaaccttcatggggattactactaacgggtgataaacgggatacgagctcccgcctttcattgtcagattcacagctggatactggaagctgtctttgtttgggctgcatatagatagatccaaaaaagttagtaaggttttagagagaatcagactgatggtgaccagagtaaagaggcaaccttaatgcataacagtactcaaaaggcaactcagaatcagttgtttgataacgtttgtccagagctagagaattaaactgcaaaatcatgtttggttattaagccatgtaataccaatccaagttcatattacaatatagatgaaggcttacgctttctgaaataagggtgtaagctgcatcagtcagataagtgaacgaggttccagagtcaaaaacagcatcaaattcaagatcgccggtatttcctccaacgcttattttagtgacggtgatattgtaagtaggactggtcaacaggaaaacaacatagtagttagaagatggaagtatattcaaggagatacacaagttcggttaaacataaagaagatatgattcaacggcttgcttactgtggttgtcttatgttcaatggtgtttcccgttggtctacgctacctttatctccaaaactgatcctaccagctccatcgttcccaaaacacattgagaatgagtttgctgcaattccttcttttgctagtacactaggcaccgatatgtcttctaagccaagcccgaaaagaccatttggagctgcaccatcatggaatacaccggtctgaacttgaccacatctgctccagcacagaaagattgttaagatgaaaacacaaagtcacaaatgtttaggcttgccaacataatagatggttcgagaaacataaaacagttctattatttcatatattcggaagtctgtaaggaagaatttacttacccaaaagtaacacgagcgggaatagctttggaacttttgtcatttgaaactaagtgaagtacatcctccaccaagactccagtagaagaggtaccattagaaagataccggatctggtatgggcaatcactttcaggggaagcgcatcgatcacctcttgtacataatgtgctattacaaggaactttagtacttgtcgatgaagcattagggctataaatattaaggtccaaactctgggcaacaaaaaagaaaagaaaaacctatgtaaggaacccaacaactcgcagatatgaaacatgtcttaagagtaacacaaaaaaaaatctcaataacgcaaaatctaaagcacaagaatatcttgttcactaaatttttttcttccacagaattattagctttcaaaacatagaagcatcctcgataagtctagtgtcaatctcactgtatttaagagttgcccaaagtcagattctatccaataattgatctctataccacagctaaaccctgactaagaacaaacccaacaagttcttcacagtctagaccaaaaactcaagagaacaaaacatacatcagctagaatcatacacaaatgcaacaagtatatgaatataagccaaacgaaacaataccgagccaccaggtgctttcaattcacgaacacaattggtgcagtcacagggcaaccaaaacaagtcacttccagtatctaaagcaaccataaaccaatcagacggcgtcccaacagtcacattagcgtaatgcaaactgttacaaaacatcaaccaaacaattcaacacaaaaatctccaaacccttaactctctcataaacaattcacaagtctccataaaaacattaaccttaaaactaaattcaagctcaaagtaagtaattgacaactaatttagaaaccttacaatcctagggcatcaacacgaacagtttcgttgccgtcagagaaagtaacgagtgattgatcttcatttgcaagtcgacgacctctaattaaccgatcacgatgagccatcactctataatacttagaagaatctcgattaggtaaaccatctccaggcaaaaccccaacaacctgatcggagaaacgatgatgaaattcaaacccaaattcaccaaatccctcgcatctatccaaaacccagctcgaagccaacaaaataagcagacccagaaacaaaattctacagcttgagtaccaaaccatactggttcgtcgccaaaaaaagtactccaccgagatctcggaaactttcccagaaaaaaaaaacacgaaaatttccgagaaatactcaaaacccagtctaaatcttctctagcgaaagagtaagaaagaatcaaaagagaattttggaaatgaaaccgagaaattaggcaaaagaaggatcgtgaagtaaagaaagtaagaagcttcaaagttttctcctttgtatgatgatgaaactttgaagtcaatttattttcccgaaaatataataaagtaaagtttttattttattttatttaattatagtaaaaaaaagatggcaggtaattttccttctctacctcaaacagcaaaagtcaacgtagaagtcatcgaagtaggaccacatcaagtcatatttgtcgaatattcaacgtgtgtgtaaaatttgtaatcacacgattaataaaagtcctattgaattattattatggttacgcaattgtattgataaatatttgtttcgtcaacacgtcattcaagtatttaaagcttgatattagttatatgtagttggagtgttggaccaacttttcgtcattctcgttttttaaaacgtaattatgtattaataaatgtgttatgatctccgtagtcggtaattagttccatacattacaccaagatagtacaatattgctcgattaatttatggttgtgtcttgctttatttactttgtcttgttgtttcgagagcgtgtacatgagtttgaagagattcataatacttcaaaagattgtgttgacatttctaaacctagataggtttatgctcattcagcttattaaaggagaaatctaaaactgaaaataaatagctcattaattgcagctttattaagatgcatagaaagcaaaaggaaagactttaaattttcaccaaaagcaaatgattctagatttgatgtttcatcacatgaagaaggagagttggatgacttctacttgctagagaaccctaattacatgggcttgtttgtctcatagtattgggcttgatggcacttcaatagcttgtgtttattagagtatccataacccaaaactttttttttttgatgaaaaaataacttgtgttgtggatgctctaatagattatattaaatcaacagagtttatttggtagactgataaaacttatagaaatatgattgatgcgatttttgtttggcatgagtgatataaactgttaaagatgtgaatctgaagaaagttacgatacaatgccacaattcgtaatttacaatcaatgagcttaaaaatcatggataaatgcaaaatgaacaagttgaatgaagctttggtgatgctttcttggacttgaagtttagagtaacatggacattaattgttaggtaaatacatgcatgcgtctcatagttttaatagatagcataatacagacactttcaatgtgtaacacatagatagcataccgctctctaaatttaattgtgttatacattatttttttcaaaattcaagaggatattaattgtctaatctttggcagaaaaaaaagaattatgttcacaaaatatgatttcatctacatgtataatggtaaaatgaaaatcaagttgacatcaaaactaaaactatatcagaaatactatagaaactccaaacgagagatatgacaattttaaagaaccacatgaaatgaatcttttcaatcctaaaccacaacaagattaaaaactaatctaaaaccggtttggattaaatttttaacagttttcgtttcattaaaacaaaaacacattttaaaaagaaattaacaaatcaaattcaaaaccaggaaaataaactaagactaaatcaaatctggctaaatctgaaaatacttaaaccttctatttgaatggaaggtttcaaaagtaaaaacccaacctttctctttaaaatcatttaaatctgtatttttctatatataaaaacttattttcatcttcattaaaaattgtattttttgataaaataataaaacttaaatcaaaatttaatttgttccttgaaatagcttacttgacttttgacatgtccatatacaatttatttagtcaaaaatagattaagctatttcaaggaacaaattaaatacactttaatttgctttaaattaagagtcttgctctaatgaataaaaagttttgaagtataattttcttaccatttgttaacatatgctttgcaaaaaaaattcttcattgtagatatatatataaggcactcaccttaatcatctacttagccaaagaaaaaaaatattttggatactcttaataatcaatcgaatgatgattgctcgttttgtgctcagcattctaatcgtagcggcgatagtttctggtagtgagttttctgatactcgtgatgcaaaagtagaaaaaatcttaaagaaactcaacaaacctgctcttaaatctatcaaggttaatgaaatttgttggttcacacaaaaataattacacctaacaatttttttcattaaaatattaattcgtgaatattcgataatctttatacagagtccagatggagatataatagactgcgttcatatgaataatcatccaatttatgatcatcctttattcaaaaactacacgattcaggttcttacttagttctcttataattataacttttaacataaagttctatatatttgctttctaatcttattagattcaaaactctcataatattataccagaaatatttatacaaattgttgataatcttaacactatattcaaaatcaggtcaataatactctaaaacattgttttaattggttggattaattctgctcttaagctagcctttcttatctttaattcgatatttgtttctaacattggtgtgtcatagatgaaaccaagttcttaccctaaaggtaaaaataatgaatcttcagacaaagagaaacaaagtgttgtgactcaactatggacagttaacgggaaatgccccaaaaacagtattccgatcagaagaacgagaagaaaagaaattttgcgaaccgaatatatgcaaagatatgacaaaaagaatccaaacataataaatcatcctaaagcatcaactagtaactccatacatgaggtgcatacataattcaataagaattaattagaaagtaatgattgtcttacttattgatatgtgtttgtgtgtgtatatatagtacgcgcaaatccaagcgaaaggaaagtttcatggagcccatgcggatataaatgtttggaaaccttttgtacaaacaccaaaagagtttagcctagcacaaatgtgggttatggctggtccgttttctgaagttaatagcgttgaagctggttggcaggtttttcttcttcttcgtatagctacattttaatacatttatataattatctttcattatatccaataatctcctattcttataggtgtatcaagatcgttatggcgatgacaacccaagatactttattttttggactgtaagttaatgttcatagtattattttggtttcttttgtattttgtccaaatatgtatttataagataacttttttgtgtgttgtctggtcacaatatggaaataggcggatgggtaccactcaggctgttacaatcttgattgccaaggatttgttcctgtcagccaaaaatttgcccttggtgcagccgttagcaatgtttccaccttcgatggtcaacaataccatatttccacaactatatggaaggtttgtataattcagacatagaattttgataagtacggattctcttatggtattttaaaagtcaatatataactaaatgtgttgtattattataggatccaaattcagggaattggtggttaaaatttggtgatgaatttgtcggatattggccttccatattgttcaaccatctaaaagatggtgcgacagaaattcagtggggaggtgaaataataaattttaaagatggtgcactacacaccacgacgagaatggggagtggacattttgcagagtctggatatcaaaaagcaagttatttcaaggatgttgagataattgatgaacgtgatattcatagtagtcctaaagaaggttattcttatatgacgcaagagagttgttataacatcaggtctggctatgctaaagtatggggagtttatttttattatggtggcccaggtcgaaatctgaattgtaaataatcatatttatataaatggtaaaatctaagcaaacttttaaataaaaatatatgtgattacgcaaataaattttcggcttattgatctaagtcgttagaccatatggatcggagtggctccaattggtaaatgcaagagaaacaaattggataaagatgaattttgatttggtgatcatgcttcttgtcttgggcttgaattttagagtagcatgaacattatttgatagatacatgtagcttatagtcagaatagataacatactatctccactcatagtatgaatatataacataccacaaaatctgatttcaagtatatgtttacgcatttaataaaaatctggttgacataataaactataaaatcaattttaaagtctcacacgaaatttgtaaaaaaactcaacccatcaagaaccacactaaatttgaaaaccaatctaaaattgtttggtttttcagttttgacagtttccgttacattaaaacaaaaaaaaaaaacttttagaactaaaattaaattaacaatgattaattacatcgctaatctctatggcaatttgcccattaaaacggttacacatgagttcgacaaagattaacaaagtctagcgcgagatggagatctaaagaacagagccggcattctccagaaaaaaatagacgacttgtaatttctattagtatgaacctaactcacacccaaaaactacctcaaaagtagaagtttacaacatacttatatattactccacaaattatcaaagtctcgatatgagatatattctaacagtctcctatatatatagaaactaatagtaagatactcaacgaactctttgtcaaaaaaataataatcaatgaactaataaaaaaagtcacaaaaagttcccgcgaaattacatgcattagcttctcttttaaaaacaaaatttagtcgtcgtgccaattatttcttccgacgatatgcattagagacattgcgtgattatttgaccttcacatcattcactatgtcaacgttattgaatttttagccaagtcgataatgatatttggagacttttttttcaaatgataatttgagactttgaatcgttattttgcaagtatctacctctttagattgaatcccaatctgaaccatgtccaatatattcatatagagggtgacatttttgttccaatattgttagagacaagctacaacttggttagtcaaatcataatattcaaaccaaaaaaaaaaaaattggttagtcaaatcctccattggagatggtcttattatgctcactttatttctgtgaatgataatcaaaagtcttcttctatattcactataaatattttgaaacccttttacttagaattagacctcatagcaaatcaagaatattacctctaatggcttcccgcccttcagtgagacacccgagccacaaccatccattacgcggtcacaaagcccaagttgaagatgagatcatctgctctggttgcgacctagacctactcggtgcatatttcaagtgcacaaagtcagagtgtgattacttcttgcacaagtcatgtttcgatctcccacgtgagatccgtcacaagtctcaccctgatcaccctttgatcctcctctattccccacagaataataattcaacgtatacttgtgacgcatgcggtgagtatggatcggggttcacttacaattgttctatctgccagtacgatgttcatgttggatgtgtgtctgtgcctgagaccatgaagcatgatgagcacgttcacccgctcgctttgatctacaaggctccatgcccaaaggatcatatatttacctgcgatgtttgcgatgaaactatgccgcataatctgtggttgtactactgccagaaatgtgactacggtgctcatttacattcatgcgttgctgaagaagaggaaaagtcaaagaaaggaggaagaggaagaggaggagaaggaggaagtggtggaaatggagtgaacagaggaaggagctccgcgaattcagagctagctgcaatgttaaaggcacaaagagagatggagcagatgcaaattgctcttcacttggagatgcaaagagctaagattgataagaaatcaagaaagcatatgcttaaaatgatctaagatattaactctcggaatcttgaaacttataaaactctttcactttttgtttgtttttatttcttatctttaaccttttattattgttctcttttgttttgttgggccttttttcgttgaattgttgcaagcttttatgtaatttttatctatgaagaatcttttaatatgaatctgagtttactcataactaggctaactgcccatgttcaacaaaagaagatacaactttcaacatgtaaattaaactaagcacaaaatactcaagttgatgcttagcaaatcaactttgttggtcgttcactactcactcttggaacactttggcttaaaatgaacaatttgacatgctttattccaagagtgagtaggttttcacaccaatttaaaggcaagttggcggccaaggaaacaaaataaagcatgtcataaaaattaagagtactaggtttagtacgtagtttaagactgaggtaagactaaggtcggaaatttatagtagaagttacgactgaattttgcaatttggtgttggatagcaacttcacagttcacacacacaaaaacaattgttgttaaacattgttaggtatttaactaaatcacattaaagagtgctttaattctgtatgtatttgagctttaaatgtgtcagaactcttgtctctggttttaagtgctcaagaaaaaaccgaccaactagtttctggcgtaatggaacacaagtcacacaacattagccagaataaagaatttaaataaacagaaactctattttatgtgtgattctttgtacatatgctgactaaaacataacattagagaataaggagtcctaagaaaaatgtgatttcatattagacctaaggaggagaaagaagagcagacccaacagttggggtaagagcttagaaatatctgaactgcgcggtttgactgcattatgagagacggtggcgcagcgtacaaccatgttgcaaggttgttcaattcataactcacaacatgtaaacagagaacaaaacacttaagttgatgccttagcaaagctaaatccgtttggtacttagttttcatagcaatacaactggaagtagacagcgacaaaaaaacaataacatgtgataaaaattaagagtattaggagtagcaaaagactcatggagagggcttcgggtactagaactaccagaagaatcagacgacagcgattttgagtagaagtcatattagatacgattgaatattgcttttggtgctagacaaagacttcacacacacaaaaaaaaaaaaaagcaattggtgttaaatattgttaggtagagcaaattacatcaaaagagtgctttaattaaatacgtaagtacttagtttggttacaccagacaagaatctaataatatcgttcaatggatttggtcccgtgagtagtgtctcttgtttcaagtgcttaagaaaaagccgaccaaactagtttctggctcaatggaacacaagtcacacaacattagccagagtaaagaattagataaaacaaaaactctatttttgtgtttctttgtacattagagaactaggagtcctacaatgactctgaaagagtaagagaggtatcgtaattgtaaacagccaaaagaactggaatttacatgaaactcaaggaggagggaagaagagcagagcagactcttgatgtacgagctgtagaaatatctgaactgcgaggttaaactgcattatgagagacggacgatggagagatgaagagattaaatatcacgtctacacatcgggcaagaaccgtgtctaaggagccaattgtctatgcaaggtaagtgaaacatgtgatgacaatgaggcaagcttctaactgtttcaccgagctggaaatcctgaaggagaaagacaaaacccgaattagaactcgattcgacataatgaactaaaacgaagcaaactgacaatagaactaacctgaagacaaacagaacatgagtctgtgttctcagaagcatcagtgttattgttgccagtgattgtcatctttgggattttctcaacaaggtctcctgtcaatccttttgagcctcctgtatcaaaaaggcttgtgtgatcatcaaaagctgtatccacagctcccatctgatcaggagaaacaagacaagaagggataaataactacagagatcctagagatcctaaaaacattaaggaaatggtgaaaaattctgaaagcaaacatacttgactttgcactgcacttagcattgcaggaccaatgcgctctcgtacaagtctcccgcttagaagactaacaatgacatcaatctacacaaaaaattcacaaaagaaacactaatcaccacattccaaacttcatagctacttaaaaaacagagcaagtaatgttgctcaccaagtagagaaaacatccgaaacccgactcatcggatttccagagatccagagatgattcaaagacctcgatagagaaaacagctcccgaaatggctccaattgctgctcctctaatgaaaccactctcagtttcttgacctatcaaagctcctgtaagtgcccctagcaatgtgcccactgaacatgaaaaaggaatcagctttcttagctccaagttacaaactttctaataatcaaatcaattcaatgatccaactcaatccaatcgaagatgagcaacaattagatccaaaatcgagttttagaactacagacaatctcaagaagagttacaagaaacgaaaacaaacctagtgcgaagaagaaggtcaagatcgcggagataatggtacccaaaacagcagagacaaggaaatgacaagcgtctttaatgcgttcgacgaaattcccaagagaaggacttgacgaaagagggtaagacccagattggaatctataagatgatgatgatgacgaggccatgttattcttaagaacccagaaacgatttacggtgggaagtagcagagttgggagagaggtttatatagaaagatgggatttttgcttagtggttaagagagagagggaggagatgggatgggatgtttcgctactttgcatttaaagcttggggtgagtttgctttcatggccagaatttgttgtaggtgaagaaggataatcttttaggggttcttttatatgtgtcacaatcagtgacgaagaataacacgaaagtttcaaacttttcgttttcagaaaaccacgagtcagagatagaagagaagagagatgagctcacggggcaaagaactttcttttattttcatttggtaaaagctattttgttttaaattaattaaaacattttttctttaggtaaaccaattagaggacgttatttcttaggtttaattcattgcaatttgcaatatactttgctttgaaaagtaaaaaagggttaagaataagatcctaattttgtattagtgctaatcgtctagtcgtgtgcttaaacgattagaataattacctttataaagaaaatattacaatattaaaaaaaaaattgatcatataaaatttcggcttaagaatagtatgattttaaataagtttctcgtgtaacaatgcaaaatactagatttttaaaaatgttaaacatcatttaggaacttcgatttgaagtattctaacttcatatatcacaagacagtgacgtcaaccagacagcatttaacttttgctgagttttgtacacgaatttagcggatgtctacaatgagtttttgaaacaataaagtggtctcaaaatcgtctagacctatattgcctagaaacaaaaacagatacaacataccgggaaacaaaacgtgtaaaaatgcaaattaaaggaacgttaagttttctctgtttttaagagatgttgattttgaaataggaaatggacatcagacagaatttccatgcaacttaggtctagacgatatatattcacaactgaatcgaatcgtaacaagttaatgtataatttgaatattcaatctaacagaagctcaactaaacgaggtttttttattataaattgtggtttaattttaaaatcaatttagtgcactctacgtcatagtaaaagtttgccatattattttgaaaaccttgaatgcagtatggttatgcgattttctcataaagtgtgttaataaatatgatgtgataataatccacctaacagttttagataattgtatgataaggatgacacacatcaactaaaaaaaaaatagtgaaaatttggtttgagttcacttgtctcattccactagttcaaaaatggtatttagatatgcttatttaaccaccacaacactcttaatataaattgacaaaaaaaagaaaaaaaacacttctatatgtatatatcgatttaacaagcacccttaagttgatctttcagaaaaattatccacttaatccaagtatgcaactataattgctcatcatatagcgggaactacagactttgtttacttcaaacaaaaataattatgagcagttgtgagttgtgacttgtgagctttgtctccacattcagttatagcaaataaaaaacgtgaacactttgccaaacattttttactgttgttggcttttctacaatccagtcctcgtgagatagtttactgttgataaaccattattgtattcgaaagaactgcagatatcaatttatacactaatcacgtacaaaactttcactcaatttgtttccccttcgtggttttaaaaatccaacttatggttaatagtgaaaaataatatatctaaaaggcaaagaacataggaaaacaaaacaaaaatgcatttaaaattttatttgtggacattcaaaacaaaaagtaattatttaatggtgcttaactaaccataattaagcaccataaccataaccgtttttacaatggattcggcttaaaataggtcgaacaagttaatttaaccaaaatttatgttacgaatgagaaaaattatcttatatctacaggttgactatctgtagacgtttttaatgataagaaaataagaattgaatttctatggatcttgagaattagttggaatacggtttggagttccttcggttatattttctctgtctctttttgtttaattttctagaaataaaatttgtttcaaagagattgattttttagattttctatacaatatttattagttattattgatgaattgtaaattttaataaaaataagtaaatattattgatttaaagttatagaaaattataaaacacaaaaaataatatatatataaaatcaacttgatatgtctacattaatatgtatgttttcctaaacaatcatataaaaaggaacagaaagaatataaaagaatgagttaaaattttaagtacataagtaatacgtattaattcactacttatcaattgatcttaattaatatattataaaagccaacgagcttaacaatgacaatctctaaactgcatgaatggaccgagtagctttgtaacacatcttctatgcacatgacatttaatacgtatctaatactaatgaattcgatgtcagaaaaaggatgtgtctgtctatctccaaagtaaagtattgaaacacttatttctcttttaacaaaaaataaataaatatctagagtacgtattatttaaataatacatgtaacatagtggcttccttataataaatactctaatcctgatgtatatacataaatgtatacgacatttcaacaaatatcggcccgaagatattttcatctaatcctaaaggcatttgggtccatgccactaggccagtcccatacacatatcagagttacataaataggtaatagcgaaggaaaatgattaaaaactcaggatacgtatttatgataagaatggttttctcttctgtgtatggcgtcatgttgttgtacgtgtgtagacgaaagaagatacatgtgtttgtactctttttagctctgaaataaaatgagcctacactcttattacataaggaatatacaaagaaaaactttcgacgtaaccactttattttcaacaaaataaaacacctttttgcaagattattaaaacgtgtatgaatatatcggagttatatttaaaatatttcaattttgaaactatgcatgatttttaagttttaacactcgggtggaatttttgtcaaattactctttttgtatgtttcagtttgagtgatcttaattcatattgattttatacattcaataaatcaagacatgtttcatatacatgatcatccacctattataaccatcaaattttctttgaaataaatgtattttattcaaataattttttactcaaattattttatccaaataacttcttatcagaatatatatatacatacacgtttttatcgatataatttcaatcgttgtggtggaggtcctccttctccaaaacctttatgttctggaatacaatgttgtttagaagaactgacatcatttggatgacacatacaaaggtgacgggttaagttgcatgcgtacggtcttaagcatacccgcttacagtcagcatctctattacaataatcggcgactgcatagctttgtcctttaaacacaaccaaaagtaaaacaaaatgatcttaaaataaaatcacccaaaagaaaaattatattaaaaaagaaaaatcaaatgacgaactttaaataattaaattgatgtccaacaaaaacacttttatttctttttctgcaaactcagttattttgtgaaatattttttttattaacaaattttagttttaaccattggtaaagagtaaagagatatgtaaatttttattggtttatttgaaaatcatattgttggtaaggtatacttactgaagataacgactaaaagagaaaccaataacagaagcttaaagaatatgctgctcttcattttcaaagtattgttatttttctattgttttgctttcggtggtgaagtttttttttttttgttattttgatatctttcaatggtgaaactgaaggtactctatatcgttctttatagtccaatttaggtggtagttgaccaaaaaaaatcttgaaaagtttgtttgtataggtgttattagtactagatttgactaactaaaaatagtcactatcaataaacaaggaaaagtagtgaaattttaattgatactagattttactaacaactttataacaatgactaagaaagtaacaatatatcacatttggcatgtcaaactaccaaaacatagttcacacgaggtcaacacgtttgaatctgttcccaactacgttgcgagtaacacatagggagatatttctcagaatcatgcttcccgaaaaatattttgcaccgaggtgatcggttggtccgaatcttgaattgcataaacgatgatttgcaaagtttgtgaattctgagcgagctcttctgaagtacatcaaatttaacggttgcagaaataactttgcttaatcaacataagaaagcaagcatgtataaacggaaaattcatggttcgtattgagttgttaaaagttacaagactcagattcgaatatgtcgtaaagtacaaatcattcaaaataatttagaagaaaaagtacaaaaagttcaaatatcccccatgaaagaacagcctccaatttcctaaggatctctcacttcaaaagggaaatacacattatacctgtttaactgtatccacacacattcgaagcttccatgaaaaacctaaagattcataaaaaggagtgaggttgaagatagatggtaaagacttcaggcaatcttgaagatctcattgatagatagcttgatatttaagacttaagagattacctcctcatattttagctttctttgtttggtttctcttaaaccttgaactcgtggacatggaaccatttcgtggatgaccatttgtttcctttcaccactggacatccacctgaaaatcaatgcataggatattgaagtttagaaactgatatttgtattagcttctaaagaaagcaacctctttagtcttattaccgtgcaagctcgaagggtctagagatgcatcaggcctcatgttccagaaaagtaaagcatctcgcttctttggtagaacagatagtccttctttaccacattttgagagctcgttccaccatgggacagcactaatgtttcctcttgctgcagggaacacagtctcgccaccatcatcgacatcagagctaaagaatcgtgtgaaaaaaaaagaaagattaaacacagaaatgctctgagaaaaaggaataatgagttttgtgagttacttacaggtacataagcacagtagctattcgttgtcctccattcttggtgttgaactcatctaagaaatagtcatagtgaggctcatacttctgcccaacttggtagtgaagaacttgaagaccttcaccattttctacaaacaaaagcgtcatccacaaactcaataagggatttccaaaggaacacaactcaagatatcaagagtaaatgcaactgatgacctcaagatgtgtcaacatttcctgctgtgcatctaagtattggataacaaagcaaagagcacttaccaacaggaatgaaggtgaaatctgaaatccttttctcaatcacctcgacaacttcgtcatgtcctcttctaagaaaagttcctgagctagttctcactctacacaggattgatacaacatcgattataaaacctccagagttaagctagaaggacacaagtaaatagtcactacaaacctgctatctttgctcccaccggttttctcatctaccacggttgacttaaccatactcggtttagcaaggctgatcaagtgctcacattcttcattagtctaaaagaaacagaaatctcaagatcacatctcaaacattccaatttaataactcatttctaacacaatatctccaaaatcactttagtgcagaacaaacaaagtcaaccctatccttaaaccattttcgctgaaacattcttcaatgaaagatctaaattctagagaagaacaaagtcaactcaatcgatcaaatttctaaacaaaacaagctcaaatctcttatcttgtctaacaagaaatactaatcttaagtcctaaatcaaagagaaacacgaaattaccaagaaattgtgataaacaacagcacgaggctcccaagaaataacttcaacccaacgttcaccattcccttcttcatctccagaactcgtctcactaacaaaacaatttccaaaaaaaaaccaaatcaataaaaaaaaatcaaaactttcaaatcaaaaacaaaaacccagatcgaaaaaattgccctaacctctttcgtacaatgttggtcaaatcattcgtcttggaagagtttctattagcattaggtagtgacaaaatcccgagacccagaagaatcagaatcactacgagaagaagtataagcaccgtgaaagcttgtgttgatcgtgacacagattttcgcggctgataacgaagatgctgcttcgatttagacgccatggaatttggttttttcttctggagattttgttttgttcgagatctaaaagaataacattgaacgaaagagaaattacgaagaagcttagattgaagtttatttatatatataataatgaggattaagaagaattgtaatttttcttgtgtgatcgaatctcttcttctttgtcttcttcgtctatgcagacaagttaggaaggtggctttgactttttggaattttggactcagtcttttatttttgtctttttatgttttgcacccgatactttttgtttattcacatttaacccgtttgttttgttaaccatgttttagatttgttttaatttagaaaagatgtactgtatgatgtaattttatcgatcaagtgaaaaagatattcgtggtcattcaaaatataaaagatataatttttggtattaaaaaaaaaattaactttgagacttattatttctgtttaagttgctacactaataaataagtttttgatctaatgcatttgtttcatattaacttaccctggatttgtttttgtttttggtttttatttatctgttatgttgctatccatttttactgatgttattttgagggtttacgaaaaaaagtaaaaagataaaagaaattcatgttcatgcagtatggctgacaacatgaatttgtttattttctatattgatacttgaatgacagatggatgaataatttttgttaaaaagtagtaaatttcaaatttaactgtttctttttatattgttattttttataaagaaaatttaaacttataacctagatacttatgaaggtaagtcaagaatagaaaatatgataggatttatcccacctttgttcccttgaaccatgtgttatataaaaacatattcaatgtatatgtatatgtttatctgtgaattaagatgtggtaagaacatgttagacattaccaatacatgatttgatcacttctttaaatctatttgtttatcttcaaattgagatggtcagcttttttatgattattgttaatcaaaaaaggttaggtaataataatatttaataaataaggatataatattaaatttttacaattgctaccaactaaaatggaaagccgattaaacttaatatatcctttttgatattaagatcatatgcttgaatcgtgtataaaacaacttaaaaatcttgagcaaacatatatgctggttgtggttgctacaatggtacaatcgctttaatttctctttatacaatattttaattttataatttaaccaattatttacgataaaaatgaactatatattcacttaatttttttaaaaatcatctttggatctatattgtcactattaccaaaatcaacaaattttgtgcacatgctgcacaacatagtctcaaaatcaataaatctggcaaagtatacaatctttttgagccaaaattccacacaccccttattatattttagttttacaatgttttatgagaaacctaacagttccaacgtaaatgcataacatattcgaaagattcatagaatattaagaaaattacttttctacaaaataagttcttagaatcagtgacaaatctaaacatgtattttgtatggggcacaaaaaaaatatatgttttatttcaaatatatatatatatatatatatattgtttcaatattatatttttttgattagtaaaatacaaaataatgataacaaaacttagaattgacatttttataagaaagaccaaccaaaaaagaaattagaataatgttatttggataactaataaacacataaagaaaacattgcaacatcaaagggatctaaacatgggaatggtaatactttactacattacgaccaaagatgctaagtagccattgtaaactctaatactcgcaaaacattataatcaatgtggggcacgtgtcccacatactcctaacatacatccacccatgcttgcaatccaaatgtgactattgagttaaaattatcatggttgctctgctttgctgatggttgagagtctgatgatctacttgtgtagcttgaaaatgacataatgaacaactgcctttttgtggggtgaaccaattgacatgcattatctaaactgatactcaaacaacaaaaccattgtcgtgatacaaaaccaaatctccaatatgtgaagctacagtaatatgcatgtggtgttttttaaaaaattaacaaaatatgatgtaataatagaaaaattacgatttttatttttgaaaagaaactaagaatattgtggtgacaaggtatatttatgttgatgttaaaaaaaaagaaggtcatattaatgttatcatgaaaaaataaaaaagtctatggtaaaaaaaaatcttgaagaccttttttacattttcatactcctaatttgaaatatctgtcgcaatttatgcagattaaaacagtatgaagcttcagacctaaagcaagaagttcaatgcaaaaccaccaattgacaaaattttaaatgaagaaaaaaagaaactcatgttaagtatgatttagtttgaaggataatatataacaaaccctggttattagtcactcaaatctactatctaaagtatataagctaggattaaattcagcaacaattctgtaattcaaataagataaatggagactcattatgcacctgatatgtattaaatctttctaatgcgtagaattgtagactgtagccaccaaaatacaatatagaacaagaatacttatcatctatggaacaagaagaaattagtgttccatagaaagattttattcaacagttacaaatcaacaaccacaccaaagtccagatccattaatatagaagcaataacacatgacatgtacagagacacacacgaacaaatatatacatatatgcaagacgattgatcttgcagagtttgctgctcatggttcaaaagacattgagcgaagttgcgtagagaggattgcaaggcttgaacgagaaacagtttggtgtataagtcgaaaacctctttctcttcagtgaatctgcagatccaagagccggctggttcaagtacgcgtatttgctctttgtccacctgaatccaacatacacatcgaaaatcaaagttaaatcgcaaaacagccgagacaaaaaccaaaaatggttcttgttttaggctcattgaatggttcaagatatctataaaggtgcaagattatattgatgagaagtaaacagagaccagtctttcaatccctgatgatcttcggtttccaggtcctccatgtccaagctttcttcaaagcgtttgtagtcctcatcctgcaatagatatagacatcagaaccaccttctcagagattaagaaataaagaacaacacaagaaaagaattgttaaaaccaaaaggacatacagagagattacgagctctgacacgagctgcagccttaatagcagaatagagatgatcctcttcaatgatctgcttctgtctccagaacttcttgatctgtttattggttatgctgtctccatcgatctttcttgatccatatccctgagatggaggaagaagcggtggaggaggaggcagcatcaatgactttacagactcatccataatctgtttcttcatattcataccacaacttcacctttcaccagctaaaatcaattcgatctatatatatacaacacaaagatcacacagaaaaagctactaatgaatctacagagattctgaatctaaccttcaaactaaagagatacacctaagattcttaagagcctaccaaataagtatccaacgtctacgtctacctttcaaattatcttgtacgttaagacaaactataaactccaactatacaagaaacgacaagtagacaagtagatgtaacttccaatcttcatcaacatcaacaatattttaagcaattaggtagtgtatggataatataaaatatatggtcttgaagcaactaatgttacatcattcaatcacagccgttgaatcataaatggccatcacaatcaatatcaccaaaacgtcattttcaaatgacgtcctccattaaactaacactattggtttttgttctgttcttcacattctctttaagccgatagagtttgttcttaaaacaatcagcttctaaagttcctcgtacaaaactcgaatcaccaaacaaaacaaccgatgattattgaacaaactacgaaaatattcgtcccaaatcattgaacaaatcagtcaaccatgtgattcaaactcacaacaaacacaaacactacaaatatgatcaaaatccaagccaacaacatacttaacatacatatcttaactatactagctacaatagacaagagacaaaggagagaatatgattgtagatgtttcttcaaaagcaagcaacaaaaatcagttccaaaaggcggttaaacctccgtattgccatccgtcttggcgctgaagcaagcgccaagaccgatggcaagtctaacgaccttactatctgagttttaagcaacaaacatctacaatcctattaacccttttaacaagtttatacatatctatgtaaaagcattaaaccctctgctttagctaagtctgggacgagacttgaaccgccttggttttgaatcgataccgaggagcacgaggaatgacttgactcggaccaaatccgtattggccaataccaccagtgagaggaggaccatcgtcgtagatgtaaccgatgaggtggttgcagctagtgcacttgatcttggttcgtttccgttggattccccagtaatttagggtttcgaagaaaggcatgatcttatcttctttctcgaatcggaatttctcggcgtcgacggcggcgaatgagagtgttcctttgttaccggcttcgaagtagaaatccggtggaaataaatcgttagggtttagattcagatctgatccgcattctttgcaagtgtagatcgttgaagccattgtttgcttctcaattctgaattctgatttcttcttcacgtctctcgtctttttcttctttctctgtgaggaaattttctccagagagagagacgcgtttctttggtcagcgccgtcggaactgactctgaatctctgccgttgttagattgggcttatgggcgaattttgtaatgggctttgtgtaatgatgttcataatgactttcctgtactgtttttattattttggggcgataattataaatatagcagaaactctataaattaataatgataggaccacataattttattaatttatataataaattaataaatattaattaataagataaattaataaatattaatttaaagaatatttacgtaaaacacaatattatttttttttaaacaatatttttaatttagattttctcgtattttgttgtttgtatattcaattatgttatatattttattttatttttgacttttttaatttattttcttacaagatattgtgttcgtatatctacgacgttaacgtatagcttaatccaatttttctttacacaaatcttaacaatgatttttcatagaaaaaaatgttacaaaaccaaatatgatggatcaaatactcaaagagttgtgtgagtacaaaagagatcataccaactgtaatctaaaaagaattgcaattgtagttttaacaaaagtttcatataaaattagtcttaaaatatttgtttaagatctatgattattaatttatgatattattggaaccatatttttacatagaaatttcaaaaaaattattatcttattatcttatcgattttgcttaatttttacattggcccgacttgagactagcaaaattaattattttattgtatttattaatttatcgagtattaatttatagagtttccactgtatgtgttttgttgttaagtaagatttgtgacagtaatggtgatagtgtgacactatttaagcagagtgatatttgaattagtaatgatttggtttgcttggttaataaattcttaaaaatgaacaagtttttttttttgcttattttattatattcatcaaacattttctgaaatttttctaacaaaaagagacgtaaacagtcaaaataaatttgttgccttgcaacgttgcaaatttcaaaatctacttgaaatctagaaatatgatttctaccacatttcgtcttccgtcgtgccaaaatctatttaaaatccaatttgatcaaatccaaaaggcaaaatttcctacatacagtatttatatatcacacatgacacatgtgcactattagtatttataaaataaatgtcaatgtcagcattttttttttgtgcaaaatcaatgtcagcatattcctctgtcctcaaatctcaatttgcttcttcttctccttcttgattacttaattaatcacaattattagtaaggtaaacttcttgtccaataatttgtgatacagtcactgttttgaagttgtcattaatgatgtcgggtatcatcgacaaatctaattcgctaactgtgttattagtattataaaattacaacaagcagtgatattgtaaatattaatatgctcatggaccacttattttgtgcaagggggataattaacaacacattcaattcaaaaacatattaataagttaacataaaaatagtagaattatcattcattgaatcttctaaccaaatgatactcatttttgtatttatttctaataaagtaactccactatgaagaaaaacaaacatatatatttgtagatgaaaactatatcaagatatgtaatatttctatgctaatctcgcagttgtgttactatctaaatttaaatttgcatattgtattatcgaattttgtggtaactcgagctctttgttttccaagaattttctttcattctttgtaatgtaggttcgtctgagccgaatagaaaaggataatgagagaatcgaacattggtaacaatccttccataagaagatcggttgatcgactatcttcttatggagtatccgattatctacgagcagtataccctcaaaatagtttgaaagtgataaaaaataatgacaattttttttcaatgattattttataccttctgatccgcttgatacctctagataaaatatagtagtacaaaaaaatttgaaaatacatttttgatacggcttttttgattaataattattaaaacattaaactctatactgcattgataccaagttatttaatttactaatcaaaacttcttttctttttcgtatctcctcagctggtatggaaaattctttcaaacttcctcatttcttcttccactagttatgtttggttttgcttgattcttaattgcataattagaaaatgtcacacaaagcatttttcctaactatttagactcctattaacaacaccattggtttaggtcaagattgtgttacaccaataaatatccattggccattgcttccaaaagaatatgtttgacctaacctaacggatgagaaagaaaactctttttgtttataatattactaatcaacaacgacacactacataaaaagatttacaactgttacaagagatagattcaaaattttgagctccaagtagctgggatgattatgatattcccattgttttactattcgacaaaaagtaatacaagtatggtcattgtgttgagtggtatagttgacatattgaaccaatcgatttaatttaatttcaactacttcttaaaaaatttaaaagcaatttaagcctattcttcttcctttttattaaatgtacacattaattgaacctatcatatcatagtatcaatttaaaaaaatacaataaaatcccatcattagtgttatctaaaataaaaacactaattatgacgtgatcttaaattaatttttagataaacaaaaacgaaaacagaatcacacaaatgatgacgtggcaattccctacgtgtaacaccacacacagtaacgttcctctcctcactctaagcccaaaaatctctctttttttttttttttatctcgcgtttataagaatcctctctctctctctctcacattattttctgtttggaatcttggatctttctttctgagatcattcgtcttttgtactgattttgagagatttcatttttgtttgtttaccgatccgccgccgtggatttttgttttccgatgacgatcaaagatgagtcggagagttgcggtagcagagccgtcgttgcttcgccgtcacaagaaaaccctagacattaccggatgaaacttgatgtctatagtgaggttttacagcgacttcaagaatctaattacgaagaagccactcttcctgatttcgaggatcaactttggctccatttcaatcgtcttcctgctcggtataatcttctacattcattagggtttttttctttcttctttcgtttcttttttttgggcttgatcaaattcgattttgtggataagggttttgctttagggcgtagttgtatcttgaaatttcatctctttcgcttagattattcaattttgtttcgaagttttgtatatgttcatcgacagtgactgatcttttgcgtttctcaacacgtgtcttgatccagaaacgattttattgaatcaagttttctttggtgtgttgttgatttctgagttttgcatttggcattattcttgcatgttgttgcagatatgctcttgatgttaaagtcgagagagcggaagatgttctcacacatcagagattgctaaaattggctgcagatcctgctactaggcctgtctttgaagttcgaagtgtacaggtaatctaagatcctgaaagctttcgtaagaaagttttttgctttgttgtgttaattggtttctctttcttcttgcaggtttctcccagaatctctgctgactctgaccctgcggtggaggaagatgctcaaagctctcaccaaccaagcggaccggggtatagatttatattaaattgtgatcaatcttgaacatttttatggcattgttgtaatctgtttttttaatcaaatgccgtttctttctgtctaaagggttcttgctcctccaacttttggttcttctccaaattttgaggctattactcagggaagtaaaattgttgaagatgttgatagtgttgtgaatgcaacattgtctacacggtgagacttcttgttttgttggtcattatgtttttgtatttattcgtatcttgtgtcatgtttaattttagttccatgtgcactcatgttatactatgttgtatattcatgcagaccgatgcacgagatcactttttcaaccattgataaaccgaaactccttagccaggttggtaattcttagtctaacatcactgtttcttgcataaacagtgccacagtttatgcttcgttacacactgtcatgtagaggatgggtgggtatttcttccatatctgcgattagttgagtgagaaaattgttttctgtttcagctaacttccctgcttggtgagcttggactgaatatacaagaggctcatgctttttccactgtagatggtttctctttagatgtctttgtagttgacggttggtctcaggaggtatggtgattttaacttttcaagaatgacttaacaagatcttgaattcctttctgtctctgttattactaactgagaaacttatgcactttggaattataggaaactgatggcctaagagatgcattgagcaaagaaatactgaagcttaaggtattttctcactatgaatttggaggatgcaatgccctaccgtagtgttattatactagacataggtcttgttgctatgttttgttgctttttttacttcaaaaatttgacagttgtaacctcactttattttctgctggctgttctacaggatcaacctggttcaaaacagaaatctatttctttctttgagcatgacaaatcaagcaatgagcttatacccgcctgcattgaaatacccacggatggaactgatgagtgggaaatcgacgtgactcagctcaaaattgaaaagaaagtggcatctggttcatatggggatctgtgagtattatcgttatataagctcgttttgtaaactgtaagtttctatttaaaagttaagagtaatttgtttttgatgactatacaggcatagaggcacttattgcagtcaggaagtagctatcaaatttctcaagcctgatcgtgtaaacaatgagatgctgagagaattttctcaagaagtttttataatgaggtcggtgtagttaattctcatcgtcatgtgaatattcccatagtagttcatagttttatatacagaaacatgcctgactggcatcaacgatgcctttgtctgacatttatattcacgagtaggcttgtgttttgtcagtccttgtcctacattaaacctcttttgatgtattaagtaaccaacatgcttgcttcattgtcatttgttactgatgcttttactgtctgtaggaaagttcgacacaaaaacgtcgttcaatttttgggtgcatgcacaagatctccaaccctctgtatagtgactggtaagttcttagtagatgtgaatttaagttgttatcacaaaaacatgtcatttgagtttactggttttatgtttgtgtcagagtttatggctcgagggagcatatatgattttcttcacaaacagaaatgcgctttcaaacttcaaactttactcaaagttgcacttgatgtcgcaaaaggaatgagctatttgcatcaaaacaacattattcacagggaccttaagactgcgaatcttcttatggatgaacatggagtaagacttgttctctggctattcatagactcatagtgtagtctttaaaccattgaacttaaattctgcaagcgtttctttatcctttgtctctatgaacctcttttatttctactagaatcgccacattctaacttggataattttgagcagcttgtcaaggttgctgatttcggagttgccagagtgcagattgaatcaggggtcatgactgctgaaactgggacataccggtggatggctccagaggtatgtatgagtttcatacctcaaatatcttgatcaggcttatgtgtttgtggaaaaataagcttctggagttcttagtttgatctggcattcttactttgacaataaacttgcgaaaacccaggtcattgagcacaaaccttacaatcacaaggcagatgtgttcagttatgcgatagtgctatgggaacttctgactggtgacgtaagggatctatctacttaaaatcctctgtctgaatctttcatgctagttagagagatactgacgtatcatgcatttataaatgaaaacagatcccatatgctttcttgactccactacaagcagctgttggcgttgtccaaaaggtatgctgcttcttagagaagaatgttgagtcattcaggtttttatcttccttcagatccagaggctaataaattgaagttgctttttttcaggggcttcgacccaaaatcccaaagaaaacacacccaaaagtgaaggggcttctagagagatgctggcatcaagacccagaacagagaccactgtttgaggaaatcatagaaatgctacaacagataatgaaagaggtaaacgtcgtagtgtgatctcccgagtaaaaaaaacaccttacaagggcgagaatctcagagcaggatgtggtgaaaacaaagcaggttggagatgaggaccctagcaaggacaagcactgcatatctttctttactcccttcagaaagccccgttactagttcttctgatcatcaacagttacacgattcaaggcattattttctggcctgccttgtacagtttcttttttgcttgacctagtttttgaccttagagactgtttttctccttttagttactctttgattcctttccacttagaaattagaaacgctctattacgttttcctcttttttttaccttcataagaaaggaagtttaatagagttgcatattcattagattatgcacgaaccatttaattagttgtgtatttgtgtttctccatctcaaaaatgacacaacaattactatctttctccatctcaaaagaagaagaaaaaagaaagtgtccaaaacactttcgggttatgtgtttaaaacaattaataacggacaccgtgccgtttggctatgcaaaaaaacgacatcatgattaggataataaatctctggagctccactaaccgaatgaatttaagatttgcaggttcttcttctctctacacctcttaacatctcccatattcgaataatagctcaaagttccgatttttataatttaccttcataacaaacaactgattcacttacttatcagccggtgactgtttttgggtctgcttcaattgcagtggaagagatggtgttcttgagttggggccgtccatcttccgagcaacagcaacaagtcatcaacaagtaagaatcagcataatcgttacttagaaagaaaaaaacaatatctttttgagcactagaaagctctctctctctctctgagtttgtgctttttataatcccagaacaggaaccttcaattatgacaacaagtacagaggagtttcgtctaggtctattgctaaacttaaggaagattcagagattgataaagatggattcttgatcaatcatgctcgtgttttagtcggttctggtagagagagttatgagaagggcaaaaaagctctccagaattggaagtatgttttgctttttatcatctcaaatcaatggaacatcaatcggttctgttctcattgatttctaattgcaggcattttggtatggattgggcatttgttgatcctgcaacacctgttgaaaccggtaagaagttttgcatttgcgtgaaagaagttcttccatgggtgatgcttcctctacaagtggtttatgttgacgaaagccggaaatcaagaaaaggccctgcgcatttcggttacggaagcggtactcttcagggacatttactcgctggagaagaaaagttttcgatagagcttgatggaaatggtgaggtatggtatgagataacgtctttctcaaagcctgctcatttcttgtcgttcctcgggtatccttatgtgaagctaaggcagaagcactttgctcgtcattcttctgaagctgtgctgaaacatgtcaatgcttcgtgatgacatcgaaaatgaagatatttgaataaacactttgtctataccaaaaatgaagatgaaagggaaggatttttattcagatggttaatactcttaatacataaaatatagctttgacctaaaacaagatttagagaaagctagggacaaacatttggaaacaactctgctcagattccgacattgttgtgatactaccatcatctagcttgaacaccttaacctcttcttcctttttgtcggtgaagtaaatagaatttggcaggcatccgtagaactcatgagccgaaaccgagaaacaggcatcggtagctatcacaatcgccttatctcccaaggacttgacttctacccattttaacagttcttcatcattcttgtaaaccttgaaacctatcgttttgggagggtcacgttcaaatggtttacaacttacattcccaagattgtcgtgtagcacatggataaagcgatgagcctgagcagcgaagaaatcatcattgccattaccatcttcccagagatcagcattggtataatcagcattccggaaatgaacaatggcattatcatcataggaatcagcttttctctttaggagattctcgtcaatgagacgatctacaatgtaaagttctccacgacatcttacaaaccttttttctccgcaagaaccgttagtgatgttttcatgtagtttagttccgtacctgatgatgtcgtaagcggaactaatccaccacataatgccttttgtatccacagcgtaagtaagaccttcgtcaagtacaaagtcagagaattgagctacttgtttcttgattccgttccatattcctcctttccagaacctgattttcccgtcgatgccgatcactagaacacgatgatctcctccttggactctgacaagaaacactcttttgaattcgctagctgtttctcttgtgcggcggcctacaaccgcataagattcttgaatctcggagactatgaactccgacagagaaatgagcttgcgagaacgtcctagtgctttgcgagagaggcagtttaggagatggaaattccggtatttgagatcggtgtctgatttgatcaaccacccttggtccggagaggaggcgagtgtgacgcgaaagaatgtggcacgtgagaggaccgtgccatgatacttgctcaaaatttgtccgtttgcttgtgcgcgagcgagaatgatttggagcggcttgaagtagatgagaggggagctcagggaatggttcttgttgacgccggaagcagaggagcgccatgacttgcatatgctccggaaacggatgagttcgatgacggagtaaagtctgagagcaattaaaccaagaagctcctctggtagctttgaccaatcacccatttctctcccctgtttttgctactattgttgttttaacgctccaaatagtttgtatgctttggcctattaaagaataaaatatggatagtgcatttttagtctatagggaaacaaaattcactcatttccttataaaaaatgaaaatgaataaatggtcggattcactagctcaagtcgagaaacttttacctgtgcagatctttgagcacgagagttcaactttacttcctttcaaaccttaaagagttgagaaaaagctcaatcagtttgctgactaaaaaatatataatgaaaatgaataaattgtaaggtgaactaattgaatatcattgaaaaccggtgaaatgttaattatgatataaaaataagtaactaacagagagaaatttattttatgctagatttacatttatatcggtagattttagtcggaggatatgtctggaaccgcagtttatgatgttgaaagaaaataattgggatttgatggtgtttgagtaaattttaaatgtttctgatcgagacagttttacagattggtaaaaaaaactattttgtgttgtttaggttttaatggtgtttggattgccaaatcttagagatctcttgaaatgtttggaattcttccaagcggcgtgagtctctaagatttttttgttttgctcattctgctttaaacctctatacttataggtacacatcaaaccctagtatgttttgtgttagggctgacgtgtattgtgaaatcttatctttataactaacgtgtacaatgaaatcttatctttataactgacgtgtactgtgaaatcttatctttataactgatgtgtactgtgaaatcttatctttataactgacgtgtactgtgaaattttatctaaataactgacgtgtacagcgaaatctcatctttatatcaacgtgtactgtaaaatcttatcttcataactactgacgtggtaataatcaaataattcatcatatatcttgaatgttttgtacgatgattttcatgtcgttttgcaaataaatttattgttttctaaaaaatagggttgttgggctctccaagcccattccaactttttcgattaggatgatattgtccgctttgggtccaagtggtaaaacttgcacaaatttgtttagggcttttttccaaaaaaactttcttctaattggagttggacttgattgatatattagacaatatatctataatcttcggatgtaaaaagttggtttgtttcccaacatggtgtattggagattctaaattttggaagacttgcttgatttcgtatttggggagattttgaaggataaatgatgtggtggacttttaaagaagttcttatggtttaccaatttgctttaaaaaaaaattccacaactttcagatgtttttttttcattattcgaacttttggtctaaaccgaatatttgaattggactgaactttgcaaatgtaccgaaattgataaattaagcttaaattttaggggtccaagacaaacttaggttttcaattcggaatgcttttacctaatccgaacaaaccgattgtttgcaattctttgcaattctaaattcttttacccaaaagtcaatccaaacaaccaaaaattctgaacatagttaattgattaccgagtcttaaatacactactttagtaaaaagaaaattagtctacaaaacctcatgataaattaggttattaatttttcgtcggagatcacctttctttcattcatgttttaccaaaaatttcgatcgagaaaacagttctttcgactacaaacgtattcccaagaacccgtaacctgactaagttagttcttttaaattttgaaagttggacttgagttctaaaccagaccctaacttagctaacagttttcctcatgcaaaatttggttcctaagagcattctcattggtgacttttttagagatgtctttattatagtttattataaaaattaacattattttaatttgagtcatttattagtcaagtgtgatgtctttaaaagtaagaaaatgtctttgcagagacatgaaagacagtgagtcttcctcctaaaagcactaaataacattttattttatttttcatttaaaaaaaaaaaaaaaaaaaactgtgttttattgtgcaatgaggatgatctaagtcaggttgttcaaagatttgtattcagtgtttatgtctaacaattgaaaaaagtattggtcaatcaacttgaagcaactcctctgcgcactaaattctcaatggataatgagtttatagtggaacctgagaacattgtcgatacccgtgaaaacatagcgcgggttacttgtggagttgtggtcttgtggaaagaattgttagagcatcaacagacatgggtactaattcgtgatttggcacaacactttcctcattttcatcgtgtacagtttttttgtttttgacgtaaaagaaagaaaagaaaaaaaccgagattcaaatgtgtaacatcaataccaaattatacaaaaacgtgtacacgaaaaaattgttttgtttttataaaagaatacatatttttataaaatgaattaactagtgattacaaaatcttatgtttatggttgtataatatgtatccctccggcaaatcctctaaaactgaatgcccacaaagatgacaatattacataaacacctattgagagattatgttgagaagcgaggctcgtgttttaatcaaccctcgaaacaatccttcaagactcttctcgaattttccaatccatacctcaacttcctcaagcttctcatgaagatcatcatgagagatagaatctccacaaatcgcggaatctacattctccaactcgtttttgaccatcttatcgtgatcatgaaacttcttgttcatgagaactaaagccaacttgctccttacgtcgttcccgttttgtcgtcccgacaagaactcaaagaaagactttaagaccgaaactgtcatataaacgacacgtctcattgcatgaatcacggccaagaaatgaatatcaccgtcttgatcataaccatgatctctcatcactaaccctacattaatgttctttaaagatccaagaagcttcttcacttctttcctcatgtttttcctaaacccgacatatcccgagacgtcgacatctttccttctcctaacacaagactgaagaccaagaacatgctcatgagtctcaaccatgagatccctcgagacgttgcatatatccattagcctcaacgaaccatcaagcatttcctccataaactctcccttcactttcctcttcttcttcttcttctcatcactaaacgacaacaccctttgcgtcgaacccatcttcagaagatcttccgaacagtcgtacagatcctccaaccccgataaaccggagtgaaccgactcagacgacgccattgtcgacgtgttcatagtgataagaaatttgtcgagcgactcctcgatcgctgctgtgctaggatgagatcttgattgtaagcttatagatcttacatggttcttgatcatcatcatcaccatattggtttgagttttgttgtttctctatactgattttattcaacgagctctatttataacataaaagtttgtaacatcaaccaacaaaacttcaacaaatataagatatatattattttacttttgtccgattgttatgggcaaaatgtgtgattctgagttgtcatgataatttttaaagtcgattgtcacattctgcgtaataatttggccacatagttgatgagtcatcgactgttatgcttccggtttcgccacataattaatagatagtcgattactctaaaattaaaataatgtcaacggtctatgaattgtctcggtaggtaaagaaatgcagatcttcctcaaccatattatgcctcgtcctatcatacctatattgtctgattagcctcaacatcttgtgttatgacacgtggaaaatagtcgaatctttcgttgattgtatcggcattttattgattgctgcaacatttgatttttctatgtattgggtctggcagaagagtcactaacaatattgaaaagaattcaaaattaagaaatcattaaatattgttactagtaaaataaaaattagatttacatattatgaataagactaatgcataatgttaaatgtagaagttacggaatcaaattttcaattgtaaaagtttatgggatctatatttatgtagctacaaattaaagagcatgtgctttgtgaaaaataaataaattatatgggaggtgcatttttcacttatactatataagaaatgatagaaaagtttgtcgtaataatactttgttatgcaaataaacaaaagaaaatttattagaatgacccatattttgaatttaattactcgaattacatttaaaaatataaattatatgagtaatattttgctgtaaaatgtttttattgttttgtaaagaaaaataatattatagaaatgcattattgtttaattccaatatagctaaaaaatcaatttatttacgatttttatttatttataatattgtcactccgtctttttgctcgactatgttaaatctgcgactcttgttgtgacaaatttattttgtacgttaaatatttgacaaaagaaaataataataattttttggtgtaggttggcatccgatccagagtatatccttaagttcatgatgatttgcattgatcctctatctttggttacaatttcaatgttcaacataaaagcttttacgtggtatcttttgtaatagagatgctcctaagatattaatgacacgcgagtttctaagatatgaactagacagtagcctgtaaaaaaaaaaaaaaaactaggtagtagcctagaccacaacggaacatttaaagtttaaaactttttttagtttaattttgataacatatatgatttcatatcctgtacataatcctctttcgataaaattctgatattacccaaaatttggtttacatatgatagtttagcggatattatttgtttgtcgagccaaaaaaaagaaagaaagaaaacaatttttagttattacgtaatttatttgatgactataaattattttaatctaagaaatatatttttaaatatttatcttgtttaagtgatgttctcattctttttatctaagaaatatatttttaaatatttatcttgtttgtgttataaatcatatattttttgttattgatcaaatactttcttaaacaataatttataatttataacacaaacaggataaatatttaattcacgtagttatttaagatgtgtgtataataaccttatacatcacttaatttgcacataggggattagcaaaaaaacaaaagtgatttataattgtggcgtgatatatagtttgagtttagtattttcttggctatgctctttacttctttagttataaatattaattatacgctacatttataaaattataaatcgatattagaagatatatgattggattgaaactataaaatcatgtcttctttacaaaagctacatcttttttagcactcacggaattatactgctcaacagagtctctacgttgaatgactagtcttcttcataagcaacctagctcataatggaaactccaagagttatattaagctcttgagcaattgtgtctgtcttaaatattaaaagtcttaaaaaaatgaggatctttgcaccattgtcattgtttaattatctctctgtgaccacgaacacggcaagctctcagattattcttatcatcttgtctccataattgtctattattgcttccttcatattctctagagtacatagtcatagatatgcaagatatatataagaacatgacagctaggagtaacttatactaaaagaaaaagctggaggctatgataatcgatagattacacaatgatggtaggcgaatcatgtattcgtggacctcgcggtacgtacatttcttcctaatatgtatctatttccgtagcgttctattgtttaatgggggagacaaagaaacagatgttgcagcaaaatacactagataatgaaacatgacagaagagaaatcaaaataaacaaaagagtttattcaccaaatgattagaatttggtcataaacaatgaaatagactaataccagaatgttgaccacttataaatcttcttcatgattccattaacgttgtcctctgttttcttgtccccctcaatgatttggtttgtactttgtaattcaactgataattcacaaatactctgcacttgggctgcttagtgttaaaacagagcatataagaaaagattgttcaagaagataatagtctcttcttgcagccaaacaagagaaacgatctctttattcagatactctgcctgatttaataccccaaacatatagcgtaattgtcaaagcaaatatgatttgcttgatctctcaagcaacaatcccaggcaagatcaataaccaaaattgttcacaagaaacaatctttactcagatactctgcctcatttaccccaaacagatattgcaattgtcaaagcaaatattatttgcttgatctctcaagcaacaacccaaggcaagatcaataaccaattatggtattcacaatagctcataagaacagagtacatgacactgaaggcaagaagctgatacaaacagaataatagaatatgactgttcatatagaaacacagcaacaactttcacccaatcaataactcgagtgttaaggaaacctttagaaatctcaagtgacaataatattaccaacaaagttactattataaatcactgctggtcccttaagaatcgaacagcatatttcgaaacaaattcattgcttttggagtaacactacttcaaaaatgaaatatggacttgcataaagaagaaagtcggtaaagctcagctagaggataccatttatggaaccaagccttgttctttagcttttttcaaccatttcaaggtagtttcaagtgtagagtacgcagaagcatctgacaaactcttgctatcaactgcataatcaaacacttcataagcctctgcgaccttgccacttttaaccagagacctcacaagtgtagcataaccattactctcaagctttacaccacttgatttcatcatttcatataactccatccctttatccatcaaccttgctttacacaatccatgaagcaaagtattataagtacaatcatttggagcacaccctcttgcttccatttcttctaacaaactcaacgcacctaaagactcaccttttctacacattccattcatcagtgatgtgtaagtagcagtatccggctcataccccgcatcaaccatagttttcaaatacatcctagcttcctcaactctaccagctttcgacagtccaaatatcaaagtattgtaggtaatctgatctggctcaacaccttcttccttcattttcttatacacaccaaccgcctcactccctttactcagtgtgcaaaaacctttcataatcgtgttatagaggaaacaatccggcttaaacccagcattacctaacttactaactagatacattgcctccctcaagttcttagagttacaaacattatcaatcaagatagtgaagctaacaagatccggcttaacatcgaaatcatctctcatctcatcaacaaactcataaacaacatgaagatctttgcatttgcacaaatgcttcagtagaaagttataagtatatgtatccggaggagagtgtttctcagtgagctccttcatcaaatccttagcttcatcaacccgacccgtttcgcaaagagacctcaccgcgatatcggtagttacttgatcaggctctaaaccattattaaccatgagattaagaactctatgaacattcgaaatcgacgaatcaggagctctacaagcatgtgaaagcaagataaggaacgttgaacgtcccggcctgaaattaggctgcgatttcaaaatatgctgaaagagtttcaccgtatcgttgacgacggcgattgaaccgtatgattgaagaacagagttgtggaacttgagatcgagtgggattcgtgaagtggcggcgattgaattgaagaggcttttagcgtctgagagatttggtgacttgaatggattcctcaaggagggctcgcgaggggcttgagtattctggggaagtttggctgaatctcctcccacggcggttctgttgcgaaaatctcgcggcggcgctggaggagatggtgttgtttttctgaccaataagttcgccggcatactacgaaacgacgacggaactttccccattttttgttttctttcgattgatcgcaaaaaggttttagctttagggttcttgcagaggtttttgtgactctgttgtgttgaaaatggacagaggacggcgtatagtagttacactcgtgtactctagttgcttacgttagcaaatgagagaaaccgtggcaagacattgggcctattgggcttgttaatatcggcccaaagtgtgggtgaagatgcattttgtctgttgtgttgaaaatggacagaggacggcgcatggtagtctgttgcttacgttagcgaataggaaaaaccgtagaaatacattgggcctattgggcttttgaatggtagcccaaagtcagtttgtgcgatagcctctctccctcaaggcctcaacacagtattttctttgctttctgtacaagtttgtgggcaaagccctaaaaacaacaatctttccgcaaaatgttctctaaagaaccgaaagatcttctgtgttttctcaataaaccccatacaagaacattgttctacagaccaaatcaatagagattaaagaaaggttttgtaaggaagaacacattttgtatgaattttgaacatgttcaagagtttgtgttcacctcaatatctaagagaccttttttgtatgacttttgcaattctttaatcaacaactacaattttgttgatttccaaatgaccaaatgcagagatttatcattaagaaacaaaacctcagaatttgttttattagataactaaaaacgaaatgaaatgttctaacacaaaagttgtcaaagggctcataaggctcaaagctacattctcttaggattaaaacttactcaacaaacaaaaaaaaaagattaagcaaaagtgaaacagagccatttcttgaccgctggtttatcaccatcttgtttcctctgtgaattcgtcttcgtcgaactccgtcccgtctttttatcttcaccggctttgctgaatatcaccgtgaatccatccgccgtcgctggatcattcacatcccattccccgaatttcggcaatgcccttccagcttcattcgacgccattatcgatcaagaaagtaacaatcttcttcttcttcttcgtcctcttgttgttgttgataagtcagatggttttgtttaaagattctaacacaggatgcagatttatttataatggagagaagagagaaaacagataagtaagattgtgctttgaaatcttcctacgaaatggactcgtttcagacacggcggaatattcttttggctacttctttctttttttaatgtcttaaaatctttctgaggcacaaaaataacaaaatcgttggccttccgcgtaacaaatctaattatagccaaatcatatccatggctgatctgtttcttcattttcacgcggtggttttatgattctctgatctttgtttccttacatacacacatgaaccagagactaagcttttttgtttcttacatggcgattacaagctacccatttcatcagctttcttcctcagaagatacttttgtactttccccgtcgaggttttaggtatgtccccgaaaactatagtctttggagccatgtaatgcggcaaatgatctcgacagaacccgataatctcctcgggtttgatggtatcaaatccttctttcagctttacaaaaccgcaaggagtctgtccccagtgatgatctggacgtgctacaacagcagcttcaagaaccgcttgatggctgcacaaaactctctcaacctccactgagcttatgttttctcctcctgagatgatcacatcttttaaccggtcttttatctctatgtacccgtctggatacttaacagcgagatcaccactgtggaaccaatctccctcgaaagcttttcgtgttgcctctatgtccttgaaatatccactcatcacagtgtttcctctgaacataacctcacccatggttaaaccatcatcagggacagtctccattgtcagcggatctttcacatcgagcccttctagacccaaatgctgcactccttgtctagccttcaacttagttctctcctccaacgaaagtgaatcccattcaggtttccacacgcaatgtgtccctggaccgtatgtctctgtcaaaccataaagatgagacacattgaaacctaattcttccatcttagccaggatctgcggtagaggcggtgacccacctgtcatgatctcaaccctgtgaggaagcggtttatgttcagtcacagtatagttcacaatcatattcaacacagttggggctcctcccatgtgagtcactttatgcatagcaatgttcttaaagatcatcttaggagagactttcctgagacagatattagtaccaccttgagctgctactccccaaacaagacaccatccgttacagtgaaacatcggcactgtccataaatacaccggataaacagacatctggtgaagaaagactgtagcaagagaattgagataagctcctctatggctatacactacacccttaggtctcgaagtcgtccctgaagtgtagtttatactaataggatcccattcgcatctcggtttgattatctcaaactcgctatctccggatttaagcagagtttcatattcgtaatcaaaagagtactttgaagcaaaggtagatgagctatcttcatcactatcatcatcatcattagactgagagatcaacacaagcttcagactttttctagttttatctgatttagcaagaagatcaagagctccatgagcaatctcaagtaactgatgatcaacaaagaggattttggcctcggagtgtgctaacaaaaccgacaatgtggaaggatcaagtcgagtattaagcggacaaagaatcaaaccagccataggaacagcgaaatgaagctcatgcatagctggaacattcggagctaaagctgcaacctataaaagtttcctcttttatcactaaacctaaatcgagaaccctaatcagagcagaaaattgaacaatttaaagagactaaccacatcgccacgagagattccgagattggtaagagcagaggcaagacggagacaacgttgataagtttggaaccaagtgtgtttaacggaaccaaacacaagagaggttctgtctctgtaaaccttagcggatcgctccaagaacgtgattggagataaaggagagaaatttgcaggggaacggagaagaccctctatagttctccatgattccggctcggaatcgtcgggaaatccgccggaatttgaggttgaggagaagggagaagaagttaaccacagtctctggaaacgtgggttgaagattctgaatgctcttttggttaacaagaatctcatggttaacactttgatttggctgttgttcgacttctcaaaaaaaattgaaactttattgtatctgttgaagtttatcaagacgagtttgatgattctctgttgtgggaactcatcagataatgacagtcgtgctgcctcgtgattaacgaacggtgtgtgatttactgaatggaaaacattacaagtttcaaattcaatttaacggatatatatatacttttaaattgaatgcttgcaatttcatataggagttttagtacgcgacaagtcacaagagacattaatataaatactatagagaaatatgctataaacataagacaagttggcataatttatggtggatctatcttccttgtacaatattcatattccccctctcgaggtatacgattaagaactatagtaatcttataaaaaatattattcgatccctctttgattaaaaaacaattatctgattaaagagaccctaatcacaattacgaacttggactcaattacggtcgcgaccagataaggccaaagccaacaaaaatatatacaaatgaaatgatatgaaattagtagaagtagaaccattcaaagcggtggacactggaacacaacacaaacacaagatcaacgagaaaccaaacaacaacagcgaccatcgagagaatccactaagaaaacaaaatagattaaaaaggggtttctcaaagtttctcatcatatccattaaagtagcctcctttttgctttctccgtctctctctcttttgtccaatcaaaaagagtttgtgattcttctttatcgtctccttggagagatatgaatggcgatgagcttcctttcgagagtggtttcgaggtttacgctaagggaactcataagtcagagtttgactcgaatttgcttgatcctcgttctgatcctatttgggatgctataagagaagaagctaaacttgaggtttccctcaaattctaacactttctctgcttcatcgattcttattcttgttcagataaagtaaatgtcatggttttgcgtctccatgttaatccacagttgttatagtagtatccattagggtttagaattagtcagtcttgtttctctctttgaaagccttgatatttaatccaaccaaacataggacaagaaagtttgagtacagtttgtgaaatgttgaatcttataatggtgaatcttgttgtgcgtttcaggcagagaaagagcctattttgagtagcttcttgtatgctggtatcttagcacatgattgtttagagcaagctttagggtttgttctagccaaccgtctccaaaacccaaccttgttggcaacacaactcttggatatattttatggtgttatgatgcatgacaaaggtattcagagttcgattcgccatgatctccaggtaaaacattccacctaatactgtaaaaagacatgatctttgttgttttcttatgtatctcaatgatttgcaggcatttaaagatcgtgatcctgcttgtctgtcgtatagttctgctattttacatctgaaggtaattctttactcgaagttgagagacagaacatttctcacatggaatgagtgacttatgaagagttttcccacttgcatttcagggttatcatgcgttacaagcatatagggttgcgcataaactgtggaatgaagggaggaaactattagctcttgcattgcaaagccgaataagcgaggtagttggtgatcattgtcttttggttgagtcttgctggagctgcatttttgagctcaatgtctgatctatgctgtggtttctctcaggtttttggcattgacatacatccaggtagagttttgagcttcatatctctgctctcatctgtttgaacattctcagtttcccttctctgttgtaatagttgatcaggtttaccggtgaattgattgctggttatacatattacttgaattctctttctgcatagcggcaagaattggggagggaatattgttggatcatggaactggagtggtcattggtgagaccgctgtgataggcaacggtgtctcgatcttacatgtaagcgtctcttctccaaaccattgcctgtaaattcaataccgagatcatgattttcctttcagtttttcaaggctacttgagttttcactgtcacagggtgtgactttaggaggaaccggaaaggaaactggcgatcgccacccaaagataggtgaaggtgcattgcttggagcttgtgtgactatacttggtaacataagcataggtgctggagcaatggtagctgcaggttcacttgtgttaaaagacgttccttcgcataggtataaaagagaaaattcatctgacaaatcttcatgacctggcactgttttgtttagttaacaaaccctctttgtattttcgaagtgtggtggctggaaatcctgcaaaactgatcagggtcatggaagagcaagacccgtctctagcaatgaaacacggtgagtttgcagattcttatatacttctggctctgtgtatatgtctcgctcgggatttagtagtgactgttcttgaacgaatatgcagatgctactaaagagttctttcgacatgtagctgatggttacaaaggggcacaatctaacggtaacttgcacactcacaatgaactctgctatgaagaatctgaaattacagttttactgaaagatctgaatctgaattacctatttacgtgtcttgaaaacaggaccatcactttcagcaggagatacagagaaaggacacactaacagcacatcatgagatctttgtatgcaaatttcttaccatcataagctaattcttgtatgctcttgcttatcatcataagctaatctcagcatttcctcaataagttgtctaataaaagattttgttcactggaagttttcagtctcaactcaaaagtctcagacaaacataaaagtgtaaatgattcttgcttgaaaatgaaatctattatctcaaattattattactgaaaaaattccgcagacaatcgcaattcaagtaccggaagaaggaacgaaaactcaaaatcataagcatcaaagcttacataataaacaacaagatgactagaaaacaaaaaagaatcaagcatgccttgcctgaaaatctttcatgaaagcaacaagctt

SEQ ID NO: 242 - DNA, 83131 bp, Arabidopsis thaliana
attcggttggattagagagaaaccttgtcaattcaaagctattcctttctgtatctccctttgcaaaacgcagatccaacgatgaaaagcagtagaaacaaagagatctaaatccaaaatcgatctagagaaatttcaaacccaaaaatcactgatgaagatgtatgtcagtaagtaacgattgccacctgcgaagagaaggacgaaagagattttctctgaagaaattaatgggcctaatgggcctagtcacttcacaacaaatgtggcccagctttagctttcttcaactttctctttctttctcctctctgaacgaaaaagagtgagtcgtcgtcgccggagactggagtttttccgggaagaagaaatgggagacggaagagaaggagactgggaatgtttaggatgcagaaacaggaattatgcgtttagatcattctgtaacagatgcaagcagcctcgtcttatcatggataataatacttctccaaactctaagtggcttcctcgtatcggcgattggatctgcactggttcgttctttcttctcctatctcaattcaattcttttatagcttcccagattgtgctaatgaactagaagcaaaactaggattgatcagaatcgtaagttctgagttcaaatccttaaaactttcaaatgcccttttccatttgcggattcattagattgaattgtgaatgaaaactaggattgatctaattcgtaagttctgagttcaaatccttcaactttcaaatgcccttttacatttgatgtttcattagattggaattgtgaattaggggatttacttataactaggttgagctgttttgtgtattctgtgttatgtggtatatggaatttgctggtgggtgtgttgtggtgtgcgtgcgtgtgtatcttcttcgttctacgttttgcgtttgggtgtgtggtgtggtgtggtgtggcaataggttgtactaacaacaattatgcatcacgagaaaagtgcaagaaatgtgggcaatctaaggaagtagcagcattgtcagcacttgctatccctggagcttctcttcaaactcatctccattacttcacccgtggacctgagtcacatgatcaacctggttctttactcgcattctctaacgctacaaatcaagcttcggttcataaagaatggaggagtggtgactggatttgcagatgtggttttcacaattattcctctcgtatacaggtgaggaaatgggttcacaatgcaaaaccgacttgcagattccggcttgttgttttactcatttctgttttgtatgtctctgcagtgcaaaaagtgcaatgaaatagctccactaggtaaggtttttgtctaagaccgatgcgcgtgcaatcttatataacccgaaggtgtctgataatcctttcacgagttttaatatgggaaagtttattttgggttgcagcccttggtacaaagagattagcatcagaagctttggctcatgaatgggatagcaaaagactgaatcaaggatatgtaaggattagttagagcgcataaattgattagtacattcatcaattttacttgctgcttaaccaacctctgtttcttctggctcgttgtgcagacaagcatgcaaacacagtcagcgatatatgcatcttttcctggtatgagcctaggaagggtctcaaattggcaacttcctctcccgtttctacaacaacactcaacacctgctttacttggaatggggtactgtattgatctctggtctccattgttttcttgttttctaaacgctagaacaatggcgtgatcttttgcaaccttcccaattctttgtgttgtctgatttcttagagtgaaacaatggcgtgatggcgactggatgtgtacaaattgcaagaatcacaattatgcatcacgagcagagtgcaataggtgagttttaatctagttttttcagttaataattctgattctttgcattgagttaaggtaaacaaaaagccgaagaaaaaaatattttcttttccatgtcaggtgcaagactacacgagatatccttgatcaggacataactccaacagaacaatcttgaaaattcatgaagagtgttgttctcttgtgtatcttaatctagtgagacatggctacacattactcgaaactaacttgaatatataagcctcaaaatgttttggaacagagaatgcagacacagctacaaagcatttcttaaccctttaagatgttcttaggatcaagaggcggtgtatcgagttgataaagattaaacgccggtccaacaaaccggaaaaaaatccaacctccaatgacaatgtatatcgacgcgtaagccaatttgtttagccaaaacaacaaacctttctctccaacataaagctccaatgccttctcattcaatgtcatctcttcccatggcttttgaacagtctcttttttcttcccgctttgtcctcctccttctcctgaaccctcttccctcattttccttctggatcctcttttgaatcttatctccactccatccaacggctgagtaatcttctcttcatcaccgccactgtttacgcagtttatcgatagagttcttctgttgctacgatgcaactggaacttggtttttgtataagattgttgcttcagattgataatcgttgaattgggagctaaaaagtggagacttttcatttttgttgttgtttttaagattttgaagctatgatgaatgaaggaagaaacgattttgcaaaaagataagcttcttcatcttccaccgttaaaatcctctgacccaattatgtctcgacaggtggcgtttcgaaattaatgggcttttaagaattttaaacggcccaagagctttaattggctgcttaaataccgatattacccttgtttggttaatactagaatttacaagtgtaccgtcacagaatccacactgacaaaagagtactagatttcaaatcgtggactaggaaatttgaattttctgtaacaagagtactagatttggattgtatcgagcgtatctcatggaaaacgatccatttctccggcagtaccagccgtcggagcttaagatcgcttcggagtttctgacgaattggcttccttttttatctaaagatctatgcaaggattgtaatcaccttctctccaatcgaatccgttctcttgacccaggtaacgattctcaactttttcttagaggcgagagactttctggtttctatggatattgaaattctgtatagaaagcggagattttcttcattattgtacttgattctgcttttttgattgatgttctgctaaatgataaggttacaaaattagggtttggtaattggaacaaataggaggcgagagagtagcaagtacgtttctaaatttgtgaattaagttatgatgtggagttgcttatgagaaatcatgtttccatatgtgtagcacattgtagtaacaacactgacaaagttgatggagagtgtaaaactggttcttgttcagtggtggaaaatatgggatcagaaagagctagtaacaatgtggatgataattatgatgagaagtcggaaaatggcgaagactgtgataatcattcgttaggtagttggaagggaagtgaaattgtatttggttcctttcctgaagattttagtagtgtattgcaatctagaccagctgttgttgaaacagcaagccctcgtatgcgttgggctgatatggcacaagaggatgagttcgatgaggaggaggaggaggaggaagaggagagggattcgagtaggaaaggttttgatgcgagttcgatgaagactccagagaagcctaagttgtctagagatcagagagagaatctcaggctgattaatgtgaagagaaagaaagactttatttgcttggagagagttaagggaaagattgttaacgtgcttgatggacttgagttgcacactggtgtttttagcgcagtggagcagaaacggattgttgatcaagtgtatcaacttcaagagaagggacgaagaggagaacttaaaagtaacttcttgttttgatctgaaaatgctcttatcttaacttgtgacctatttttaatctgaatcttgtcttgttctctctctgtagagcgtacatttactgctccacataagtggatgagaggaaaaggacgtgagactatacaatttggctgttgctacaactacgctccagtaagtaacgttctctgtcatactttcattaatctgtttcattcttaaaaaaggagttaagagttttgccttcttgtattttgggttgataggacagagctggaaacccaccgggtatccttcaacgtgaagaagtggatccactacctcatcttttcaaagtaatcattagaaagttgattaaatggcatgtactgcctccaacttgtgtgcccgatagctgcattgtgaacatctatgatgaaggtgactgcatacctcctcacatcgacaaccacgactttctccgtcccttctgtaccatctctttcctcagtgaatgcgatatcctctttggctcaaacctgaaagttgagggtcctggtgacttctcgggttcatactcaataccgcttcctgtggggtaagcaagttcgtaagaattcccagtttcaaaactttcggccattccttgtcgaatagtatgaaatcaaagactgttttttttggatattttcatatttatcagatcagttctggtgttaaatggaaatggagctgatgtagctaagcactgtgtacctgcagttcctacaaaaaggttataaatattgttgcatcaattttcttctataaacaaacattttttctcttatgagtatgtttcttcccggttctattcaacaggatatcaattacatttaggaaaatggatgagtcgaaacgcccggtttggttcaccccagagcctgatttgcaagggattgagccattgccattggacctgaaccggtctggttctacttcaaggttctcaagattaaacaaccataacggtactaaccaaagaggacatggacgtagaggaggaggcaatggttatgactcaagaggttactataatcctgagagaagcagtgaacacaatgactctggagactggccatcaagccagagaagaggaatgccacgtcctagtagaagaaactacggttaaattcttcaacttctgaaactgaaatttataagttctttatttaattaaccaattttccatataaataattaatttgtgcaacatatatacataagtcttgaattttttttcaaacaattatttatgtccggggtatttttatatccgtttttgaatttttgaccgtatttgtaattatgtatatcttacacagttcgatttgtcatttgtgtgtttagtgtgaattgttctgtggtttgtttcgctttacttttttgtcaaattttccaactgatgtgactaaagaatttcgatctacgagagcatatatatatagtaatcgataattgatttgaccaagtaaccaattcttcatttatatgtttttgtgactatagtgtaagtgtacaattatctttttcaatttttttgactgatcacaacttatcgtataatcaaacctttcgaacatgagtgacttatatgaatgaggcctttgctaatctgattttgaaggtgtaacttataaaaacagctcaagaattcttatttaaataatttacaattttaccggatgtaagacaaattaagggaaaaaaataagaaccaaagaaaacgaaataatgaaagaacacgtgggtttagggatctaataagaatctctttcttaaaatcaatagaaagagagaagaaaaagggtttgggctctattgagtatgacacttttatatcaatgaaaagcgacgatgtgttgtatatgagatatggaatgatcttctcatctcaaatccctattcgttttttaacatcatcattctcttttccaccattctttctactttctaacaatgtatcctaccttttttcttcttcttggtacatactctattacttttactttctttttttttgtatttcaaaaaccatgcatcttctaaacaatgttatcggttgagttaagtttccgaaattacattaccgccactattatatttttctaactttggtatacaatatagatgattaatcattttatgcaaggtttagtgatcaatcattttgttaaaaacattatctaaaaattagaattgtcaaatcatgttttgttatgcaatgtgatcatgaatttcgtggattttcaagttttaattttcttgcttggatatatagtatagatatagagaactctcaaaataattatgactcttaaactcatcttatgacactgcgattaagatttaagacacagtcagcatgcttttgaacttattagggaacccctactacatagtacatgattttccttgtctgattttgaaacttgtctcaagttttatagatacaaaaacaaagaatgaaaaagttcaagaagccaagattaattattatatgttgggttgataggggagtgagagaagagagcgatgaaaaaatgattacccgtaagaaaaggaaagcaaaaaaaagcagctttgatgtgttgttgttgatttggataaaagagatgtgtgtgtgtgtgtatgtgcatacaaaacaccttttcatattagcccatcaacatgtattgatctgtcttctgttgaattgatcttgaccatttatcattccaaataacgacccctgattttttgttaaagttgtgttatatatttattttttatagaagaactttgtaacattttctgaacgttttggtccttcggaaaaacactcacctaaaaccctatttcttacaaatatgttttcgaatagtattgatcttttaaaaataacgaattgacacagtctttaaacaaacattctttccccacggccaagggacaaactagtttttaataaaagaaaacatgtacatttttctcttaattgatttagtagaatcctccaaatcaaattaagtattaatgcttataaaaagagattaatcattaatgaagtgaaaacaaatctctctcctcgttttttcatctttatctcagtcgaagcaatgataactcttctctaactttctaggaaactaacactttgctttttctttcactcttcttatcctattcattcttagaaaaaatgtacatgcacgagcacgacgtaatataataatcatattaatcacccttttctaaaatatgtaaaatcaaaattctgtgtttcaagtttcgagttattcattttcccaaatttttaattactttatccaaaaaacaattgtattaaatcttcgtttaattggtataaatcattagttttgtgtacatattggttgcaaaatcactagtggtagtggatatatatttcttatagcaaaattataagagtatgtggtttaaattggtagttcacatcatcacactattaaatggttggagtatcaatggaatggaaaaacgacatcactattaaatggttaaaaatatatgcagaattgatacgaaagacaattctacggttgcaaattactaatatataggacagattttgagtcttcaagaggtagagaacgtcatgtgcgttgaatattctatgcaattttctcacaccgtataatcaataaatcgacagtgagagagagatagagagaagtaataaatgtcacaaccaccaatgtaactggtgcagttgtaggtgaaaggtacatcttctatccaaaataagaagcttacaacaagagacatttcccgtttatatgatgtaatattccatcttttaaaccatatgtaacggctttaaagcatgtatatttacactcatatttaaatatgcatgcataagcatgtcatgattgtttcatccatcttcacgtacggtgtgtgtgtttgaatgaagataggtgatgatgatgaagatgtgtgtgttgatgatgatgatactaattctcatgaattcacttcatttattgtttgcattgcatttacgttatcgaagggcgtgctctttcttcgacaatgaaattccttctgcaccactcttactctctcgatctctctcctctctctcactatatattagtattaaattaaatcatggtgtaacaaaatgaaattaagtcatgcatagaaataaaataaagtaaattaaatagtgaaagaattgttgttttaatttcaataaactctagaataattatccaagcaaaagttattattataataataccaaagtattgattttaacagaaaattatatggcagatttgattttaggtttattcacctagctaggtttcaaaaatcaaaaggagctttgtaactaaaacagtatgtttgttagttcaataggtagttggcaaaaataatgagatatagtttatcatattaaaaatattttaacatacacagattcttcacacaagaaaacatacaaagactaaaagtagaaatttagttgaaatcctcaataaacaattttcactttcctatggtatttaatgtaattaattattatttttgttaactttaagaaacagcccaaccagattagtaacaacttttgaggttagagcaagaggaatgttttatataagagtcagaacaagaatttataacatgggatttgatcatttgaacatggaaatgtcttgtcaatttgcacgtatatatgtttattttaatataaaatctgttttgttaattacgttagtaacatgtatatatgtacataatatagtataaactctataaattaatactcgataaattaataaattttgtcggtcctaaattggggcaatgtaaaaattaatcaaaatcgataagataataagataataatttttttgaaatccctatgtaaaattatagtcccaataatattataaattaataatcataaatcttaagtatatatcttaagactaatttttatatgaaatttttgttcaagctacaattacaactctttttaaaatataactggtatgatctctgttgtactcacataactatttgcgcatttgatctatcgtagttgattttgtaaaatcttttatttgagaaagcatggctaagatttatgtaaagagaaattggattaagcttcatgtttacgtttacgttcacgttaatgtcgtagatatacagacataatatcttgccgaaaaataaattaaagaagtaaataaaaaaaacctaacagaattatatatgcaaacaacaaagcatatagaaaagtaaattaagaaacattttaaaaagaatatagtattgtattttacataaatatttctataaattaatattcattaacttatacaataaattaatattaatttataggataaattaatatcactataaattgataaaatttcatggtcccaacattattaatttataaagtttctactgtagttttaattcatgtgcatagtagtttatagtttctacttcttcttaaagaatttcaataaaatagttatataaatctcagatatcattagtatttatatcctactatattatttgggaagtacattttaaatctaaccttaatttttgtaattaattacatgacaatgccattaaaaaaaattaatcaaaagaaaattttttaataacgtcattaaggttaccaaaatcatttaacgacaatatttatctcttaattatagggcttattggatctaaagacgggtcattaaagattttctaaactgaagcaaaatataccgaatattcaaatatctatctgttaccaaattataaacaaataagttcatatttaattttttatatacgaaatcaattaaatcttaatcacataaaaattaacacaaaaaaaagtattcaacaattaaaaaattatcaaatctctgtgttatagaagtttttatactatattcgaataaagtgtaatataccttttcaatttgtattctttaactaatttaagctaactaatatatttgctaatcttatacctatcaaaaccgactatcttttcttatctttatagtatttttgcaagacttttaggtggatttgggttaaagtgcattcgggtcatatggtacattccttattaaataaatatggtgcactcctatgttattagctaaaatgtttagattataatttagagtcatatcataaataaaattaatattaataaaataaatggctttttggcaagacggatctggagggacgggtttttgaatcaacattaataaaaaagtaaaatataattaatccaccgtttcaatacgggttaaatctttaatctttttttttttaagaccactaatattaaacatatcaaatcatcctaatttagaaaagagtatataaaactaaaaatgttatgtggtatgtataatgttactatatataaaattaaagtataaaatataaatgtattagagaatgataaaattttcaaaacttatatatataataaataattcttaaattttaaaaattactactttaaaaaaaatcaagggacgggtaaagaaattacagaacgggttttattttggaattgggttatatggtagatgtattttaatcaatatttagaatatttataaaattttattaatatgttgttttgataagagttaaaaacttcagttttttaacaattgtctaatgtattcgtggtatagtgttacttaataacaattataaactgtaaaatataaatattttataaaaataaaattagcaagttttaatatatattacctttaaaaaataaatcgtcccgcgttatatcgcgggttaaaatctagtcgatttatatttacaagatcttaggttgaaaataacatacaaactaccttcgtctataaattaaatataaattggcataatatctggaaaatttcttacaatcaagtcatgacgattgacgaatattgaaagctcaaacactaatgttgtacgttgatgaactaattaaaaattcaataaatgctctaaacatataaacagtgtaacgtaaggtgtaaatagcgaataacatatgacagactgaatataaggctcggatcgtagaggggaccatgttccaaacccaattttcccccattaatttccgggaaaccaaaataataaaagctaattataaacgttttcatgaaattagggcaaaagtacaaactgaaactaatgatgccctaaatgaaaatgaaatctctgcaataaagaagagtggctttaggggccacgtagacattagttacaaaagctctgcgtcttttagccctctgcctcttcaacagtactttacgacaatgaaaaagatcgtgatgcgtaaattaagatcccctgtttctcactgcatgctcgttaccgtacgtactcataggagtttataaatcaaagggcctatagagagtattctaagtagcaaccactacgtaaagttttaccaaaaaaaaaaaccagtatgtaaatgtgaccatatgttcatgtagttgcttgtgtacatctttttttttttttttaacttcaaactttatgctttattatagtgaagaagtataatcctcatggagtgtacatctatatatacactgcatacgcatgtagagtaacaagacattctttgtttcttgtcaaaagacattcacaatccaactagagatatgattttatcatttgttagttagtttatagtttggtgacttggtgtaatctcctagttggataaaaatattggaccgttgattcgatagaaatgccaaacgacattacaaatcggatatatcgattggatggaatccaaaagtttatccaatataatcgactaaagttaaaaaatgagtaatccaccagtctaactaaatactttctttaccaacaaaaatttgggatacaactgagtttatttaggtgataaaagattataagacttaaccttttaacaaaaaaaattttttaagacttcaatccttagattgttttccaaatattaatagttacaatagttagtttgtaaaacctatttttaattttccgatactctttgcacgttgtgttgaatccgagaaatcatgggggctatataaacaaaactatactatgaaatagccaagcaacttcagtgatcggatctttggttttttattttaaaaaaaataaatattttatcagccgtatcttcagggccattccccataaaaactataatagcttctatgaaatttgtagattcctaaaaaaatctttatatatcttttatatacaatatgtggctgttacgtagaacaataagactatacaaaagttgggtattgttccttttcaattacaaaagtcatattcactaaaacaaagcccttcaaactttttaaaaaaaatgaataaatcacgcatttatacaaaaagatccatccatgctcctataaattcgagcatataattaactaaagaatactcaacatgttcataagtacacctgtcttcacactcgtttcacacattgtaattgacataaattttaatatcttttaaagcaaagcataagtaaaattatatagagtatttcttcaacacatttccggacgatatcaccacgaaaaatatcctatatcacctatgtgtcatgactcatgaccataaggaaggaaaaatgtatttttatgatcaaacggttttcactttttttattattcattctagaaaaaaattataatcgttttctttcattcctacgatacaataattcataacgatcttttagaatttttgttttgttttctgtgtgtatgggtaaatatctttcatacgtagacagatacataacaattaaagctggtgaagtaataattgtgaagagacagagaaattgaaaaaagagagtttgtttttcgtctaagtaaataccgatgatgccctcacctttctaattccctcctttgtccctttccattttcatgtttatttctaacttctctgtccctttcaatccttctccaccagatatcctctgattcgatcccccacaaattttttcataaaaattattattattctcactaaaactctcaagagtagtttcgatttttcctctgaataaaaaaaaatcaaataatatatttgacaagagaatttccttcctaaacataacattttatttgaatgttaattcaattgattatttttctttcttatatccttttctttggcaaaatttatttcttatatccaagcacatttttcaatagggttttgtatgtatgaaatcatatctacatgcataaaagaataatatagtgaataactgattttctagaatattgtaaaaccttctttttgggtccccatttatatatataactcaataccttactatctctctatatatatataatcttctctctcacacaaaacctaaaatctctttactaccagcaagttgttttcttgctaacttcaaacttctctttctcttgttcctctctaagtcttgatcttatttaccgttaactttgtgaacaaaagtcgaatcaaacacacatggagccgccacagcatcagcatcatcatcatcaagccgaccaagaaagcggcaacaacaacaacaacaagtccggctctggtggttacacgtgtcgccagaccagcacgaggtggacaccgacgacggagcaaatcaaaatcctcaaagaactttactacaacaatgcaatccggtcaccaacagccgatcagatccagaagatcactgcaaggctgagacagttcggaaagattgagggcaagaacgtcttttactggttccagaaccataaggctcgtgagcgtcagaagaagagattcaacggaacaaacatgaccacaccatcttcatcacccaactcggttatgatggcggctaacgatcattatcatcctctacttcaccatcatcacggtgttcccatgcagagacctgctaattccgtcaacgttaaacttaaccaagaccatcatctctatcatcataacaagccatatcccagcttcaataacggtgactaatctctcttatacatgcttttttatgaatttattcaggtggttttttataattactaagagaaccatttacaccactagctattacatgaattagcacacacaaaaaaaaaaaaactaacaagatctacatatatgactttgatagatatatgtatatgttaattgttaaaaagattttaaaaaatgctgttgatttatgaatttattcagatggttttgatttaaaaatctaaaatatatattataggaacatgttacacaccatctattattacatgaattagtaaaaataattaaacccaagaagatgttatgtacatgtaatgacgtatatttgaagttatggatcttgattggggcaaaccaaatttgcatctaaagaacggtttctttgttgtgtaatggaaactagactcacgtgcattttattttcatttgtgacttgtaacacaattagggatttgggttagtagaaaaaaaatcactaattttatgtctctttcttcattcttttcccctgtatatagtatggtctggattctggaatcacaacatatatgatcactgatgatacgtatattaatatgtttgaagggaatttaaatcatgcaagctcaggtactgaatgtggtgttgttaatgcttctaatggctacatgagtagccatgtctatggatctatggtacgtaccaaactataattcattaattcaaataatatttatactacatatatgaatagaaatttaatgaaactgaaatttttgggtgaaggaacaagactgttctatgaattacaacaacgtaggtggaggatgggcaaacatggatcatcattactcatctgcaccttacaacttcttcgatagagcaaagcctctgtttggtctagaaggtcatcaagaagaagaagaatgtggtggcgatgcttatctggaacatcgacgtacgcttcctctcttccctatgcacggtgaagatcacatcaacggtggtagtggtgccatctggaagtatggccaatcggaagttcgcccttgcgcttctcttgagctacgtctgaactagctcttacgccggtgtcgctcgggattaaagctctttcctctctctctctctttcgtactcgtatgttcacaactatgcttcgctagtgattaatgatgcagttgttatattagtagttaactagttatctctcgttatgtgtaatttgtaattactagctaagtatcgtctaggttttaattgtaattgacaaccgttttatctctatgatgaataagttaaaattttaattactactatgaagaaatgactatttcagtaaatttttaaaaaggaattcctcacagatccggaggcatgaaagaaatgctagagatgtactatatttgattacaatgttatgatcttaattatcgattacaacgtgatcttgaaccgaaatcaacaatagttgttttacaacagaacttgtgaacagttgaatgttttttggtagttcaaaactaaaacaagcaagttgcttttcagtggaagttttcttcttcttcatgttatgcaatcagcttgatctatcgataatcatggaattttgattacatcaatacgaacggtcaaaatcaatctcaattatttctatgcggttttttcctacctaaattttgattacatgcatttatcaatccgaactcacacaattttcaaataataaatctgagttatgtaaccgttagccaatttcaacatatattcattataaattaatattaatcgttagccaattaaataaaaggaatgatttagatacaaaataagtgataattttaacttaacaattcaaatcgacattaacatgtatatgttacacagttcagtttgttatttaaaaattatgtaagtctaggttgataaatacagatgaccaaaatttgaattaaaaaaagaccgcatcaaaatagttggggttgattttggtcgttatccccaaaaaatgcaacctcgaaccctttattgataagattaaactatatgggagggtaataagtttataggggtttcttctaagttcatatttctatttaaaacctacagcaaagtaggccaaaatggtacaatagcaaaccattacaattcaaatcaaattttgttattgataagttagaatttgttgttgtttaaatacttcataaatacttttcgaaataatacaattttaaattgttaagaaaaaagaaataacatttatcaataaaattaagattatagtgaaaaaccttgaaccctagtcattcaacgatctcgtttacccttattttttccaaaatgtttgttatgtatactagggatgagttagggaatgaatatcctcgattttggtggtatttgtgatatgctcttagttatctgatatgtattcgttccgtaactcatcatatatccgttaaaatcagaagtatttgcttaatatataactaaaaataactataaaaaatgaaaaacatataaaaaaaactcaaaaaataaattcaaaatagcaaaattttattaaaaatatttcgttaacttttaaaactagtagttaaataaataattaatttgatgaacaaaatttataaaagttaaatatataaagtaaattataatggaattagctatatacatatgtatatatatacgagagcaaaacggaaatcaattttttactagatgggttatatgatattaatttttaatattcaatttgtttcataaaactacagatgtcaaaagtttttgaatcgaatctaaacgaataacagatctaaatggaactaacaaaatattttgccgagttggtatgtttaattatatctgaactatttaatgatggtcatcgatatgacgatatgaaatgtttttattttctccatctcgttcaaaacgacaaagttaatgatgaccatcaatggctgattgatcactacaatttttttattttttatttttaacacttatatctaaaattagtttgtagtaacactaatgtccctttgtaatctttggatacaattaagtacatatatgattagttataagttcttctttagtgctatgaattacgtcaaggtggctcacgcgttgtgagagtgcgtgtcattcagtatttccttaaacagagagatcttttacaaagagctatcctcgagccacgtgaactaaaatgacacaaggaagaaaaatgttttttttgttagttgatctatgtcacatagatcttgttcaatgaccgtagcttttgatagaatttttttaaaaatatgttacatactcataaataaattatatgggttatatttgcttataaatcttgtacattatactatacaatctgttttattgtgaattgtgtattaagaatcattttaacaaaaaaaaattaaaaaataatataatactgtatgttaaaaaaacatgaatgtggcagttagggacatttgtgcatccatgttttaaagagtacattttttgtagtttgaaccctttcttcctcgtaaactacgctcataattgttacattgaaaactttaatcatggagtattaactagatatgtttttctttggattgcctcgttatatgttgttccttctcttgttatccaagtttctctattatccaagttttgtccaaacacgaataccaacaaactacatgtctatatttatattttgaaaaaatgaaaatttaagtggtttagcagataaaacgaactgatgtgttttcggccaaatccatttataattaagattttccattttaccattattaatttacagtaatgcgtagattaaaaatattaagttgttatgtatcagtgatagtcttctacttgtaagtagaaagtctactgattaagcttatgtatgtttcagaccttcgtactaatgaaaagaaactttgaggggaaaaaaaagattaaaaatattaaaatatattcacagtggattaaatatggagcgctcttacgtataaatatacttgctctactgttatttattgtcttctcaaaaataaggtgtttagtccgctaacggtttatttcgctttatccacaatatttttccaaagcctaaataatactattcttgatcacatataaaataaatattctagaatttttcttgttctataatatttacgtttttatattcttatatttcaacaaaattaaaataaacatgatttatttaggtttttgtggtttagcggatggaacaaactaatttgcttatggaccaaatctgttatgtttttgagactaaataatattatatccgtccctaaaaagctgatattttggggatttttcttgttccacaaatattaatttttctatatatttaactatttaatgttaataatttgtaaattttaaaaattatcattgaaaattgaatttatgaatggttattggtttataataattttgtgaaaataatgtatttataactaaatattaattgtttgtaaaatttgtgtgaaaattcctaaacatcaattttcttaggaacataagctgtatacctattttgcatggaaacgaaaatgttgaagcaaaacgttttgaaaacggaaaatagtttttttctaacattttgaaaatgtatattatatatatatatatatatatatatatatatatatatatataacaccaaacataaaactatattaaacaaaactgtttcaaacaatacatatccaaaacgtaaataatttaactaaaatctataaaaaaaagattaaatgtttaaattcaaaaatttagactatgatttttatttattcatatattgttttaaccgacggaatataattaagcataacaataaattttctattatttaacatgatttttataatgggtaattgagtgaaaacaatattgtttttttttcatgtattaaggtaccttaactctgatcatttgaacagaataattcttgatttggtaaaccaatactgagctttagctttaccgtatttttttgacagaaaatcacaattagtaaacctctttccgcaattttgattctacttttttctttgcaaatactgatctcggatagtcaggattcaactggtcaagataccaactcaatgttactaattcattttctttgacgtctctaattgatttctttctttctatgataagcttacgtgatcagtccctctttatatagaccatgaaaccaaacccttaagaagaataaggagtctacatcaaggagatctcaaaatcgaataggcttttaaattcttcaaacataaccaaattacacatctatatcttgaccaaattgcccaccttcattttgaacccagagagagagagagagagagaatgaatcaagttaccaattgtttgaataaagtatttgaacgtatatatgttcctatcatatggtctagatcactgacatatgtagtgatgtgtcttaacgagttacttacttgtgatgtatatatattacaagtggatatacatatgagtttttttctgcggatccgagaagatctttagatgctttttgaggattcaaagtacgttattcctataagaagcaaagatgtgaggcttgtgtagcatcatggtctatgattccctttatgtgaaaattttcctaaaagacttgtttggatcagtttggtccatttgccattttttgttggctgattttttttaatgttcctatatacaaatttatatccgttttgtgaatattacggtgaactagatgataatccaaaattgtatgaatagactttttattttttctataattaaaactgaattattgtggtagagagcgatatgaaatcgctgtgcggctactttatatcataaaatacttttttttttgttgagaaacatgttgcttaattagtatatggtcggattcacaacactttaattttgtaacaaatctatttattttgctctgaaatcatatatatctcacgttctactttctccgagtttcaattttagatgcaaacataaacctaacatcataaagactgtacaacaacccaagaattgaagattagagacgacacctacataaaaatcgcaaaagtatgttcaatgtgataacaagtaaaacttttatctatagagattattgtaaagaaccaagcttagatcattgcaagatgcaagactcatttttaacgtaagtattattcatcaaactcttagaacgagattgatatatagcatcatgcacattaactatattatataacgatctaaaatcataataatcaatatgaccgcattattggagatatatagatcaatctcatccacgggttgctctaaaccatcccatgaacggagcaaaacccttctttaattttgtcttcttgaccgaacaatctctctcaaaatccttctctttcttgtttctctcctcttcgtccccgacacttgacatcacacgtgtcagcaaaggcgagctcgcgaatgtcactagtctcctcttttccaactcctccgtcgtcacaacctcttcttcaaaatcattagacgtcatcgtttgatgctgttccacgaacttgagttcctcaatctccggattgtctaggcgactcgacctcgtcctgctgagccgttgtatctccttcttaccaagttcgagttcttgtgttagagttttgattctgttggagaggctggtgtttagttgtagtgttcttgtcagtgtttgttttgtctgctcaagctcgagtgttagagatggtagtcttgatagagaactcggagttgaatttgtttcctttgtccgtatctgaaaccgtcaaagacatgtgatgtaaaaagtaaaaactatacgagccggaacgtatcaatttattcatatatacaatgcccattcaaaactataaatgtatgtgtacatattttttttttttcatttggttgtgttgtatatctagtcaatagaaaatggttacaaatatatctgacatattaattagtttatatatacagtatatattatgtatatataaaatattatttcaaaatagtaatctttgtgatgatattgaagtattgaacattgtttattttcgttgtgataatatagaacattgttacctctctaagcctagttgcatagatctctccggctaaaactttctctccgaacatggccaccgcttctttcaccgacccaaacgctgcttttgtctctatctccgctcgaccacttctccaaacgtttcctctctccattactatctgcttaattaattatgcgtataccttccatcaatattacatcacacaagaattagtgttactttttgtgtcttatacagtaatttggagggtgttagattcttggcgttcactacacttgaatttggttaataaaaattataatgatggcttttgctcctgtctaattaatattcgttagctaaatgtgaccatcttgataacaacacctctcctaaaataaaataaaatgcacacaggcctcttgaaattatattgggccgaaaattttggcccattaaggaaacaataaaactgggcggtacaagtcggcgatctcgcccgtgaatcctctcggagttcacagaactcactattcaaagagagtcgtcacagagaaacaaaaatgagagggaaaattgcttagagaagcatcatcttccatagtcttcctcctctaattcgttagtctttgttcaaacgattctgggaaactctccagaattgtctctagtttagtagcttttgtaaaaaaccttcgctaaaattccacttgttttgacctagtctggcacttgtacggtgcgtttagagatcgtcgcgtcggtgatcggcgaaagagctccgccgtgtaaattatttcgctcagctctttgttcaccatgagtccaattcagaatttcgagcaacactcccgtcgtctcgtggatcttgacctacgtaatttctctattgatttcactctctatataactcaaatcagcttcctttgattttgaattttgagagaattttcatgattctcgtatgaattatagtctgacttcgactcagttcttgttttagttttaactgtgaaatcaaaaattcttttgttttttttgttaatttatctgttttgaaattgttttgtgtagctattccaacaaggcttgagatggtggtggaggtcagggacagtctagagatagcacatacggcagagtacttgaatttcttaaaatgctacttcccagcattctcagttattcttctacagattactaaaccgcaatttatcgataatccggagcacaaactgcggaacattgtggttgagatcctcaatcgtcttccacacagtgaggttcttcgtccctttgttcaggacctcttgaaggttgcaatgcaggtgctcaccgcagataatgaagaaaacggtttgatttgcattcggataatctttgaccttcttaggaattttaggcccacgctagaaaacgaggttcaaccgtttttagactttgtctgcaaaatctattcgattttcagattcactgtcagccattttttcgataatgttaaaatggaagaagtgaagcctatggagatgcctacgtcttctgatcagtcccttacccctaccccacctatcgggaatgtgcagcttaatccgagtactcggtcattcaagataatcacagagagcccccttgttgttatgttccttttccagctgtatagccgactcgttcagaccaacattcctcatttacttccactgatggttgctgctatatctgtccctggacctgagaatgtcccttcacatttgaagcctcagttcatagagttaaaaggtgcacaggttaaggtgagacaatgtttcttcgtaaggaagggaaccaaagctttctacattgttggaaatattattatatcaaggcctacaccgactcattgtttgatctgaattatattgtttgtaactgggagatgacatgatatattgacttttgttttcggatcatttgcagacggtttcttttttgacttatttgctaaaaagttgcgccgaatatatccgtccgcatgaagaaagcatatgcaaaagcattgtaaatttgcttgtgacgtgttcagattctgcttctatcagaaaggtggaaaaccttatggtccttttcgtcagtatgttttctctggtgacacagttaagggagtgcagctaaagatttacttttcattacataaaatgcaggaactcttagtctcattaaagcatgtgcttgggacggatttcaagagaggcttatttcctctgattgacactcttttagatgagaggtatgaggcttaaggcatctgaaattcgaaaatttcgaaaattttcatatttctaaaggagatgtttggttaaatcaagcacagcttttgtccgcatatagtttatctagttgaagtatctataaacaagtattgacttttttcaggtattcttctttgtcttctgtgttagggttctagttggaactgggcgagcatgttttgagtctttgaggcctttggcttacagcctactcgcggagattgttcaccatgttcgcggagatctttctctcgcacaggtttttactgatgcagaactttaaacagtattaaacgttgattgtgatagcctggattcattataagtgaaaatacttcattacaatacgcaattgcactgtgtgtggaaaattttaggaatgtaacatattgatcaattttctttgcatcattaggctttcctttttgacgtcatttttttttccccttattttttgtcgagcttaatgagtgcatttcctttacattcctctgattaactataaacaacgtcacagttatcacggattatctacctattttcaagaaacatgcacgactctaccctctctcttagcattcatacaacatgtgcccgactgatgctgaatctggtaattctatattctctaccgtgcttgtcttgtttaattcgataaactgctttaaacagggatatagtttatttattttttctgaattaagcttcaatcaaaacttgtgtttgatacaggtagaaccaatatttgagaaaggtgttgatcagcagtcaatggatgaagcacggattttactggtagaaattcactggagagttcattttagaattgattggcttctctgtccattaacttacctcatgttgcacctgtaaatagggacgtatcctggatgcctttgtggggaaattcagtactttcaagcgtactattcctcaggtaatgctggttgctgttcaaaatcggatgttgtgatcaagagttcaattttttttggctttgttttcttctattactgatgatttactgtttgttaagtttcaaaaccaagttatgctgctattaatttggtctctttccttctagtgtttgagattgggaaagatgtgtatttattattgaggtgatcacttgatcttcaggggcagtttgcaagatgcatttgctttcttgctataactttcagttttcagatggtctttgagaatagctgcaaaaagtattcttgcttgatatgtcatttctttatttttatgttacctttaaattatgtgctaagaggttaataaaaaggcatcttgagccttcagctaattcatttctcaactccattatatttttgatgttttacctattcttgctttgcgattcgtagcttttggaggagggtgaggtgggaaaggatcgggtcactttgaggtcgaagcttgaacttcctgtccaggtaatttgtgtcgctcatcagtgattacttttttttctttctttctctgttttagtgagtaatacgaattatcagtaatacgaattatcagccaatgtgtgatcgtcttgcacatgtttatattcaaactcaattgcttattaaaagctctcatattatcttacaccgttacatggacattccacttttgctttaagttggaatataggtggtattgtaattccaagctggattcttagattttatactaggctttttgtctcctgatgaagcattatgcagtcttattgataacttcataaattttcttttgttcgacaaatggattatctagaagttttatttattgctagaccacactggttgcaggcagttttgaatttgcaggttcctgttgaacattccaaagaagtgaatgattgtaagaatctgatcaagacactggtcatgggtactgaatcttagcagaattatctttttacattgaccatgattctatacttgacgatcaatatttattcactttcttgattgtgttcaggaatgaaaacaataatatggagtattacccatgcacatttgcctcgacctcaggtttgtgttaaattgtctcttgtatcagtgttctattgttttgtcatgcaagtatattaattgtgacggtttctcctgctggccaggggatgaaccctcaagctcttgtttcacaatcatctgctccgcagggttttaaaggaatgagagaagatgaggtactgcttgtaagattatttactttagtcattaatagtgcatggctataaaccttagtaatctctgccttgaagtaggtgtggaaagcttctggtgttttaaagagtggtgtccactgcttagctctcttcaaagaaaaggatgaggaaaaggaaatgctgaatcttttctcccaaattcttgctattatggaacctcgagatctaatggacatgttctcgttatgcatgccagagctttttgagagcatgattaacaataaccaactggttcagatatttgccgcactcctgcaagctcccaaagtttacaagccatttgcagatgttttgattaatttactagttagcagcaaacttgatgttctgaagaatccagattcagctgcaactaaactagttttgcatctgtttagatgcatctttggggctgtcaccaaaacaccatctgattttgaaagaatattacagcaccacgtgcctgttattatggaagtctgcatgaagaatgctacggaagttgaaaaacctcttggttatatgcaattgctccgcactgtgttcagaggtcttgctggatgtaaatatgagctgcttctgagagatttgatccccatgctgctaccttgtcttaatattcttttgacaatgctagagggtccagctggggaggacatgaaagatcttttgctagagctttgtttgacgcttcctgcacgcttaagctccttattgccatatcttccccgtctcatgaagcctcttgtattctgtttgaggggaagcgatgaacttgtgagcttggggttacgcacccttgaattctgggtggatagtctgaatcctgatttcctggaacctagcatggcgaatgtgatgtctgaagtgatcttagcattatggtcccatttgaggcctgtgccatatccttggggtaaaaaagccttacaaatccttggaaagttgggtggtcgcaaccgaagatttctgaaagagccacttacacttgaatgcaaagataacccagagcatgggcttcgcttagttctgacgtttgagccatcaacaccttttctggtgccattagacaaatttattaatcttgcagtagcagcagttattcaaagaaatcacggcatggacatatactacagaaagcaagctctaaaatttctccgtgtatgcttattgtcccagcttaatttgcctggatgtgtcactgatgtgggtcaaacgcccaggcaattatctactttgttacgttcctccgtggattcatcttggcacaggagtgaagcagtggaaatcaaggttagttttaagcatcattcttataatcttaatttctcatggttggactctgtactttttctttcacatgacagaggttatctctgtggcaggttatcttatttgtctactttttgaattctggcacattctaggtgtatcaatgccatttagttatgatgcatatcggctaggatcttgacagttggtattagagaaaagtttcttgattgacccacattgacgtggggcatgattatgattctttaatactcgttttgttaccattcattttcttaatagataattgatcttgtaatcttgtatatatgtcgtcttctctagatgtactcttttttccttataatacctgtttcactttgcttaatatgctgaagaaagattcattacattaagtgggctgtttcttactgtgtaggctgacttaggagtgaaaacaaagactcagttaatggctgagaagtcaatcttcaagacactgttgatcactatacttgctgccagttctgatccagatctcagtgacacggacgatgactttgttgagaacatctgccggcattttgcgattattttgcatgttgactatacctcctcaaatgcatcaactagtactagttcactcggtggttctgtgatttcaacaagttccagatccaagagtaatcaatcatctaatttaaagcagttagatcctttaatatttttggatgcactggtcgatgtgcttgcagatgaaaacaggctccacgccaaagctgctctgaatgcgttaaatgtgtttgctgaaacacttttgttcctcgctcgtgtcaaacatgctgatgtgttgatggctaggggtggtcacaatgcctccatgattgtctcgagtccttctacaaatccagtatattcaccccatccaagtgtgcgaataccagtgtttgaacaacttttgcctcgacttttacacggctgttatgggagcacatggcaagcgcagatgggaggggttatggggttaggtgcattggtggggaaagtgaatgttgaaacattatgttatttccaagtaaagattgttcgtggtctggtttatgttttaaagaggcttcctgtttatgctagcaaagagcaagaagagacaagtcaggtacttatgcagattctacgtgtggttaataatgttgacgaagcaaacagtgaagcgcgtagaaaaagctttcaagatgttgtagaatatcttgccacagagttattcaatcctaacgcatccatccccgtgaggaaaaatgtgcagaactgccttgcacttttggctagccgaactggaagtgaggtaactgagttgcttgagcctttataccaactattactacagccacttataatgcgtccactccgatcaaagacagttgatcaacaggtgcgtcgcagtgctatttttcttttgtgtatctctctccgatcttgtcttcctctttgtctttaatgtttaccttattatatctacatacaggttggaacagttgcagctctgaatttctgtttggctctgaggcccccccttctaaaagtgactccagagttggttaattttctgcaagaagcattacaaattgctgaggctgatgaaactgtatgggctgtgaagttgatgaatcctaaagtgcttacatcattgaacagacttcgaacagcttgtattgagcttctctgcactactatggcgtggactgatttccgaacgcaaactcacaatgaactacgtgccaaaataatttccatgttcttcaagtctctaacatgtagagcaccagaaattgtggcagttgctaaggagggtttaagacaggtttgtagttgtcttttatcttaatctggattcttgcatgcacatataatttgaagatttttgagatttttggtgaagaaaatagatattcctattcgtactagtctggctagttttctttctggggagtaattgatatgtgcaaccatggtatagctacatgcaatacttgccttgtgaaatatgaggaacttgctcaacggagtgatcataggaatctatttcttgatatctatgacgttaattttttatccttataattttttttttttttttttgaaattctattttctgatttaggttatcaatcaacaacgcatgcccaaggaacttcttcagagtagcctcaggccaatacttgttaatctggcacacacaaagaatctcagtatgcctttactgcaaggtctggcacgccttctcgaacttctgtcaaattggtttaatgtaacgttaggaggaaagttactggagcaccttaaaaaatggttggagccagagaaacttgcccagtcccagaaagcatggaaagctggagaagagccaaaaatagcggctggtaatttgggttttgaaaataactaattgatgtctagtcatatgattattcacttgaacacaactcttcttttgtttacatggcagctattatcgagctcttccacttacttccacatgctgcatcaaaatttctagatgaacttgtaaccttaaccattgatttagaagcagctcttcctcctgggcaagtgtacagtgagattaatagcccataccgtctaccgcttaccaaatttttgaatcgatatgcggccctcgcggttgattatttcctttctagattaagtgaaccaaaatatttccgaaggtgaggacaatgtcttatgataagctttcgttcaccgcatcttgtaagaagtttactataagcttggagtagattttctaaatatgctaactatacttgctatttcctgtaaaaacaaaactcaggtttatgtatataatccgatcagatgctggccagccgttaagagaagaacttgcaaagtctccacagaagatactgtcatatgcctttcctgaaatttcgccaaaacctgatcctacattgagcacgacggcttcaactcctcctgctacatcatctggagatgaaaatcatatctctgttaaattagagagttctaatgtggcatcaacaaaggctaatatagcatccgatgcatactttcaggggctctatctcatcaaaacaatggtgaaactgatacccagctggttgcagagtaaccgcagtgttttcgataccttggttctcatttggaaatcacctgcaaggatatctcgtttgcagaatgagcaagaactgaatttagttcaggtagtttcttctatctcaaccacttataatttttggctttgcattgtgtttcatgctgaagctgcgtagtttgataggtttcctggaaatagccaggtatgaaaagttaaaactgatgtctaagattagaaaccattacaggtaatgattgctgctgatttgtagccatatactggtgctagagatttcgctacactctggaatatgttaaatttgtttcgattgaattcttgatttgcctgtgttgtgatggtatgcacattttttcttatattgcttgttggaacgctcctgacattgtttcaatttcatcttttagtatttattgagctaccaacgtatatataaatttctttttaatcatgagggtatggtgaatatagctgtgacatttgaaaattgaatagttttccttttgagttatgtaaaatattggaatctgaagtcttttgtgtcctcaaactcaggtgaaagagagcaaatggcttgtcaagtgcttcttaaattacctgcggcatgaaaaatctgaagtgaatgttctctttgatattctctccattttcttgttccatagccgcattgactacacctttttgaaggaattctacattattgaggtatctgagattttaaattttagttacaatttctatctgactccattttagttttcacactttcagcagtagtatagtataataactgggatatatattcatcaggttgcagaaggatacccgcccaacatgaaaagagcactcctactgcattttcttaaccttttccattccaaacaactcggccatgatcatttagttcaagcgatgcaaatgcttattcttccaatgctcgcccatgctttccaaaacggccaaacttgggaggttattgaccctgatatagtcaaaaccattgttgagaggcttcttgatccacccgaagaggtaggttcctttactcccctaaacaaatatatcaagaaaattgtggggaagacttctttataattgtcatactggttatgaatgtatctgtacagggttttgggggttaccctgtacaaatgttcataaatttatttttctccactttttcagaattgttaagatcttattgttaaatctcctcatgattattgtaggtttcggctgaatatgatgaacctttgaggattgaacttttgcaattagcaactttgcttctaaaatatcttcagagtgatttggttcatcatagaaaagagctcattaagtttggatggaatcatctcaaacgggaagatagtgccagtaaacagtgggcatttgttaatgtttgccacttcttggatgcttaccaggctcctgagaaaatcattcttcaggtaccgttaaaatttatatgtcagtgatgtttattgattttcttgaatagagaaaaaaataattttcttgaaacttctgatatcatcgtatttcatataaatctcctctttccattggtaaaaccctgttgtcataacatttgtgtatgactgtgacggtcaattatttagcttaagtggaaatcatttacaatgcgattgttgatagacaaactacatgaagcgagatctgaatgcatatttttcataaaaatgcatgtttgttagacttcatggtactatgacatgcacgtggttagtttttgtctatgacgttactcctccctgcatctgagtaagctgaagagaagcatatgcctacaaaaacaacttcgtctaattattaagtgacacaaatgtaatttgccaattggatgtaggtttttgttgcacttcttaggacatgccagccggagaataagatgctagttaagcaagccctggatattctaatgccagcgttgcctaaaaggctacctcttggagattcacgcatgccaatttggataagatacacaaagaaaattttggtggaggaaggtcattcaattccaaatttgatccacatcttcctacttgttgttcggcattcagatctcttttacagctgtagagcacaatttgtccctcaaatggtgaattcgttaagtcgtctaggtttgccatataatactactgcagagaataggaggctcgcaattgaacttgctggattggttgtcagctgggaaaggcaaagacagaatgaaatgaaaatggtcactgatactgatggaaccagtcagattactgatgaaatgcatacttcatctggtgctgatcctaagcgttcaactgatgggtctgccacatcagaagatccaagtaaacgagtcaaaatcgaacctggtctccaatcaatctgtgtaatgtcgcctggcggtgcatcatcaatccccaatgtagaaactcctggatctgctacccagcctgacgaggaattcaagccaaatgctgccatggaagaaatgatcattaattttctcataagagtaaggctttatactcgtatcttacaccatggaacatatattttactttggttagcttttcaattctcttaaccatgtcacctcatgtctaagagtgtatgtgcgtgccattgctccagctattacaaattcatctataagtcgagttgaatttatcagaatcgacctcacttctagttttgtttctctgttttaaaaatatttcgctttcttgaacaggtagcgttggtaattgagcctaaggacagggaaaccaacactatgtacaaacaagcattagatttgctttcacaagctttggaggtttggccaagtgctaatgtcaagttcaactatttagagaaactgctgagcagcatgccaccgtctcagtcggatccatcaacagcacttgctcagggattggatgtcatgaacaaagttctagagaagcagccacatcttttcattagaaacaacatcaaccagatctcgcaggtatagttgctgcagtaacctgttattctaagatttgaaatacaatagtgttgtttgcctgctgtcacttgatttactgtttgtttcttcactagattcttgaaccgtgtttcaaacacaagatgctcgatgctggtaaatcgttgtgctccttgctgaagatggtgttcaccgcattcccattggatgcggctaatacacctcctgacataaagctattgtaccagaaagtcaatgagctgataaacaaacatgtgaatactgttactgctccacaaacttcaggagatgataactcttttggttcgattagctttgtacttcttgtcatcaaaaccttggccaatgtacataaaaactttgtcgattcatatgtgttggtgcgtatccttcagcgccttgcacgagacctgggatcagcagtgggttctcatcctagacaagtacgtcattcttacttaaatttttttctgctaagaggtcaatactgcttgctttcgtttgtatgggaagtttaaatgagatttaaaaatttacttggcattttccacgttagtgagtattggaatctcctatgcatcttttcagctttgcaccagtgactttcattaatgtcttgtaaagatcttaggagttagactggttcctctcttacatcacctttctactcagactcatgctttatgttattagctgacatctttctggtcttttcatacatcaagatatcatttctatccctgttttcctgtaatctaccctttttccatctgactagtggatggagactagataacctagtcgttacccaatcacggcttactctggatctttttctctccatttccagggccagcgaacagattcagattctgcagtaacttcttctcgtcaaactgctgatgttggagcagtcatatgtaatataaagtcggtcttggaacttattgatgaaacggtcatgcttatagcagattgcaaaagatctgttactcaaattttgaacaccttgctttccgaaaagggtactgatgctagtgtgcttctctgcatactagacatgataaaaaggtgggttgaggatgatttcagcaaaacaggcgcatctggtttgtctggttctttccttacccaaaaggacgtacttacttttctcaataagctttcttatattgataagcaacacttctcatctgaggctttggaagagtgggatcagaagtatcttcagctgttatatggactatgtgctgattcaacaaagtacgttcgttgctttttcatttttcctcccttttgtcacatctttctgttaggagatggataatatatcttcatctatttaatgaacaggtatcctctaggcctacggcaagaagtctctctgaaagttgaaagacattttatgcttggtttacgggcaagtcatcctgggatgagaaggaagttcttcttgttatatcacgagtctcttggaaaaactttgttcgcgcggttgcagtatattattcaaattcaggattgggaagctttaagtgatgttttttggcttaaacaaggtcttgatctccttctagctatcttagtcgaggacaagccaattagcctggcgccaaattctgcaagggtactaccacttttgccttcagataatcctggaatacaacaccaagctcctgctaacttagagggtcccgaagaagttacttcaatgtttgacagcattgttatgaagcatgcacaatttctgagcgcgaccagcaaacttcaggtgattacaaatcatttaaaactttctttagtgttatcatgggtctttctctttgttattcctgatcgaaaatgttgactagattaccgtaagtccttaagcgctatatccacctgatccatatgggttatctgaataatacgttattcatatactgattactgaagtttataactttttgaaatttccactataggtggctgatgtggtcattcctttaagggagctggctcacacggatgccaatgttgcatatcatctgtgggttttggtatttccaattgtatgggtaaccctgctcaaggaagaacaagtagcattggctaaacctatgatttctctactatcgaaggactaccataagaagcagcaaggacaccggccaaatgttgtccaagcacttctggaaggacttcaattgagccaccctcaacctaggatgcctagtgagcttatcaaatatattggaaaaacgtacaatgcatggcatctcgcattggcattgctagagagccatgtgatgttgttcatgaatgactcaaaatgtgctgagtctcttgctgagctttatcgtttgttaaatgaagaagatatgagatttgggttgtggaagaagaggtccatcaccgctgaaacaagagctggactttcattagttcagcatggtttttggcagcgtgctcagagcctcttttaccaggcaatggttaaggcaacccaaggcacgtataacaacacagtccctaaagctgaaatgtgtctgtgggaggagcagtggcttcactgtgccagtcagcttagtcaatgggatgccctggtagattttggcaaaagcattgagaattatgaaatactgcttgatagtctttggaaattacccgattgggcatatttgaaagatcacgtgataccaaaggcacaagtggaggagactccaaagcttcgtttggttcaatcttattttgcccttcatgacagaaattcaaatggtgttggagatgctgaaaacacagtggggaaaggcgttgatcttgccttggaacagtggtggcagttgcctgaaatgtctgttcatgctagagtgcctctactgcagcaattccaacaactagttgaggttcaggagtctgctagaattcatgttgacatcgccaatgggaacaaagtttcaggaaatactgcggttggtggacttggtaatcgttatgcagatctgaaggatattcttgagacttggaggctgaggactccaaatgaatgggacaatatgacagtctggtacgatatgctacagtggaggaatgaaatgtataatgttgttattgatgcatttaaggactttgctacttcaaattctccacttcatcaccttggtttccgtgacaaagcatggaacgtcaataagcttgccaggatagctaggaaacaagggctttatgatgtttgtgttcagattcttgaaaaaatgtatggacactcaacaatggaagtacaggtacatttctccaaaatctttaattgcagcactctacacaagagctgtatatttttgctttttttttggtttcatatctcatcaagtttttttaatagttggtttcatttgtttttaaagcttgtgatactgttatttatgaaagtatcttccacatcttctgtctttgggtgtgtgagtgcaggaagcttttgttaaaattagagagcaagcaaaagcttatctggaaatgaagggagagcgtgctagtggtcttaatctgatcaatagcacaaatttggagtattttccagataagatcaaggcagagatatttcgtctgaagggggactttcatttgaaattaaatgacactgaaagtgctaatatcgcatattccaatgcaatcaccctgttcaagaatttacccaaaggatggataagctggggaagctattgtgacatggtatttcttgtgactgtgttctgtctcttatatggctcctaacattcccctaaaatttgtattccgtgtacttatattttactcgcttttgtaggcataccaagaaacacaagaagaaatttggcttgaatatgctgtcagttgctttcttcagggaataagatttggtgtttctaattctagaagtcatatagctcgtgttctttatcttcttagttttgatacagcgaatgagcctgttggcaaggtctttgataaacacttagaccaagttcctcactgggtgtggctttcttggatcccacagctgttactttccctgcaaagaacagaagcacctcattgcaaattggttttattgaaaattgctgcagttttcccacaggtaatttacctttagcgtttatgactaattcgtgcattatgattattttatctgagtatgtggcgattttctgtttcaggctctctattactggttgcgcacatacttgctggaacgacgtgatgcagtaaataaatccgaacttggcagattagttttggctcaaagaatgcagcaaaatgccactggtgcaggtcatggtggaagcaatttaccatcagaaaatcaaatccatcaaggcgctcaaacaagtggggctggtggaacacatgacagtggtaacccacatgggcaagaaagtgaacgctccactacggaaaataatctccatcctggtagtgatcaacctatgcaccaaagcagctctgcgatcaatgataacaatgaaaacacagtgagacggaatggtgcatccttggcaatctctgctgcgggtgcatttgacgctgccaaggatatcatggaagctcttaggggtaaacataacaacttagccagcgaactcgaggtgatactttttttctgtacacatcaaccatattcaaaaaaattgctctaactacttacaacggagcaggttcctacctctttggttggatgatctaagcaagttatcttccttttcaggttcttctcacggaaataggctcgagatttgttacattaccggaagaaagactgctggcggttgtgaatgctctgttacatcgctgttacaagtatccaactgctaccactgccgaggttccccaaccactcaaaaaagagctgtcgggtgtctgcagagcttgtttctcggcagatgctgtaaccaagcatgtcgaatttgtaaaagagtacaaacaggattttgagcgtcaccttgatccagaaagtacaactacattccctgccacactcgctgagctgaccgctcgactgaaaaagtggaaaaatattcttcagagcaatgttgaagacaggtttcctgctgtgttaagattggaagatgagagcagggttttgcgtgactttaatgttgttgatgtggagataccagggcagtactttgctgaccaggtagaaataacactattaagtctggaaatttgaactacgtttcccttgcacttaatttatggaacacttttttaattttgatttgattgtgaaaataattatgctcaattatccaggaagtagcacctgatcatacagtaaagttggatagggttggagcagacgttcctattgttcgaaggcatggaagcagcttcaggcggttgactcttattggctcagatggctcgcaaaagcactttatagtccagacatcattgacgcctaatgctagaagtgatgaacgcatcttgcagcttttccgtgtaatgaaccaaatgtttgataagcataaggaatcaagaagacggcacattggaatccacactccaatcatcattcctgtctggtctcaggtgatttttataccatgaattcagatttgatgtttcattggatgagtattggatttaacaaacatttggtttcaggtccggatggttgaggatgatctcatgtacaacactttccttgaggtgtatgagaatcactgtgcacgaaatgaccgagaggcagatcttccaattacccactttaaggagcaactcaatcaagctatatcagggcaaatatcagcagaggcaataggagatcttcgtctgcaggcatatattgacatcacaaaaaccttggtcaatgacagtatcttttctcagtacatgtacaagacgttgatgagcggaagccatatgtgggctttcaagaaacaatttgcagtccagctagcagtctccagtttcatgtccttcatgctacaaattggtgggaggtccccgaacaaggtcttgtttgcaaaaaacaccgggaaaatgttccagacagattttcaccctgcttatgacgccaatgggatgattgaatttaacgaacctgtgcctttccgcctcacaaggaacatgcaagctttcttctctcagtttggagtcgaaggtctcctcatgtcatccatgtgttcagcagcgcaagcagtaatctcctccaaggtaaagggataattcaaaaactatatatacaaaaactaagtgatgcaacaagccactgattgatctctgtgtctctattgtcttgcaacttttcagcaaaacgaacatctacggtaccaacttgctatgttcttccgtgatgaattgttgtcttggtttggaagaagacctcttggtgtgccgattcctcctgttggaggaattgctactttgaacccagctgagctgaagcacaaagttaacgccaatgtggaagatgtcattaaacggatcagaggaatagccccacagtacttttccgaagaggtacatacatcatcataatgctttatcaaaatcatataagatcaaacatattaatggatttatttttgtaggatgagaatacggtggagccgccgcagtcagtgcaaagaggagtgaacgagttggtggaggcagccttgtcgcctcgcaacttatgtatgatggatccaacatggcatccttggttctaactgcaaaatagtttacttataaatttataatttgtatttacgtgtttttaatttaatggaagctaacattactcattagggttgtaaatatgtaacctttatgtatttataactccttttggtctgtcgcctttttgcaacattttctgtgttatttttttttttttctcataagtgttgccttttattaaaacttcagattgtgagggttacaaaagtggaatcatccacgtacagacagaagacaacatcttaaaatttaaaaacatggactaaccaaacatgagggttccatgttgcaaatcaaacaaactagcaaacattcaaattggaaccggaaaggttaagaagttcagatatgtcatgttccaaaaagtgatactgagaccatatctgaactcttattcaaactcttaacttcaacattaacatgaaatcatgttagttgtaaatcaaaaaattgatagatcaagcgagtgatgttagcgtttctttggaggtttcggaatacctcccatgtttagatctgtttcttgttgcttgttctcttgtgaatccttttcacattgtaggattatcatgtttttgcgtttggatgagtcgccaaggtgcaggttattgttggattccctatcctcaacacgtcttgatgattctcctgtttcataaacccgtctgactcctggtgtgggcgcagcaacagaggattgattagtgttagatttaggggaagcttgaagtctgccaataccactttgagtagtaggatgagtgtaaggctggaaagctgcagttcttagatgggaagtagggagtagcagcagctaactcttggtgattcagtggtggtgcaggcactcgtggaggaggggttaaaggagcagggaaagaactttcagtcatctgagactgagagttgttgcttgatcttaatacactgtcatgtaaagctgctctctctctgtctagaatctgaacccttggacggtaaggacagtagtttctgttgtgagtaaacctgaaacagttactacaaatacgccttaaacgttcatactgaaacctgattaaagctgattctcccgactcaaacgtgatgcgttgaaagaaccttaaactgtctgtaataccaacacgaactcgaactctaatataagcaatctgagttgatgtagtatcatgaaagtccaaggaaatgattgcaccaatctcttgagctatttctaaagcagtttcttcagatacataaaggaagggaatacctctcatctgaacccagagatcaatggttgtcacaaagttcaaagcaggagcaggctgccaacgttgagatgcgacaaaccaattgttgaaaagccagggttccctcctttgaactgatagcaggtccatttccgactgaaagaggaattgcacatatgtatcatctataatcctgccatgaacatgagctgttaagccccaggctctaggtagagcagtaataatagcctgaaggttttggacccttggattcagaggtcgagcaatgatgctaagtctgttccggcctgcaaccatgatgtatgcttcatttgggatgaacaaagaaggaccctcctgtctcaactccaaattctgtatttcgtcccaaagctcatccgccatgtttagacaaaatgaaagagagaaaagagattgggataaaagagaaagcacaaaactaaaaagtatatattgaagactagaagactaaaaaacttgacctcttaataaaaaaataaaaggaataaaaatatcttaataaaccttgaagcgagaagattaagataactaaaagaaagaaaaggacaaaagaaatcgcaacttgtaagaagacttgactcaaaggaaagtaaaaaaaaacagagagtagacacgaagaaagacaacacgacatcccaatctcaaatcaagttacctctctcagcagtaaaaacatttgtcatccacgatggataacctctagccacgtatgattgaaatctgcatcctgtgatgacactcgtggcaatagcattcgcacctctgttacaacaaaagggttccatacagagaaaccagtgtggtttgtctttagtgaagcttaaaagctcagaaatatcacccaataggagaggccattcatgtggtttgtgtaaggcttgaataatctcatgtgttgaggaagcaaaaatgactctatcaaagtgatgatgagtcatagattctaatgcccattcccagcttcttatcttagcagagtaaggagaatgtacctcattaaaagatctgcgactatgcaataagacttttccttgtgaatcacgtaccacccaagatgcacccgaaaagtgatgttgttttgaccaggcaaaaccaatattacacttcaattcaccaggcaacggtggacaccatttcgtgatcttcaaatgtttttcatcattttgcatgtgtgtttgagctgaaaaccattcatgatatgcttcataagctttgtcaactagagtagttgttattgagccttttccttcgaatagcaatgcattcctgtttttccataaaaaccaaagaatccatggactaacaaaccgcaaatgatgaggaagatcattttgctgagttaagtcaatcaatctactcatattagtataaacagaatttgaaaactcagaccctgcagatgataaatgagtaattgcccagacttgtctagctagaggacattcaaacaaaatatgattgatggtttcattttctgtatcacacatcaaacagccatcatcacttctaatacctcttgttcgaagtctgtcttcaacagggattgcaccatgtaaagctttccatagaaaaattctgatctttggagccgtatgcagattccatattttgtcaaaaagagaattgacagaaggcttaactttagcttcttgatacaaacgatgatgaacttgtttacttaggaattcatatccagttttaacagaatataatccattgtgagaatgcaaccaacaaaatgagtcttctttaaaaaacagtggtctttgcttgaggatgatctcaacatctttccagggaaacaaatcccgaagcatattaagattccagttcctagatgtcggatcaatcaattgactgactttcaaatcaacattaataaagcgtctcctattcagaggtcgtctattagaaccatcatgtaaccacttgtcagtccatacaaaggtcttttgcccgttcccaatcactgttcttaaaccttgcataagtagctctcttccaaataatatgcttctccaagcatatgaaggtctagatcctctggtagcagaaagaaaatcagaattagagaagtacctactttgaaaaaccctggaaaaaagacttcctttctcctgtagtactctccatgcttgtttggccaatagagcttgattgaaacattgtaaatctttgaaaccaaatccaccctgatcctttggaagtgttaacctttgccaactaagccaatgaattttccttttctgttgcatactattccaccagaaatccatcatcacagtggttagcttttgacataagttctttggtaatttgaagcaggacatgacataaacaggaagagctaaagcaatggatttgagtaaaacttccttgcctccttgagataatgttttggcataccaacctgtaagtcttgattgcaatttttccttaataaacccaaataaatccctttttgaaccacttaaacattcaggtaaaccaaggtattttcctgttccaccttccaaagaaatacctgatctagactttatccaatctttaatttgaatatcaacatttttcccaaaagtgattgcagatttattcaggttgatcatttgaccagataattgaccatactgagataagcattgcattagctcttcacactcttgttttgtagctttacacattagaagagtgtcatcagcaaatagtaaatgatttactgaaactttcttgtcttgaaactgaatacccgtgatttttcctgcttgttctgccttgttgagaatatgaatcaaagcttcagtgcaaagtacaaacaaggccggtgaaagtggatctccttgtcgaattccacgagttggaatgatatggccataaggctgtccattgatcaagactgagtaagagactgaagttacacaattcatgatccaggaaatccatttgttgttaaaaccaagagcagtcatcatagtttccaaaaaaggccactcaaccctgtcataagccttagacatgtcagtcttgaaagccatatgttccttagatattcgatcattggttctgagactatgaatcatttcatgagcaaccaatatattatcagatatcaagcgttgaggaacaaatgcagattgcgttgtagaaacaatagctggaagatgttttttcaatctttgagtcaaaatcttcgatattatcttgtatagcacagaacacaaacttataggtcgaagatctgacattctctgtgggctagtgatcttaggaatgagacaaatatgagtgtgattccaatcctggggtagaactccagtctcaaagaaaccaaaaatctcagttaagatctgatgtttcactaaatcccaatgttgttgaaagaacaaagcagtaaaaccatcaggtcctggagcactttccttgttaatagagaatactgcattatacacttccagttcagtgacctcttgaattaaattgtgattcatttctgatgttacctttgcttggagaccttccaggtgattgttatgagtcaatatatacgtagaggtgaacagattctcaaaaaaggaagatgcaatttttcctttatcactgtttcttgtaaattcctgatcattctcatcaagtagaaagcttaactcattctttaatctctcagagtgtacagtagcatgaaagaatccagtattcttgtcaccccctgcaagccatttttgtctgcttttttgtctccaaaacaattcttcatcaccatatgctaaactcagttgatccttgatatactcaattctaggccaacatggaatttgaatactcttctctgcatctaaatcttttctcaatctcttaattctactttgagcattagtatcagacgaatgtttccatacactgatagctctacgacattcaataagactgaaaaaagaagagtgagtaccttgagacattgcactattccaagaacgatgtataacctcaatacagtagggatcgtcatcaagtcttttatcataacgaaattgtccacgaaaaagctcattgtcattagtgaatttgaccaataccgggcgatgatcagatccaaacttctctaaaaaccactgatgagcattagggaaaatagaaaaccaagctggatttccaaagcatcgatccaatttacactgaacccactgatcatttctgtttcctccccaagtgaaactattacctgtacttcctaattcatgcatagaacagttgagtaacatgtgttcaaagcattgaaaagaagaaggtgatcgtcttggtcctcctaatttttcatcattcgacctaatatcattgaagtctcctattaaacaccatgcttctgctctcttgagaccaatagaattcaggtgttcccatagtttaggtcgcatatgggtaaccggaagtccataaacacaagaaataaaccaaactttatttctagaagaaacctgaagatccataagatttttatcagcataaagaaactcaatctccagatggcttttccagaaaattgctaagccaccacttcttccttcaggttctactgtatgtataaaatcataaccaagccaacaaaaaactttataaacaaaatcttgagaattttttgtctccatgaggaatagaatgtctggaaaatgatcctttttcatttccttcaagtatcgaattgtccaaggattcctcagaccttgacaattccagctaatgacgccttactgatccaacggtggttcctggaaaaccaccgtatttttatctttcttttgacattgagaatcagagatgtctggagggtttgcttttcttttgaagactttagcaaattgaggcattgaatcagatgatttgtttctcttcttcattgaccattttctctgtgatttgcctttccttgaagcagaagaagagaactcttgcattaaatgatgttgaaaacctgcagtcgaggtactagcctcaccatagcctgttgtgaaaccagttaaaacttctaaatcagcaaggtcttcaaaaaccttatcatctcgaagagtagaagcaaaaccagagactggtatatccgttgttatcatagcctcgcttattagtttcgagtctgatacttcagaaggtaaaggaacttgaaactttgaaagacgttctaacgagttaccttcgggtgaagatctcttgacatgaagatttataggttcagaaatcttcatagaacatttgtttttatcatgagttaatcgttgacagtggaaacaccttttcctaatcctctcataatcaaaagaaatgagaacaagttcacctgaaggaagttgaacctctttattgttacgaagaggattggctacagaaaatagaactgaactcgaacataatcttgaacctgtgatttttcaggatccatgacaacctgcatcactttccctaaacatcccgcaatctccttaatcgtgtcttcagtataatagttaacgggaatatttctgattctaacccaaattgggagaaacctcagatagtcatcaggtggtttctctatccatttttgcataacaactgcccaatcatcttgtgtccacactccagtcttcaagatttcttctaagtcttcctcatatttaaagaaaaattgaaaccgctctttcgaaagagccacacctctaacacgattagataaacgccaaatacgaggcatgtctaaaatccagttagacatccgttgattttctggatttaagaatcttcccagaatactacagctattgcgttcaatagaggaaaactgcggaagatttgagagaatcagaggttgattatcttcaagagacatgttttgaatagctttatccaagtctttatccatgaaaacttcagcaagcagatgacagaacaaaaacagagcactttgtaaaagtttgttttaaccggaccgaaaaagttaatatctccggtagaagctccgctcagatgaaaacagctgagagagaagtccttgagcccaaaagaaatctgggacggcgattgattaacggcgacgcgagatctttatttcacctactatgaaagagaacagagagtttatttttactattgaactttttctgtgttataaagtatacttttgaacttttcaaactttaaattgattactccaaaatgcaatcagttgttttcagtgaccaacgaaactgaaaaattaacaaccagaatttataaaattagaaaatggatctaaatgtaactaatcaaacttccgtcaaattgtggaaaataagaaaaggggatgcaaatgtaaataatcaaatttccgtcaaaacctgggaaaaaaaagaagaactcgcggtccgggtttaaaagcgaggctgaccaaaaccgaccctaatttgttgtaaacttgagatttgatttgggactcaaattcaaagttaccgttgttctcgaaacctcgcgtaagttccaatggaagcttcactaatggcggatttgcagagatttctgcaagatcgctgcttaggcgtttcgaatctcccacagaaaggccgctctctattcactgccagagattttcgtccaggttcgttcgtttctctctcgctggggtttagggttttgttcgtctgagacttattctgattcctgtgttttcttccaggagaagtgattctaagccaaaagccatatatatgtgttccgaataatacatcctcggaatcaagatgtgacggatgtttcaagaccaataaccttaagaaatgttctgcttgtcaagtggtttggtactgtgggagctcttgccaggtatatctgatatgagtcctctctggagaaattcagttgatgattgattcatattctaagatttgttgtttgttgtgattcctttcagaagtcagagtggaagttacatcgcgatgaatgcaaagctctcactagacttgagaaggagaaacggaagtttgttactcctacaatacgtctgatggttagactttacatcaagaggaatttgcaaaatgaaaaggttatcatcagctatgtagaagtctagatacatccatattttgtttttggctgctaaatatggagaagaaggctgattcattggttatttgtgtcatattgatagcagtctatgaatgctaaattcttaatgtgctttatcttgtccaggtcctgccaattacgacgacagacaattatagtttggtggaggctttggtgtcccgtatcctctctatgtgtgccttatagctttgtgaaattgatgatctctttaccgctagaaatgtgtattctttaacctttatatgttagacatgtctgagattgatgaaaagcagatgttgttgtatgcacagatggctaatcttgtgaacttgattcttcaatttcctagtgttgacctaagagagatcgccgagaacttttcaaaggttggtgatgtggtcccgggattttttgtattcgtctttattggaatgttgtttagggataattacttaagccactttcatttctactgaacacagttctcatgcaatgctcatagcatttgtgatagcgaattgagacctcaagggattggattgtttccattggtttccatcattaatcacaggtaaatgctttttctttgtgttctttaatcactttgtttcctgcctaaatcttttgctctgtagctgctctcccaatgcggttttagtgtttgaggagcagatggctgttgttcgggcgatggataacatatcaaaggattcagaggtagtttttgctttgtttcgtctctcgtctttcgtaattgctagtagcacacggacatatagctgttagatccttttgtctttggtcagataactatcagttatattgaaaccgctggaagcactctgactcggcagaagtctctgaaagaacaatacctcttccactgtcagtgtgcccgttgcagtaactttgtaagcagtcgctaattctcccacttatcaacgaatggagttaattctatattttgtttacaacctgtaccatcattttttgatacttaagggaaaacctcatgatattgaagaaagtgcaatattggaaggctatcggtgtgccaatgagaaatgcaccggtttcttactccgtgatcctggtatgttaagatttaacttaggtagtttgtatccaagaacatttcttgatccctccagtcctcatttgtttacttttgcagaagaaaaaggcttcgtttgccagaaatgcttgcttcttaggagcaaggaagaggttaaaaagttagcaagtgatctcaaaacagtttcagagaaggctcctacatctccttccgcagaaggtatctgttgcctttgcttcctcaatacctgcatttacatgtctgaacaagattaactgatcttcgttaaattgagctgtgttgcaagttgtctaagaaaatctttgatcattttcagataaacaagccgctattgaactatataagacaattgagaaactacaagttaagctttaccattctttctccatccctttaatgagaacccgtgaaaaacttctcaaggtacgtatctttaggacttttggaagttttacagagttttgaagacgagacagatatggtttctcaaagcttgccgttacacattcttttgcagatgctaatggacgtagaaatctggagagaagctttgaattactgcagactaatagtccctgtttaccaaagtatgtttacttcatcttgattattacgttgctcgctccttgacgcatgttcgatcaatatttttcttttctttaggataccttctagtatatagatctaggtgtgggatttatatcttgaacataagtacgaagctcttaagagttttgtatagatacatttacttataattaccgtaggaacttattgcctgcagtatcagagctaactgtactggcactaatggctgctaattataccttaaacagaaacatctacataataattataaaatcattcaaattcttttggtggttattacttgtgcttaccttgtttataaaattgcaggagtatatccggcaacccatcctttgattggactgcagttctatacccaaggaaaactcgaatggtatcaaagcttctttgctttctctagtttatattttgatagattttgagctgcggaaactgaactagaatttgaagacagattaatgctctatatcacgactatttaattctccggtcaaaatccttaagaccaaataataagtgttttccctcaactatcaaagctacatgttctcagtgttggagactcttattctactgtgactttttcagtcagggaagtgggaacacgtagagattggctagtgttaggcggaacttggctaataagccttcaagatatccctaagttagaatctctgtggaaagaaacattcgtttacctgtaaaaaattatcattcatattttaactttctacgtgaatctgagtctgagtgcaataacatggtgtcggttactatcatattctgcggataaaaaaggtataattgtgatgttgcaggttgctgggggaaaccaaagaggcggtgagttcattgattaaggcatttgacattctgcggatcagccatggaataagcacacctttcatgaaagagctctcagcaaagttggaggaagctcgtgcagaagcttcttataagcagcttgcattgcattgaaagacgcttataatgatgacaactagcaactttgatctctctcttgtacaaactcatgaatcactttctatactctctacacatcttgaatatattgaatttgtctttacaaattctagagctgaaaacctgataaaattgatctcctctatttgatctaatataatattttggccacacatgtcaaaattagaaatatatagccaattatacaaactaaatgtaatatgtattgcatactcacatgtaccaactatatgacgatatgtagtcgcatcactactattttgttccggtacaccattcatagatatcaacttcaacaatcgttaaccaacaaaaatattaaaaaaacatattgttatcaaataatctgctcaacaaaaatattaaaaaaacatattgttatcaaataatctgcttgttacatttacttggatatttggatgatccactttttcattaatcagttttaaaatttctcatctaagcacaatatatataattttattcaaatactttataacctgaaattctttaatttcctacacccaaaaagaaaatttattttgcaaaatggaaaaaaaaaaaaaagtttcacccgagaaaagtctatttcttgacacaacgcatatcgaagcttctccttctccatatctctctctctccctccctctggcaatgctgtttcgatggcaacctcatttcctattcattaatgcctcacaaatcccctaagaaaacatcctcattgcgtagggtctaagaaaccgaaatcccacaaaaaaactcatgggtctctgtttctcctccgccgccaaatcctccggccacaaccgcagtagccggaatccccacccacatcctcctctcacggttgttaaatccagaccaccgcgatctccatgttccttcatggccgttacgatccaaaaggatcatagaacgcaaccgcgacgcaatgcaacggctaagaaaacgccgacgcggcatacgccaccgcacgggaaagtgagagagaaagttataagcaataacggtaggagacatggagaaacgatcccctacggtaagcgtgtagattttgggtacgctaaagattttgatcaccgttacaccattggaaaattgcttggacatggtcaatttggttatacatatgtcgctaccgataaaaaaaccggtgatcgtgtcgccgtcaagaagatcgataaggccaaggtatgatgatgaatcaatcatttttgctgtctttttctaatcattgagttttattttatttaagattcttcagattttggagcacaaagattattttatatatttaaaatatattcggattcttgcgtttcttgatttgatttttgttgggtagatgacaattccgatagctgtggaagatgtaaagagagaggtgaagatattacaagctttaactggtcatgaaaatgtggttcggttttataatgccttcgaggacaagaactctgtttatatagttatggagtaagtaaaaagccttttaggtcgtgtgtttttcttttcttgtaatgcaagaaaggcaaagggcgaaaacttctctgttgctaattagtttttccattgatgatatattgttctctaggttatgcgagggtggtgaattacttgatcgtattttagccaggtaactttagtaatacgtttacatgtgtgttactaaaattttagagtcttattactttttgagtaattaagctattgttgttgcttgtttccaggaaggatagccgttatagcgagagagacgcggccgtggtggtgagacaaatgctgaaagttgcggctgagtgtcatttacgcggtttggttcaccgagatatgaaaccagaggtagcttaattactccatcatcatgtttctgaatgtgtatagttggttttattcacaagtattgttttttactaatcatcttctcaaacagaattttctgttcaaatcaaccgaagaagattcgcctctaaaagctactgatttcggtttatctgacttcataaagccaggttagtagcaaagtgatttaaagtttttcttgacatatcacttctttgatctaaccattatgtaacaatgtaggcaaaaagtttcatgatattgttgggagtgcatactatgtagcacctgaagtgttaaaacgtaggtcgggacctgaatcagatgtgtggagtattggtgtaatcagttacattcttctctgcgggagacgaccattctgggataagactgaagacggtatcttcaaggaggtttgtgtagtttccctgaagtaaaaattcatcagtaatcgtaaatctctaatcatgaagatgtgtttataaacataggttttgaagaacaaacctgatttcagaagaaaaccgtggccaaccattagcaacagcgccaaagattttgtcaagaagttgttagtaaaagacccgagagcgcgattaacagctgcacaagcactatgtaagcgttttgacaccattttaaatcattttgttcttatcttttctgatctttctgtaaggattgtggattttcttggttgcagcacatccatgggttagagaaggaggagatgcatctgagattcccatagacatatctgttctgaacaacatgcgtcagtttgtgaaatttagccgccttaagcaattcgctttaagggtaatcaagaagagagatttgtgtttcatttgagtttcttgatgtgtttgtttttattaaatgagttatgctttttggtctaggctcttgcaacgacacttgatgaggaagagttggctgatcttcgagaccagtttgatgcgattgatgttgacaagaatggtgtcattagccttgaagagatgaggcaggtaaaaatgaagacaaaactatacctcaatcactagcaaaattgatcaggaaatactaagcctgacatcagttcttgttatatatataggctctagcgaaagatcatccttggaagcttaaggatgcaagagttgccgagattcttcaagcggtatgcatgtaaatttaggttaatactaatgatgatgatactactcaatctaaattctcttaattgtgttgcatttatgcagattgatagcaacacagatggattcgtggactttggcgagtttgtcgccgctgcgctacacgtaaaccaattagaggaacacgattccgagaagtggcaacagagatcaagagcagcatttgaaaaattcgacatagatggagatggatttataacagcagaggaacttcgaatggtatacactattatatgctttttaatcaattaatgtgacattactaatgagttctgttttatatgtttttgtttttgcagcatactggcttgaaagggtccattgagccacttcttgaagaagcagacattgacaatgatggtaaaatcagtctccaagagtttcgtagacttttgagaactgcaagtatcaaatcaagaaatgttagaagccctcctggttatcttatttctcgcaaggtctaagaaattctacaatattttggagagggataaagagaatcaaatctacaaagtctggacaagttttgatcccttatatagaaagaaaaatggggattcaagtgtagtaatgtgttgttgtaacatatttctataaactttcataagcaacggcaaaagaaatcgatattcgtatagtcaattagcacaatgtagttgatgagtttttgtattgtgtatacctatgatcaatcagagtgtgtaaccacaggtttgtgaattatgattgatttaactgacatgtgttatgaatatgttatatggatgttcattatagtcttataggtctattcatatgtaagttatgaatagaagaaaaaaaagttaatagtgtttcaaataaaaagtttgttaaaattttgttttgtagtcatttgtagctagatgtagacttaaatactagtaagattctgattattatgacgtggaaatgaagaaattcgttattatctatcaatagaaaaacgcattgcattaggcttgtattaaatagttgtgacaagactaaatagcgcgttttatataataggaagttaggataagaggagatagcacacacaaccacgtttatatactatttttggtgtttagaaattttaattattaatagaaaagtgcattacaattatacatttaacaaaagaaacgaagaaattagaattatcaatagaaaagtgcattgcatttggcttgttttattatagtgtggaaagagtgcttttaggtattagggtgagacttgagagagatggtacacgtaaaggcctaaaccatgtttgtatgtactttttttggtgtttagaagtttgaatgatcaagttaggtttaagtggactatcaaaagagagatagccaaatgatagtaaactacattttccgtcttaaaaaaaaaaaaactaaaaacacactaattaatgttacaaagtttagatatttgtttagattttttttgctatgagatatttgtatgttctataatgtatattagtatatacatatgtaaacataaacctatacttaataatatatctctaaaatgcatagaaaagaataagataaatataataagaatatataaatttaaatatatgtatatatagcgctagaaaattaaagttttaaataaaatatctggttttcattatttaacacgatatgaaacaaatttatatatagattttagaccgatgtccctaaattgtaaagtccatatattttagttgatggttgaggggatccttctcccttttgattactaatcagactaattgtttggtggttagtgtaattatttgtaacactaaacttctaaaagctaattatgcaaggcctcttgttgtaacaataaacaacctttaacaataaaaatctcagaagacacaaaagaaaaaaagaagtccatatatttatttagtccatatatttcatacatattgtatcatgattctatagtgtctgtttacattttatgtatctttaaattacactgaatggttaaaaagataccgaatggaaaatgaatgtatctttttggtatcaaaatatgaaacatcgttgtccttttaacttttcatatttttattgatctttccaacagtatgggtgatatttcatattagttaataatagttacaactttagttaataagtaactatccgattgaaacaaagtagatcagtaatacaactatatttaccgatttcttccggatattcgcttagggataacatttaatcgaatgttttaagtttcatgagtaccaaaacaagaaaacaaataataacaatgtgaataataatgttatcaagttttgttatatgataccaaaaatagaaaaatttggtagatgacaataataacttcattgccactctcaagttcgttcgttcgttgaatcttatctcacttctcccattatttacaactgtggataagccttttagtctgactcagctttctcaagatccgaaaacacactgacccaacccggttcgattttgcttaaccggacaagatacattaatctgcctaatcttcaattatttaaaagctaactaaacgttatacgtactaatcacttcttcccctataaataaacctttctaatttctcatctcaaatcacactgcatcacaaaacccaaatcggaacttaaaccaaaagacaaacaaaaacgccgtcgtttcacgatgctttcttcttccccaaccttcttcgctactccatttctctcttcttcttcttcttcttctccgtcgttctcttctacttcaccaccgtcacgcatttcccggatctcgccgtcgctttctacaaccaccgcgtcctacacctgcgccgaagatctaccgagattacgccaaatcccgcagcgattttcagcaaccgcgtctctctacgagatccttgaaattcccgtcggctcgacgagtcaagagatcaaatcagcttaccggcgactagccaggatctgtcatcccgatgtagcgagaaatagtcgggataactcgtcggcggacgatttcatgaagatccacgcagcgtattgcacgctttcggatcccgagaaacgcgccgtttatgatcggaggactcttcttcggagccggccgttaacggctggatacggcagttacggtggacggaattgggaaaccgatcagtgctggtagcgagttgactcgatgtgtcgagttggtccaaaaccattgaattggttgtaattagagcaaacccagagattctgggtggttgtgccacgtaggatcaacacggtttatcgtgccacgtaggatctgtcgcgtttttagcctttgtatccataagtagtaagtagtctgtatttagtatttaccatctaataaagaaaataaaaatttatgtataacttaaagtgttccaacttagcaatcaatagtatgtagccttggagaaacagattttttttgttacaggtaagatttacatactgaaatcatatagcattcttagaaaattttagttgtattatgttgtagtcacctaatttaaaaagctgggagtgttttttttctagtcgcacaatcagccgacatcgacaataaaagaaaagaagatctatgtcaaatagtaacaaaaatacataaatacatatatatgtaaagattttaatactgttgcggtgcggttttgggtgtggtctatgttaccattcatggtcttagtctatcgaaagttcgataacgttgtttgccttggtggcagtgaattttttcctgtcacgcgactgtgaaaagagtaatttttagagacgttacaatcgcatatcgtgaattccgatgtatgtgatatgtgtatgtggagggttactgagagttttttctatgggcgttataaacatttttagtttgaacgttgtgcaatcaactaggtatgcatgcatgggttaattttatgattctaatttttttgggtaaaagttatataaataacggtatttcaaagagttaacattgggtcaaatttcttgctcagaatttcagagttatactaacatgacgtttatgatgataataattatagtcaatttaaattgccttcaccagggccaccaaaatagctaagcaaatacgacagacaaggttcttttcttctcgtcatcataatccatgtgtcactcttgtttcaacatgccatgttctggaacatttgcatctcacgaatctttcataatatttacaaaaaaaaactcatattcttttcacatatatataactattttaaatgtgaacaaaaaaaaagtaattataaattcactattgtcattaaaagaaaaataaataaaaaaaggaactcttgtcattttcttaagtatagcattgtcatgacaaaagctatgctgtccataaacaatgggaagcagaagattgttgatgttcgacaccatacattatcaaaatatataatatatatatatatataatagacgatagatatccaataattagtttaagtaattgggatgttctttttttcttgcttctagaagaaaatatgatcgaatcatttttttcttcacaattgaacttcggataatatcatccatgtattggttcattgaattaaaaaagtgagctgggatattgaaaatttggatgcaaaataagttgcataaaaatagatataatatcaaaatataatatattgtttagataaaacaaccaaaagtgtgaaacactttctcttctagtagaagtataacataataatctaaatcatgtcatatttactttagatttactatgaatatccctttctttttgcaaaaagtgataattatagactgcattttcatccaattcccagagtttggggatggttaagagatgataaaacatctcaagcattttttttaaagttagtgtgaaatcaaaccttatcaattttgcttagttcttttgaaactcttacataaataggcccatttcattatgtgaaccatgggcctgatccaaaatgcacacgtggtaactgccgccgatagagaaggagctgacgtggcgaatttaaggtcaatttggggttaatagatctagcaagtagcaatttagggttttcattttacccatttcctctctttgtacgaacaaagtgcttcgagtttttgttaacctttttctctgatctaatggcgatggaagatcaatcggcggcgagatctatcggaaaagttagttggtttagcgatggaaaaggctacggtttcattactcccgatgatggcggcgaagagctttttgttcatcaatcctcaattgtctccgatggattccgtagcttgactcttggtgaatcggttgaatacgaaatcgcgcttggaagcgacggaaagactaaggccattgaagttactgctcccggcggcggttcacttaataagaaggaaaacagctcccgtggatccggaggtaattgttttaattgcggtgaggttggtcatatggctaaggattgtgacggtggaagtggtgggaaaagctttggaggtggtggtggtcgtagatctggcggcgaaggtgaatgttacatgtgtggtgatgtgggacacttcgctagggattgtaggcaaagcggtggtggaaacagcggcggaggaggaggaggtggtcgtccgtgttacagttgcggtgaggttggtcatttggcaaaggattgtcgtggtggttctggtggaaacagatacggaggaggtggtggtcgtggatctggcggtgatggatgctacatgtgtggtggtgtgggacatttcgctagggattgtaggcaaaacggcggtggaaacgttggaggtggtggaagcacttgttatacctgtggcggagttggccacattgcgaaagtttgcaccagcaagataccttctggtggtggtggtggtggtcgtgcttgttacgaatgtggaggaactggccatttggctcgtgactgtgatcggagaggaagtggaagcagcggaggtggcggtggcagtaacaagtgcttcatctgcggcaaggaaggtcactttgcgagggaatgtacttcggttgcttaacaaaaagatgcaaagaagaagagtaatgttcataaacctcttttgttttctattaaaatctacctaatgctcctttttggtgactataatgtgattgctaaagtcgtttaggatgtttaagaatggttgttttgggagtttttgatctctctatattactcttttgactggtttatgcaacctgttcactgcttttgttgatgccataagtttgagatcttgaatgatatgtgtgcttgcttatttacagtttcttgtctttccttgcaatgagtgtgattgtatgacttgaaaattcaatctgttatggtcacttctgttatataccaagatttgagacttttttttactaacttgtaaatacaaagagatgagtcacaagtctttcttggttcctctttgttggagagcttaaagattttcctgtaactggtttacttatactctgcattgctgtttttcttgttcttgatgaaacagagatattagcttaagaataatcttttgatattttagattacttagatcttgttttaggagaatctcctgaacagaggagagacatggtgtgcgtgatcttgtagtgcctatgcctgttcgtcagttcgtggtttctttttctctacttaccgtgatgttttaagaagatgatgaagttaatcccgttagttttttttaacctaattacacttgtgattagctgaatctttcggatataaacatttggatcccacgtgttctgttattggaagtgacttgatctttcttaacatatacaaagacaagcttctaatgtccaacacctcctttatttccgttaatacaaaatcccaccaattccagtacaattaacttactacacaacaccatacatgtctctttcctatcaaagtctttaaactaaataactttttccttaacaaacaaaagagagctttttcctcctctaacctttatctaaatttctagttttgaatttaggaagagatcctcaacaaatagttataaaaaaaaaatgtataattttcgaaaaggataacaagtatactagcttgattcgtaatttccatttcacaagtattaatgagaatattgaaataaaggaaatgatgagtgaacatgtatcggattctgtaatggcaaaactcatatagggaaaattgatattatgaaactttccataacacaaatccccgattctcttatataaacacgatccctaacttctcctgaatcatacaacatcaaacggtaacaatggatttggctaaagtctcttgctttctcttagcgattatgtttttcatcaatggtggttcctccaccacgttcaccatcgttaaccagtgtaactacaccgtctggccgggacttctctccggcgccggcaccgctccattacccaccactggtttctccctcaactcctttgagtcacgactcatctccatacccgccgcttggtccggccgcatatggggacgcacgctctgcaaccaaaacgaaatcaccggaatattcacttgcgtcaccggcgactgcggctcatcccaaatcgaatgctctggcgcaggagcaatccctccagctacactagccgaattcacactcaacggcgccgaaaatctagatttctacgacgttagcctcgtcgatggttacaacatcccaatgacgatcgttccttacggcggagctatcggagtcggtaagtgtaacgcaacgggttgcgcggcggatctcaacggcttatgtccggagcagctgaaagtaacggttgaagcggctggaacgggtgctgtggcgtgcaagagcgcttgtgaggcgtttggaacgccggagttttgttgtaacggcgcgtttggaacgccggacacgtgtcagccgagtgagtactctgttttctttaagaaaacttgtccgacggcttatagttacgcttatgacgacggcacaagcacttttacttgctccggtgctgattacgtcatcactttctgtccttctccttcaaggtaatatttttgctactgaatttactaaataaggaaagtaatattcgaaaaatgttaattttagtgttttttggtaattttaatgaatcttagattattcaaaattcatattttggaagttttgttaactgttttatatatttttgttgttgttgttgtgttttgaattagtgaagactttgagaagagtgtgtctccgcctctgcaaccggaagcagttagcgtctctgacgcgtcaagtagaatctcagttgcgttatcattggtcgttttggctgttgcggtttcttgggtgtggagtggactttggtgatattcaatacggcaccgaccttttttttttctttttcttttgtctttttgttcattctgttttttcaaactaaaattgttaaacagattttccaattaatttatgtgattgattttgttgcgactcaagaaaacgagttttttttgggctgaagtaaacattgactagttaatatcatactccctctgtttctaaatatttgtaatttaaggtttttgtacacaaattaaaaaaacatacaaatttcatttaatttattttttttctataaaatattattaattataactaatgcaaccaataaaaaaatatgatctaaaatataattggtttcttttttttccgacaatctaaaatataattggttaaaaactgttaaatacatttaatatttgcatagaaaaataaaaacaacacttatattgaaaaaaataaaaaaaatttaaactatatataattaaaaacagagggagtaatagattttaaaagattttatataatagtattgtcaaaaataataaagattatataacacacaaaaaaaaacaagagctgaaagcctcaaactacaataagtgacacaatatcactacaaaaacaaagtgtgtggattactatttagaagttcaaatattttcaatagaaaaaaaatttaaaactcaattttagatttttacgataaaataaatagctaaattatatagtaaaaatgaaatgtgtaagattaaaatttaatttaaaataaaaactactaaaagtagtttattaacaaagtgtatagattactatttaaaagtatttagaatttaaatatcagctaaatgtaccttagctaattaattatacattgatataatattaaattagttttcgcattacaagcaaaacaatcggcatttgagttcaatcagcgtaaaaacctaaagtttaaacaaaacaatgaaaaaaataaaatacaacagggtaagcgaatccgacggcggatacgccacgtatacaccactgccgccaaaatgaaaacagagtgctcaaatccaacggcggattaatacgaataaatttggctactactagtctactagtatatatatatatatactagtatatatatatatactgattcttgttcagagactctagaaaactaattcagcaacaaaatggattctttacacgttcttagatcctttcttcttcttttcattgtttttaatcatcttcctcgcacaactacatcaatgtcagaaccaaaagtcattaccatcgatgtaaaccaagctcagaaacttcttgattctggctacacgtttcttgatgtcaggttaatcttaaaacctttcagattcagtcatgcctttattgttgttcgatattactgtctggtgatttctgaaattttaagagctgttaaacacagaactgttgaagagttcaagaaaggccatgttgattcagaaaatgtcttcaatgttccttactggttatatactccacaaggtcaagagattaaccctaatttcttgaaacatgtttcatctctctgtaaccaaaccgatcatctcatcctggtaataacatagtcttgtcctgatcatgtgaaagtatatttcaattcactagatcttttttttttttatgttcactggatctgaatctagaaactgttgttatgatcttgttttgtagggatgtaaatctggagttagatcattacatgctaccaaatttcttgtttcttccgtaagtaccaaaagattcaagatttgaaaaccctgttttcttctttaatctatgagtttattggtgagatataatgcgattgtttaatcatgtgatagggcttcaagactgtaagaaacatggacggtggttacattgcttgggtcaacaagagattcccagttaaagtggaacacaaggaactcaagtatgatgagctttgattcaaattcttcaaatacaagcatgttaatgtaaatttttgctttaaatatatgttaagaatgtgtaaatgtaatcatattattgcaaatttgcaataacacataaagtataaagttcaaggtttagagagatgaaaaaatgggcagaccgaccaatgaagctccagcatcgacaatgtatgtattcccggagatatatttagacgagtcgtgaacgaggtagcgtaggagagaagtaagccccggatccactgtctgttgtacctttaatgggactgtcctctcgataacggtcttgagccactctttttgcataagaccttgtgtgatctctgactttaaaagccctggtgcgatcgaattcactctgatcttgtaaacacctaactcaagtgccatcatccttgtcatggtgtcaacaccgcctttagaacaagcgtatgcgactccaccaggcacctgaccgcggtggagccaggatactgatgaaatgtttatcaccgagccaccaccacgtttagcatcgcgcattaaaatgcatacgtatttggagactaaccaggttccggttaagttggtcttgaagactttgtcccactcgtcttctgacaaatccaaactcgacttgacattgcctctaaatcccgcattgttgatcaacgcatcgatctttccgaagatttcccaagctttcttaaccgctttttgaacggtggctgcgtctgatgaaacgtctagctcaagagcttcagcttgaattccagctgaatattcgaagcgatttatttcagagcagagagatttgagacgatcgacacgacgagctgctgcgataatcttacagccagctttggctagatcaagacatacctctcttcctataccagaggaagctcctgtcacaagaaccactttgtctttaagttcacactatggctccagttgcttcaatacctgctttgttagagtcatattaaagatgattaaaaagcatatatgataaattttcatataattgagctaacacagtgagatataagagaagaagtatctcacgcacagtttgatgattactcatgttgtttctctttgtgtgttctttggtggagaaggatatgcccataacatataaagacttgtctctaaaccaaaacgacattttaacgtggcaatctaaatctgtaagtctgtaactgatttgtctatcaaccaaactttaaaaccttttagaggcaggggagtctttattgttagttagatactgtctggtgatttctggaatttgagagctattaatacagaactgtttgatgaagttgagaaagggcatgttatcagagaaactctttaatgttcgttactagttttgtgtgtgtgttttttaaaaccttaataaaaacagaggatattggtcttaatgttttttccttgaaccaatctaagttttttaatgagaattaatgggattttgtcttttcttttttttatcatgtaaagagaacttcaagactgctagaacttagaaacatcaaacatgtttggtggttatattgctgattaagattatccaaatataagcatgtttaaaatttattttgttaactaaatctaaaatcgttttttttttttttaatcgttaattattgtatgcaaaacaatttaagttataagttaagcaatgacatgttaatagttcaaactaaatactgttttacaaatgtaatagcatgttatgtagagtaaataattagtaccttttatcagaaaagaaaaaacgttactaccttctttttttttttactcaaaaacaaacaaaagaaactatcatttctttatttcagttaaataatataaagttttagtgatacgcaactgcataataaattatctttaagtacactctttttttgagtttaatgcaatttccgagacgaaaaaagcgaccgaccgacatgagaacaattaaccgtgtaacagcgcgggaaagatgtcgacaaggtgagttataaccgaaccggtttataccgttttacacgcgtcatttacgcgtaacatccacgtcttcccaaatctgacagatacagagatacttaacttggtccctttccttcttcttcttcaaatataaatatctttaatcaattcagaaccaaaccaagtcaatcattcttcattgatcttctccgatttgaaatcgccggcgaaaatggaatcctccggcgacaagcaaacttcttctctttaccctactgttgacacatccaatcccgaagctcctataaaccctagctcatcatcttctactaacaatctctatccttctctcgatatgaatgatctcgctcgtaatctcttccctgaacaaccagagacgagttctattccggtttcagctcctcccgctgcgacggaggaagtaattttgaaaatctccggcgcgattcttcatttaatcgacaaatcttacagcgtcgagctcgcttgcggtgatcttgagatcatccgtattgttcaaggagagaatgttgtcgctgttctcgctagtgtctccgatgagattcaatggccgttgactaaggatgagaactctgtcaaggtcgatgagtctcattacttcttcacgcttcgtcctaccaaagagatctcacatgattcaagcgacgaagaagacggagatggagggaaaaacactaacgagatgttgaactacggacttacaattgcttctaaaggtcaagagcatttactggtggagcttgagaagatcttggaggattatagtagtttctctgtgcaggaggtgtcagaggaagcgaaggaagcaggtgaaaaggttttggatgtgacggtggcgagagagacgtctccggtggagcttactggggaaaggaaagagattgtggagaggcaatgttctgcttattggactactttggctccgaatgtggaggattatagcgggaaggcggcgaagctgattgcaactggctcaggacatttgataaaagggattctttggtgtggagatgtgactatggataggcttatttggggaaatggtttcatgaaaaggaggttgtcaaaggctgagaaggagagtgaagttcaccctgacaccttgaaaagaatcagaaggtatgaatgaatttgattttgattttgatttagaggtttgtgatgtttctcgaaaggtgaaatctttgtgtttgttatagctgtgtcatggaatgtttgcagtaaattggtggaatatggtttatattttaggaaattgtctggacagaaacttgtgtgaacgtctttgataatcctttttgtgagacataagttttgattgatgatcttgatttgttctggtgtgtcctgaagagtgtaatttgagagctgagacgatatgtgttcatcgtctctagcaaaatgacatatagttacgtgtattggtgtctaattgtgttgttgcctatgcagagtgaagaggatgaccaaaatgacagagagtgtagcaaacagcatactgtctggagtccttaaagtttctggattcttcacaagttcagtggcaaacaccaaagtaggaaagaaattcttcagccttcttcctggagaagtcatccttgcatctcttgacggattcagtaagtctacaatatacttaactcgacttcatgcggctatctttaggtaatcatgatcattgaaactgttgattcctgttttgatagataaggtctgtgacgctgttgaagtagctgggaggaatgtaatgtcaacctcttccactgttacaaccgaactcgttgatcacaagtaagtaaaatcgagtatttggaattgaaactcctggttatttggatatggaaagtgttttaagagaaggatgtaaattttggtttgatgaatataggtatggtggtaaagcggctgaggcgacaaacgaagggctcgatgcagcaggatatgcgcttggcacagcctgggttgctttcaaaataagaaaggctattaacccgaagagtgtactcaagccttcgacgcttgcaaaaaccgccattagatctgcagcttcacaaaaaaaagcctagtaaggctgcctgatgaagcaaaacagactcattggtcctgtttgtttgtatcgtcttgttgtcttttgataaataagttaaactaaaaagaggtgtggattagtagttgttgtgaagtgtttatgtttctctatgagaatcatgtaatgtctctgatttgattcggaatatgtgctgtatgtgtaagtggtcaaatcaagattccttgaaattagttttcatgtttttttaacgtgcaaatagagtgagtgagtgattgtatcatgcataatctctccttccagctaactagcaatgctaaagaaagatcccaaagataaaaagttgaagatgcatttgactgtttcaaaagaaatgtctggaagagccacacgagagtttacatatagtagtagagaggccatgtctctgagattccagataactgataacagtggtcagatttatacaatcgaagatgccagaaaaagaaagtaatcaggttagctgcctgatttgcactgagcttggaacataagaacagacaagtgggaaacaactcgtgtatgcttcttccccaatatccactcttttgaagtatccgttcttcccaacaatgtaagccatgccacgatgggtatgctcattcatatctttatcaaaaaccacaacaacattcttcttctggtcaatgaagaaactcccagcgtctgccacaaactttaactcatagtcgaattctatcatatcatgatcaaccgctaagaacaatttgttccacaaaacctctgtggggtcaaccttgctcgtaacccaaatctccatcatcaatgtagcatcactctgaaacaacagcgcaagctgctcttctccaacactagagagagtaacaacatcatcataagtaaaagactcggtagcgttaaaaggcagaggcaaacgcggtccaaatttctcagttgtgaaatcaaaacagatcaagaaattaacatagccatgcttctctgttgcataccagtaagtattcccctttacagacaagccacggtgataagagtgtatataccagtcaggactaacatcaagaacaaccttccatgaattagactcaaaactgtagagttcaaactcacaaatccgtgcccgtggatgtgaatcataatcgtaatactgatccttcaatctcaggattttgtggttcttattctcatcgtacccaatagcgtaaatgtcctttatgtggtaagaatttctgggttggatccatcttgtttgcccaaaataagggttccaaaccacaagcctaaagttgaggtctttggtgatgcataagagtaaaccatcgcagtgaaagacactagacacattatcgacttgatgctgatttgcatcatcgctaaagctagtaagtgtacctttaggcgtaaaagatggattaacatcgttgtggagatcgacgctcgttagataaactctaaaattcctcatcatgatcacctcaaactccttcgatttcaattgcttcttctttgcttcgacgatttgtttcttgagaaagctccgatctttggataaatcgttccattttttgcaagtgaaccgcactgatcttaaagatgccaatggaaccctactgagaatctctgctaacaaatcccgtggaagatctgacattatcgccattgttgaatcttaggatcaagcttaagcttcgagacgataactcttaaaccctttgtccccaatttcttacgactgtgaatattattattgtaggggaggtgctttcgtgggcttttgaaacacatagaaacccattgggccaatcgtgggctttaagtgtttatttttttagcaagaaacgattttcttttttatggtttagagttcacatcgttctacatttttttttaattttttttttaattgaatttggaggttttctttggaaacacttcaaaaaaaaaaaaagaattactgagcttttttttttcaattctagattctttttggttataaaataatttgtttttttagatgctggagtacggtcgattagtacctaacattttatttgaatattgataatttaatattttatatacaactgtccaaaaatggaaataaggaataaatctaaagcgtcaaatatttaaaaataaaattgaaactatattctttattcagaaaatctttcaaacattcgtatctgattcaataaaccaaaggagttgacactggtctatttctagaatctattatcaaattaagaaaacacaaattagtgattggtcttatacataggttatatataggtctttttcttttttgacgagaatgacccaaatgttgttaattagatgttttaggttatacataaatgattacttatagtcgattagtacctaattagaccattaatataatttgatataaggctgtcaaaaaatggaaatagcaaaatctaaaataacgtcagattatttataatgcgaaacattacatactcagaaatcttcaatacatttgatacgtatctggtatctgatttaaaagaacttattattcctagaatttgttagaaacttaagaaaaaatataaaataataatcatgtatagaaccgaaaaggtgatgcaagattgataagagatcgaatcaaatgccctataagtgtcgaaaccaccaatggttactaagtgctttgtaccacttaatcttatcctcttattatttttcatacgttctaaatttaaatcttaattgtcatttatataagagatactaatatatatgcttaccgcatcttcactttaattttcttgtccgatcctctcgtggggatttttaacaagtcttaatcgagctttaagatgtttatcaattctttgctattttatatgttttcataaactgtctccttcacaccgattatgtaggattatcttactagttatacaattagaaagaaattgacccaacgcctaaacttcactgaacaaaaatatcatactttcataaattatttttagcttacagtttgttcttacaatttatcaattaacatttcttaaatattttggaaaatgtcaaaaatatcacttatcagccgtctaatattttcaaaatattataataatgcaagtacgtatcacaataataaaaattaattcattgtgatatatgattaacgaaaggaagatgaaattttgtttccatttaacatgtcacatgtggtttagtttaaaccatcgtcgaattcagaacaaatttcagaaagatgatacaaagtccgaatgattttggtgatacaatatgtcaaatagataagaatagtatgacaccacgatagataaaaaaaaaacattacatacaaactgattattaatttatcgatgaaacaaatctgaattatttcggtgatacaatatgtcaaatataaaagaatagtaaatcacaattattttggtgatacaatatgtcaagtagataagaaaacttcttccgcttgattaacaaaattattgtattctcgtaagattgtaaatcacaatttttatatcgctaatgtttactgatcttatatgtttatttcactaaaataattgtgatttttactattgtgtaagtgagaataaaacagaagaaaactttttttatactagtcagtgaactggagtaaggagtgctctatctcttacactatgtacaatggtttacagtggttcataaattcaagtattcaacaccatctttttacttttaacattctacatcatattctttctcttaataaaattgaacatattatcccaccactttattatcattttcaacataattttgtaactacatattaattacaattaatttttctccattataggtgtaactcaactttaggggcattttgctctaatgtattcctttaaaatagaggttcctctaaaataaaggaaaactatattttagaataaactatattttcctttattttagaataaactatattttaaaagaatacattggaacaaaatcaactcaatttcctccaaaataaagttacctctaaaatagaaaaaaaatagaggtatattggaaatggtctaacatttaaagtttcttttattaaaagtatgaatgtaatatacattaaaccaaaaaaattctacctaaacacatataccccaaaagcggacatgtgtacctaaaaacattaaaccaaaatttttctattttggaaataatccgtatcgtttcctttcgcttagcttatgtatattttggttttcaataattttgaacaacatgaaaacaagtgattgtgggatctatttgtaaatgaattataggtgatcacttatataccatttatgatttatatatgtgtttttatgaaaacatgattatgctatctcttactaatttctaatatactcatcaaacttttatgttttagaaaaatgatacgttatgcagggtatacatgtaacatatgtttgccaaaaaaaaaaaaaaaaaaaaaaaaaaaaaaaaaaaaaacatgtaacatatatgttcgtgtcaaaaaaataactaaaagagagaaacccattattgatttacaaaacgtttaacttttcattgtcttgcgattatcaaacatgtatgttattcagctcaagtgtttcttctacttaattatgttttagtaaattgtattgccattcaatgtttatggctaataaatcttgttatatgtggcaaagatctttataattcgtaatttagtcctacttgatggtttagcacatcaaccatgcattataatacctaagtttatatgcgtattattatttgaaaactgtatatcatgcgggttagttattattatcaacttgccttttgtctccacaacgaaaatgagccaccaccaaagagcacacaatgttaattaaaaagatatatagaattatgatctatacatatccgtaagtatataattaagtggaatgcttatgagactttgaagattcaaaaggcttacaaatttctctaaccagtaaccatgcatgcacatttcttttttaagcacacatcattaccattcaccttaagtcttctaaatagatccttttgagattttgtctagattttccaatctttttctttaaattgtgatctcatttgttgttgatttgatgctaaagctagatttgaatcttgctttaaacacaaacaaaacgaaaaatttaattagttgaatatatatatttaattatgattaatgtgataacctttgaatgtttgattctatatgaatcaaaatttaaaataaagtaattacttccagtgatgagataaatttatccacactacaatcttgtcaatcaatttttttgtttataacgaatatatgtattccattggattgaagatcaatccttttcaataccatgcagaatcgaatttaagatatcgagaagaatggtaatatattgactaagttgagtcagccaaattttatccaaaaccggttaatattaatacaacacacaaataaaaatcaaatatgtcaaatgaaaatacctttaaatcaaccttaaatatattgtacttattaaagagaactacgaataaatttgtaactttattttaccaaattcacgggttgttaataccaccgactatatatgctttatagatttgttacttgatcttgaagctcccaaagattcttactaaagtttggtcaaaattaattatcaccatgaaatgatgaaagtaatttttttttcattcccatcactggcactggcagtttaaccgtttttttcccgttaatcagtgacaaattttttttgtgaaccaataaccttaaaagtataattaaaaaagttaaagacatgactaaggtttctgaaatccatggtgaacaaacaaaaatatttgggtaaaatgtcattgcaagcagacaacagttaaacagtacctccgggtcttgactgttaatcgcagtctatacagtcatctatgcgttatggaacgaccaaaacaatatggtcttcaacaatcttctcatcatcgtagaagtttctcttcaaaattgttgttttgattggcgaatcaatattatttgtattgcaagacgagaaattaccaaaggatagttaatctagacttcgaaacgaattatgtgaagttcatcaaattgataacaatttatattgcttaagagcctattatgtctcgcgttttatttgttaagattgattttttagctagttcttttttttttgtgcaaccgtttagctagttcaatttgtagtatatacaaggtttattatatgttttgccctactgttttaatgtattggccaatgaaaaaattataaaatatattaataaaaggtaaaacagaaaatttaatagttttcttaatttgtgtggaaaaacattaaacgacatgtaattcaaatggatggagtatataagagaaacaaatatatttgacaaatgatattagagtatcggtaaaattgacttcgtagacgtacataacgacctttaccatacccgaaaagtcaagtgtacagtttaaacaattaatgcaccgaatggagtttcatgctaacttaatattttattttgattcatattatattatttatagttataatgtgattcatatatattaaaaagtgataaatgaatatatacatatatatagtgatattttcatattattacaaacatattcctctctatataactatattttgtaatttgttttcaattttacatacattagataaaaaatagacactaaataaattcgcgatccttcattttttttttgttcacttaaagattaactttcttaaaataagattgcaaaatattgagatgaacgacgtttctggtacatgaagccggcatgacctaattctccggaaattaagttgacgtaaagatatatgaaaacaaagccttaacaaggaaagcaaagaagatgaaatgagagagtcagagaaattcacaagactcacacatgggaacgggtgacatgggagatctagtgataaatgtattttggacgttttgtggatattttcaacccacttttttttttttttttttttttttcttcaatattttcaacccacttaatactacagttttgctacaagccatatctctttttaactatttttaaaatctctggtatattctgtgattactctacagtttttagttacctaatattttttttttgaagtaaaagcagaacccaaaaacaccatcacaaagcacaaatctttgaaaacttctgagatagagacaaaacaaaagttgggtcctataaattttcattcatttttcatctttaaaattcatttatttcttcttttaaattattaattaaaactttaaaagttggaaaattcttcaaaaccgtacaactatatttgtgtggacctgaagccaaatgtctctctccattggccattttaccttctacacattcccactggccaaattcgaagttcattctctctcaaatcactttgcccaaatcttcctttttcccatatttgatttcttctttaaataaagcaaaaaagatttcatctttctatttattctctttataaattggaacctactttgcttcttcttcagtctccacacttatcttatttttgccagtcttctctgtggatgaagcagagtttttagtcaatcaaaagtttgaagctttccttcatgggtttctgatttgtctactaaagttttgatttttttaatttgggtattaataaaaaaagtggggagtgacacaagaagcagtatagtcattagttttccactaagcaaagcacccaaaagttcaccaacaacaaaggcctaatatgtgtctttgtttatgatttgggatcatctgaaacaagatgcgaggagatagcttctcaatgagtattgagaatcttcctgattctccaatgggttcgaggaagaagaagatgcagatcaggaaggtgttcgataaaatgactgaatgggttaccccttggagaagtaatttggagagtccaagagagatgatgattttgcgtggagatgttgaacaagatgagtttcaatacgctagtagtcactgtttgtcttcttactacagtgtctttgttgttcgcctcgctataatggttagatttccatcagcttctcttcacttttttctttgaaaattccgatcaaagtttctgtttttgcatgtttagtttatgatccaacttgaaaaccaatccatttgatgagaaaggtggaagctttatgagtttagaaatggtgtgtttgtgtgtgtatgtgtgcaggttatgttagcaattttgatagggcttttaacggttctaacatggcatttcacaaggatttatacaaagcagtcgcttcaaacattagcgtatggccttagatacgagcttcttcagcgtccagtcttacggatgtggagcgttttaaacaccacatcagagctaacaacagctcaagtcaagttatctgaatatgtcatcaaaaaatatgacaagccaacaactcaagaagaacttgtggaggttttgttttctgttttcctgtctatcctttgtttggtttgagatcctttatttgataatttttgttaactttatcagatgtatcaagcaatgaaggatgtgacatgggctctgtttgcgagtgccaaagctctaaatgccataaccataaactacagaaatggatttgtccaagcttttcacagagatccagcaagtagcagcacattctacatcttctccgatctaaaaaactattccatcagtggaacagggcctgaagatgtaagtgggtggaacaacaagtcaatacacgggaacatgtctgccatttggtatcagcaacagcttgatccagtaacaggggaaaatttgggaaagcctcttaaaattccaccggatgatctgatcaacatcgcaggaatctcacaagtgcctgatggtgaagcttcttggcatgtgacagtgagcaaatacatggactctccgcttctctcagcggctttgcctgtctttgatgcatcaaacaagagtattgtggctgttgtgggggtgacaactgcactttacagcgtaggacagttgatgagagatcttgtagaagtccacggtggacatatttatttgacatctcaagaaggatacttgcttgctacctccacagatggtcctcttttgaaaaatacatcaaacgggcctcagctaatgaaagccactgattcagaagagtgggttataaagtcaggagctcagtggttagagaaaacttatggaagtaagcgccctcacgttgttcatgctgagaatgtaaagcttggtgaccaacgatattacattgattcattctatcttaatctcaagagacttccaattgtaagttgtccctatcaagattctaagctagatttagatgcccagtaggatcacgttgtttaattttctgtttacgtattttgcaggtaggtgttgtcattattcccaggaagttcattatgggaaaagtggatgaaagggccttcaagactttgattattctgatttctgcttctgtctgcatcttctttattggatgtgtctgcattttaatactcacaaatggagtttcaaaggagatgaagctaagagcagaactgataaggcaactggatgcaagaagaagagctgaagcttcaagcaactacaaaagccagtttttggcaaatatgaggttggtcatcactgtatattcaagagacaagttcttacgattgtttaacattcttaatgcttaatactgaaatgagggttttgaaattttctgcattctagtcatgagttgaggacaccaatggctgctgtaattggattactagatattcttatatcggatgattgtctttcaaatgagcaatacgcaacagtcactcagatcagaaagtgctctacagctctccttcggcttctcaataatatactggacttgagcaaggtgagaaattataagaaaaaaaatcttatttagttttgatataggaagaaaaaatcttcaagctttagtattacatctgatgaccttaagttaggcaatgagtaaacattttagctgtttcagctgtgcttttctcgaaactagtatgtatgtgtacagcctaaaaagatcaatcactctaatttcttccttttccacctcataggttgagtcaggaaagcttgttctggaagaagctgagtttgatttggggcgagaacttgaaggacttgttgacatgttctcggtgcagtgtattaatcacaatgtagagacagttctagacctctctggtatgactcggtattatattgtagacagccaataatgaattttctttgcaatgaatttttgcgttatgaaatctcatatattttgctctttttgtagatgatatgccagcattagtcagaggagactcagcaagacttgttcaaatatttgcaaatcttataagcaattctataaagtttacaacaagtaagttttttgaccatatctactttctcttctttttcattacagagatgcattgctaatcataaaaagatggttgctttgcagcgggtcacattattcttcgtggatggtgcgagaacataaattctctacatgatgagatgagcgtatctgttgacagaaggaaaccatgggctccaatgaagacaaaacaggtgcaacacagaaatcacttgcagaagtcttgtaagaacgcgaacaaaatggttctttggtttgaggttgatgatactggatgtggtatgacacttgagttccctaattatatgtcatttcgctatccgcctcatcgatctcccagattctgaaaatctctttattgtgtaaatcttatcttcaggaatagatccaagcaaatgggactctgtttttgagagctttgagcaagctgatccttctaccactcggacgtaagtgatcatgattaactgcacgcagtgaatgtttaagcaaaactttgccgttagttgaatcttatatctcactagtcttatttttcttcaggcacggaggaactggacttggactatgtattgtgcgaaacttggtgcgtcaagttttggaactttagaatagaattgttttatagaagcaattatatgatctgaaacctactttgtaactttacaggttaacaaaatgggtggagaaatcaaagtagtgcagaagaatggcttagggactcttatgagactgtacttgattttgagtactcctgacactgtagatcaaaacatccagccagatttctccaaatacggtctcgtggtaagtaaatttgggaaagaaataatgacgaatgcatcataaattaaagcttatgtgtttgtgaaagtgttaatggttttgaatgctacaggttatgctttccatgtatggaagtacagcaagaatgatcacatcaaagtggttgcgaaaacacggcattgcaactgttgaagcatcagactggaacgagctgactcagatcattagagacctcttggagacgggaagccgtgacaacagctttgattcacagcacaatatatctgatccactgagagcagagctttcaaatatagtagaaatcaagaaccctgtgtttgtcatagtggtggatatcggagtacttgatctcaccacaaatatatggaaggaacagcttaactacctcgacagattctccaacaaagcaaagtttgcttggctactgaagcatgacacctccaatacagttaaaacagaacttagacgaaaagggcatgtcatgatggttaacaaaccgttgtacaaggccaaaatgatccagattctggaggctgtaataaaaaaccggaagagaggcttgtgtaatgacttaagaaacagaggaaacggaagtgatgaatcccacgattgcttagaaattgatccaacacaattcgacacttgcagttccgatgattcctcggagacatctggcgagaaacaagtagataaatctgttaaaccaagcaccttgcactctccagtgcttaagaactatctcatcgatgccactaccagcaatgatgactcaacatctgcaagtatgactcaaaagaacccagaagaagaagattggaaggatcggctgtattcaggaattgcgttggatggaaagaatcagaaatctcttgaaggtataaggatcttgctggcagaggatacacccgttcttcaacgagtagccaccataatgcttgagaaaatgggagcaactgtaactgcagtctgggatggacaacaagcagttgattccctcaactacaagtctatcaatgctcaagctccaactgaagaacacaaatcgttcgaagaagaaaccgctaacaaagttacaactcgggagactagtttacggaattcctcgccttatgacttgatcctcatggactgccaggtacaattacttttttcaattccacatgtaaagaagacatgacaatttattaaacattttctcatggtagatgccaaaaatggatggatatgaggcaacaaaggcgataaggagagcagagattggcacagagctgcacattccaatcgtggcgttgacagcgcatgcaatgtcttctgatgaagcgaaatgcttggaggttggaatggatgcttatctcacaaagcctattgatcgaaagcttatggtctctaccattttgtcactcactaaaccatcagcattccaaacttcattgtccgcttgaagaatcgggtaaaaatctaacaagtgaacttttttagtaggttcaggatcttgcattttgtatatatgtgaatttgtagttgacgatgaggtttttgggggtaaagaaaatcctgttttttggtcattttttgtttactgcaatacgaagaatgttttgtacttaaacattgtatacttgttttaaagatgtgaagaagttaaacgaccaagacaaagtttcgcagcttttgcagcttatgtttcccttgcggaagcaaagttcagacaatgcatgttgtttcgatggtaagtaagagaaaatgtagttcagttgtaaaccggccaaataaaaagggttagctaaaatggcccatgcaggtttcgaacctgcgaccttcgcgttattagcacgacgctctaaccaactgagctaatgggccatttgttcaaattcttcacaagtcagttaaacttcaaaagcgaaatgaagtgcatgttgtgaaatggcatcgtttagcaacatgactatttttttttggaacttatatgttgttctacacgaggtaagaacggaggcgctggctagttgcatggtgaagactgaagagagcagcttcatctttttgagattgctctgtttttgggtttgtttctcttgttttgaggattgtgtgatggatgagaagtggagtttgagaggtttatttataagaaaatatattaaagaaggtaatgactggcatagttgaatgcaaaattctgatttttgtatcacaatactgaaacattcagaacttttaaagacttatatgcatcacaattttttggatgaagtattcaagacaataaaatataccaaattgcaccatttgttaaattagaattggaagaatgagaacaagtaatatgttcaaattagtagacttaagtaaagttgaagtggaaaatccatcatctctgttttcttcaactagtcattgaaatcgaaggaagaatagagaagtggtaagtgcaatattaggtctcagctaaagctggaaactattcatcaataaacagaaataatcgtttttttaaggattaagagagcttatcacaacgaactctggaacaatttttaagcccaatgtgttttcttcttaagccttcactagaagagtggaagagacagagagacagagagagatacgtaagagaagcgtagagaaattacaaaatggagcaggctttttgtgctttgcttttctttttcttctgctttggaggttgaagaaccactcggatcgctgcatcaaatactcctttcacgttctgcaatttcattaaaaaaaagctttgagaaaagctaagtaaagaagcagagtagtactcaaaacaaaagggaaagtttttgtgtcttgcctcttgtgtttttgaactgcactcgatgtatgcgggagctccaattagtttcttcagttcctctccctttgatgcccaaagtggtgaacggttaaaagggttcgtttaagtaacaggctaagtaaattgacacatttcaaagaaaaattctgtttacctgagcagtagtaattggtacagcgccagggtggtcaatgaagaactgtttgtcatcccgaagatctggcatatatgatgaaacacaaaacataagcaccagacgaaactcataactattaaaagtaggtctagacggatcagacagcaggccgaaagttaagcattggtattaaaagtaagaaacagaatccgttacaccaattttggcacaacatcttgtataagccttttctattaggtttataattgctagacatccaacagctgcttacatgcatgtagttgtctcttacaatggaggttaactatcaagagaaaatgtgagatatgatccataacgtatcgcggaattcattaaaaatgatgacgaaacatcacagac

SEQ ID NO: 243 - DNA, 88149 bp, Arabidopsis thaliana
aagcttggagagttggtgtacaccaacttttgtagatattttcatgtgttcttgtattcacaatggaaccttgttggtaataattttgttttcaccacattagatggaatttgaaaatgaaaccacatcatagcatgtaagtaattaggaccaagacaaggcacaagaatcctcgatctcaatcttgttagtaattaggactaaatctacgtctttataaaatccaagttttaattaatttgatcctcctactttccaacttctctttacttaacacaactccaacctaacgttacgagcatctcccctctttgcggcctacataaatgatatatcaaaacattttgttaacataccatcaactccacacactgacacacatcaattctatgcttcataacttttgtctttctcaaattagagaaatattgtaacaagagaaaatggaagttttcattgattcgacctttgccgttcaacagcattatctttctctttgaggtgtattatatgcgattcatcaaaattgttgtatcgcttcattgattccaaaagcttaactatttttgttgatgtcgatggaccaattgatatttgctcccatgtttttagtcttttttgccatgggaccaaactataggttttacattcttgtaattcctaacttttttattttctaatgaaatattaacatttttagaaaaaacaaaaaaaaagaagagaaaatggaagtattattattactattcattttgttttaaatggatgtccaattataagcacctcaataagtaaagaaagaatccatattgaaaaccaacgtagtatagataaatgtaaaacggtctttaaacatgttgatcagtgttgacctttcgttgactttttatattcacaaccgggaaaccaacaaccaccgccgtttccaggaccccatactcctccgttgctatctcctccccatccccatcctcctccgcctcctcctccatatccaccaccccatccacggccatatccatatccatctcctactcctccaccaccgcctccaccacctcctcctccaccaccaccaccaccaggtccactaccaccacctccgccaccgccgcccccacctcctccacctccggatccagggctaggttcacctcctatacctataccaataccaataccaacaccatcaccgttgttcctatcatctcctttattcttttcatggtcattgcaatcttcttttccaccgtcgtcaccttgtcctttcccatctcctttgccatttcctcttcttcctactctaccgcttcctcctcctcctgctccaccatctcccgaacttcctcctgctccattacaaccttcacagcttccttctccaccggtacaacctccacagtctctttctcttcctctgcagatttcgcagcctccttcttctacatcaccttcttgcactcttcgtgctttgttatgtccaccactttcaaacgttttgttggaacccaaaacggaagattgatcactactattaaaatatctcctcacgggtctatatcgcagcccgtggacagagcttgaactcaacaacaacacagcaccagaacctaacaagaacaccacaaagcttgacattttcaccaatatctctatcgagaattttctcaagtaaaagtcatctccattcccatcctttttataacccaaatcaagaccacaataattatagtgagcaaccaaaatgagcatgcattacccatatgaaacctaccattttttttgtgggaactaaagaatacaaaaaagatatgacttcagaaatattgcgtcacacccaaggtccttgttctagccttctcatattctctgattgttagaaatttttgtaaacataatcttctttgcaatactaaattatgcgtacttgtatttattttaaacatacgtgcattcttgcttcacactttctgtgatgttatcaaacttatgatttttcgtatttgagatttggtggaaactttaagacaaaactgaattgtcttcacatatatcaaaatgaatcagagttggtaaaagccctcccacagagtacaataaaaacaggtaacaaaactggatatagagaagaaaacaacaacataaacagttcttccttcaagctattctccatcctcctgcattatgattcaattcaatatccaacagttagttacacaccaaattatcgtataaaacaatctcagcattctaagtagttgagaaaaggttcgtgtaacttacatatcttgttgaaggcaacaatgtcacaactctggacatattcattgatcggttcaacagtgagttgctcttcgatcatggtgtcgatagatacaaggtcatcaacaatggtgcacatgatgtgcaacttcttgataccgtaaccaacgggtacaagctttgatgctccccaaaacaatccttccatctgaatggatcttacagcttcctctagcttcttcatgtccgtctcatcatcccacggcttgatatccatcaaaactgatgactttccggctgattaagaaaagaaagaaaccagatgagaaatccaagacatcattatatcgtaaactacaggtgtaaaggcaaaaacacaaacttacattctttcttctttgtagatgccttcacagaagctgctctctcttcagcagctttcttttcctcttcggtctcctccccgaaaaggtcaacatcatcatcatcttcttcttcagcagcagtatccttagaatcagctgcagggggagtagcaacagcctcttctgtgataggtgatgacccttcaacaatgacaccacttccttcagcagagacaccactgtaaatagagagacaggttataagaaaacaacactagacaaaaactttaattggtaaaaaacagaaggcaatggagcttacgagatcctcaagagggcatcgatgtggttgaaccaacgagatacattgacaaactctgaagttgggggctttgaaagagctgtaaacacagtgatatcatcctttgaagcttggtacctataaacatacatacatagagagacagaagaaagtaatggttactactattgtttcaaaacaagatagataattgagacagcccttagaaaacagattctaacccagtgatgtaactgcgagtgagaagatgctcatcgagcttcttcaatccggagccagagttgaggttggggaaagccgccattgtttctaaagctcgaaactttttcactgatataaagcagagagatcagatcagatcagatcagatcaagtaaggaaaaacccaccaacgattcatcaaaaacgaaactttctatttcataaaaccagatcatgacaacagaagatctaaaagacgaaccattgggttaaaacgtatgaacaacaataagaatgctaatcaactagatttagattcacaaacaccgaaatttaaattctaatcacataatcccaaagttgcataatttgaggtcgaaacaaaccctaattggaggcgaaagaagaattgaatcgaagaagcaacaaacctgtagcaataaaggagccgacttgaagagggagagcaagagagagagacgtagtggaggaattagcgtcgagaaggtgatgtatttaaccctctgagatttttgtgtaatgggccgaatttgggcctaacatttacattttagcggattaattctctatccattctgatttttgccatttgttttttgtatggatgacaccgaattagaaatatgcaaaaatgtacatgttacatattaagaacctattttacctattttcaaatataataactaaaataattatcaaattttttataacacttaaaataaactaaaatatttttttccaattttgttggcttatgaattaatcaagttcgattgtttaagatgattttttttttttttttgaattctcaaaaaacagtaaccacacaatcacacatgtacgtttcttgcatattattattctagcaagcgaaacagtataaaattttagttttcacatgtacgtctgtgaatttgggtgatataaaaattgatagatagggccaatgttatcaacatgtacatcatcatctactatcgccgtacagagagaaaactaggaaaaagccaaagtataaaggcgacgacgtaaaactaactacaaaaatatgttgaaagttcaataagacaacaagggactaaaagctcgtttattatgtcaacatgtatagtatgtttgtttgtttttggtcaacatagtttctccgatggttttttcgggtaaaaaattagaacatgtagggtttcaaaatgagggaagttttcatgtaaacaattgtgggaatgtggaagtgtataatatatacgcacatgaggagaaaatgagagaagaagggcaatgatgtttcgttttacctgattcagcagtcatgagggttaatctagtctatgaaactgggtgaaaatgggatatggtcctagtaataaatgttgggtttagttagagagtgtttcgaaaaacagggtaagaattgtcgagttcgagtctttccaggatttgttgagttttccataggtaagatgagtgaccttccaccatatccgttacatctacctacaaatgtgatgatgattactctgattgtttctatcattttcacttcctacgaattgaagatgagagtaaatgagatgacttacatcttcaatccccggtatacagaccggttggattccagctaatccttgggacaacagactgcagaatttaataaggaaaaaagagtttggatttgcaggtgaaaggggggatcgaagaacacaattcaacataccttgcacgaaatgcaactccgagggtccagtcatttgtggcgtaaacattaatgaatcttccagccaccatctggtaacccataaaaaaactcgtataagatgatacagaacaccaaaagacggatctgtttcctagactgtgacaccaactcttgttaatggtagggaactctcatcaagaaggtttattacctttcttacgtctcgccaattctcattcttgattgaaattggtgctccaagaagaacaactctttccacaatttcagctaccgtgaaaaatgtgttaaagacaagaatcaattgtcaattctaaagcaaagataaatattgagtggagaaataccattcttttcagtctctgccagagtctggaggcacttaaagacaacacgtgcaccaagcgaaaaaccaaccagagtcacaggtctgaatttctcacaagttttccaatgtaagagaatcaacatgctgatgtaaaatactaattgcacaactttctatcataaagatatatgatggaatttatccaataattatacctatttccttgcaacccttttcgaagcgcttcagcaagaagcttccctgctttgtctgacctgaaataagataatacgaaaataatagcacataaacttacttgcagtactggtttcatcacatttggcatttcagtttcatcaaatattttcattttacctgtcaatagcaatactccatctactatctataaaatcagcagctacaaggattgttgccggccaaaccattgctgctaaaagcgagtttagtacggtgcgcattgcaccttgtctcatcaactccatagcaactcctgcaacaagttcatgtcaatgttactatctattcttagagcaatagcaaaaagatagatttacatggttacacgtattggataaaactatatattattacttgaagtaagccaatcctgaattgcagtgctcactgcaataatattctcggattcccattgcaccgtgtacctaagaaggtattatagcaaacatatggattttatgatatagtcacaaaaaatatacacaagaacaattcattttaatacctttctaggttgctagttaacccttcccagggttttacaaagtcttcttcctttaaaacaaagccagcaactaagatctccaccgctaatcgctattacaccaacaagaaaaataaagaaagaacaaagagatcaatgcagagcaaagagatttcaacatgaaacagcaggaatttaaaactaactccttgattatgattttctccaatagctttgaattcaaactcttcaatgtcaccagttctcctagccatcttcgtcccagtgagcccagctccagcagctattcatgaacacatgtagaaacaaaacagaagactaagaactatacaattatcatcactttgattcattttatttcttaaaggaatctaaaactgattctactttttatttacctccaaaagatgctgcaacagcaacagaaccagcaacagttccggcagcctcagcagctgcagcaaacccactggctccaattaccggaactattgtgcctagagttggagccaatgcaccgaaccctgcagctattgctggagcagccaatcctgtttcacataatatgtaatcaaaacagattaagaattagcattttccaaacacatactcttaattttctaaacgttggaagagatattaacagttagaagacatcataccaccagtgatggccatcaatgtaccccctgttaaagcagccgctccaactatgcctccacgtttccacttagcccattcactatttggtgacaaagactcttcttccttatttccacttgacttttgcaatgccatggcagagcatgcagacattgtctcaactgcttcctagaaaatacagaaattgattctcaggtcaatccaaatgcacaaaacagagaatcctaaatatcccaatgtcatcagatcctaaatcctcaacaagatagctaacatgtaactatagggttgctatgctatgtggtagcataaaatttacaaaataatttgaatgaatgaagcaaacagaccattttaatccactgaaagtcaaaccaagtagcaagtaaccgcagagcaacatggtgacgcgcatcatagcctttcctacgccgtgtacatatctcattctcctcatgtttatctgccaagcaagcagatagtagctcgtaaagaacatttatctttctctcatggctaagcaatgctacttccccaacaggtttctcatgttcaacaatcccaagattgtggcctccatctctaatttcaccctccccgtggctctccgtttccttaacctcagcaccagactgtgcctcgggaacagaatacttgtcgcggcattcgttttcgaattccacatgtttctccatcttagattccacagatagagagctgcttcgaatgttttgatccatagcatcagcagctttagctaaggcggtctctttctccaccatttcactagaatcatcatcatcatcactcacatcctctgagagtaacttgataaactacaataaaccaaaagtaacatccaataaagaagagctcctcaacattcacaacgaaatttcaaaatacggagagaaattaatcataccgcaccgatgtgatccttagcctgagtagaagcagctatctcttcaaggccatgccaagctgatgaatcaatctgaagacatctgaaagcaaattacagagacagctcaaaatgtatacattacacacacagagacgcatatgaacatgactattccagatgatttcaagatcacctgagaacaggacggaggaggccggaaacttcgtggacccagagatccgcctcatcggagataggatcactgtcgctgctgattggctctccggtacttccggtggccgggattcccaatggctttgactggctgatctgcgcttggttaagcgcgattgcaaacaaagcgcttgccgcgtatctctgcgacggcgtcaaatttgacgtagcttccaccatcaactcagatcaacaaaaacgaaatcgaagaaacaacaaaaagtttccaaatccagaaacgatcaatagagttcgtctcattttccaaaaacaagtagaataaactggagcctacacttgtcatgatataaatagatttgaaacattcaaaacaaaaagaatgaaacgttacactatcattatcatatatatagaataataagatgatatgatccctacaaatgttttgattacatccatggacaacaatttcttcccatttttatacttgttcctaagtacaaacaatgtaaaaaaaaaagatacagaagttgggtatgtctgtgcaaatcttaacacaggacaacgttacaaaacctaaatactgaagaaaacaatgggtgcagtcaaaaataccgcgaagaaacatcttctacatatgcaccactcgttttttttcatttttgctgatgattctgccatttatttatgttctgtaataatcctgcaaaaaaaaagagaagaaagagggcatagtccaccatcgatcagacgaatctaggacattggatgatctatggtaacctgtgccccaggttatgatttctctctatgtgaacccgagcccacgactaaaaatgcacggtgctgttagatcgtgaatgcatttgaagatcgtttgtggagctcatggagtcacctttgcttacatctagtgctgggctatgtccttctgcgggactgaagctatcgtttattgagtgccggattaataattcttcaggaccacggaatgtcgaagttggagaaggaagacgtttttgggactccatggcttccacttctgccaaaagatctgagactgattcgtcgcattcgtcaggtccagccacaatgggttgccaatcagtggtagtagatgcaaagttgaatttgaaagttggactaaagagatctaaaaagtctatttcttgattgtctgggaaagacgtcaaacccgagttcgaatcccacacatttgaagcactgcttggagttgcagcattccagttctgtccacatgactggactgtagccgtgacttgtttctcagctgagccgctaagactaccgttttgattgcaagcagtcgttgctgcactgtttccatctgtctgaccagcactccatctttcatgtggtggcagagagcagtttgagtttctaggtaatgtagccagcgagagtgaacagcttattgggctttgtacaagcaaagaactttcaacttttcttttgtcccagagagagataaaacccacagtatccctttcattagaaagagaaaaatccaatggcacggcgtggctacaattgtttccgcttttgttactcacatccgagctccttgtgatgacactgttactgctagaaataacactctggtcagtgcacactgagttggggctgaagtcaagtattctactctctattttaggaacagccacagacctgttttgatcgttagctatagtagctgtcacttcctgcttggggatagaatgattctgtaataaccctgttttatggaactgcccatttaatgcgtcagtcaaaagtatggagctgtgttgctgttcacccaacctccatattctcagctctggtgggaaatgcccgcttgaattccattgtcgcaggttatataacgaaaatggtccatgaatcttcccatctggatctccatataaccataccatatttgtatccaaaccatcaattggcttattggacagagtggcacttgtgtcaggttttacaactgcatggtttctgctatcagaactggaaggtctaacttgaatactgtgcccgttcaattgctgtgattccccttcttgatgctgttcagatgtatttaacctatcacagcttctgcccgcattaacctggtaagacatagtttcagtgactcctccggctgaattatctgtgactggagacctaacttgatcgatgaagtgagaatcaagaagctttaacatttccaagttgtccactcgctcctttccaaacaatctcataagcttggagtcacacattatttcagaattctgaggagagttttgtagattattccgtctcacatactctagcacgagagtttggacatcatactttgataagacagaaatatcaccgtttttcatataccccacaaagtccaaaagctcattggttgcccaagtagcagcactagtcaattgtggaagtctgtcacccaaagaacagtttgaatccaaagaaggacccaaattactcacagaaacagcatccattttccttactttagcacgacgtattttcataaccccaggagaatttccatcatccttttcatgaacccgactagtagttcttcgcttagcggcagtagaagaagaagatttccatggattttttgctttggtaagatcatctaacgataaacctagcttttctttaagagaaacccagtaaatcttaaaaagatactcccagctgccttgatcatcaaaatcaacctgaacctagaaaatgtacatgtaatacatttagctagaagaaagaatccacattaaaaaaacaaagcgacattacaagaacagacctcaagttccacaaataaccttgtagtactgcgagtaagagaaagtaacaaaatgtagacaggattctcataccttttctttgttagcttcagctgcattctcaataagcattatagtcttcatacaaattccacagaatcctttgttctcccttacaactacatactctgagcttctaacacacctcttacaaactgaatacggacaagtataacacatgtagaacgaatccttttgacaagtagtacatatgtgccaacctgaaaccaaaaaaccatcctcatcactatgaaccatctcaaagaagagaaaacagataaaaattgaacaacttaccacaattccatttagatctcgatctgaagaatgcttcagtacgcttaacacaagctgggtgataagcctttggacatcccctgacaaattaagaaagaatcatcatcagtcacaagtaaaagtttctatttttacaagtaggaatgtaatggagctgggagagtaacttgtctaagctcaaaacttcactaacctacgatcgcagagaacaagactaccaccatcgaagcaaacaaagcaaacatcttcatcttctcttctcttcctcgaaatcggaggcgaagaagctttagctaaaattctcggcggacgaccacgtctacctctcttcttcaaagaatcggaatcttcttcgtctaacttcacatccgaatctaacggaacaccaccaccatcgaagaatcccggaggagaagaagaagaatcatctaatttaacatcggaaacacaatgatcgactctcataagatcgatttccggcatcgattcgttgttggctcctcgtgaagccaaagaacactttttttttgcttctcagctcaacaaaaagacaagaacgaggaagcggaagatctgaggttttaaaaaaagaagggaaggtgaagcaatcgtggaaaccctaaccctagggtttggaggagaattgggaattggagaagggagggaggaggaggtggaggagatggtggcgtgtaaggagagaagacacagtgggcacatggaaaatggacttactcgttactcgccaaaagcaagagagagagagatgtgacaaggcagtgtttggttgtctgtctcctttttttgactttctagagagagaaagaaacaacacgctttttttttgttgtctaaacgccgcgcatatggctggttccacgtgggcaaagttgaggctggtgggagccactcgcgtcttttcccataaaataaactattattatttttaatttttattatttttttaacagagaatcttgttaccactaaaaatatatataggtgactaagctacaagatgcaaaaaaatcacgaggcattagaaaaaattgatctctgagttagaggagtattttcaaatttatattttaagtaatttaagattcataatgatttattaatttttaatatgattttaggtaaatttagagaaatttatgatttgttgtagtctggttccccaaattctacataaaagaattacatttgtgttttttaattttatctaaaatttttttctaaaattctataagaaattattcaattatatattttataaaaaaaaacttcaatttttcaaatatcttaatcctgtctttctacattgtcgtaaaaattagataaactatggttaaaattaaaacacaaaattttacaaaatctctcataatcaacttcgacatcatacaaacatcagagaatttcgctataataaattagaattcgtcaatttaggttttttactttgacaattttagagtttaggtttgatgatttataattttattgaagaacatcatgttatttttgtttacaatttgtgttgtataagtttatatatctttttcaatataaatatagtttgtccaatttcatgataatttttaaaaagggaaatttgtattaacatatttgaaattgaggaattttttcactatacacccttaaaaactaatgatatgaatattttcaataatagtggaattaaaattattattcaaattattagttcaataatatttgattttagaagattcttaaaatataattgattgacataaaaatttgttatcgtaatatatattattttaaatattattatttttgtatatttataaaaaaattccacagctcgaattaaactcttaaccccaccatttgtttatttttatttgcgtcgatttagtgggggaggcttcgtgtcttagtctaacacggactgttatattaatgtaatttattagatattattttttgttaaataataaagtggaccaaagcgaaaatgaaattgaactactttttttttttcttatgtgcaagatgtcgtggtcgtagtttcttgctttggtcttctactcgctacctaaccatatatcttatctttaattctcatttcgagatcttctttctcttaaaagaaaaaaaaaatcagctattaattagttgacaaacttttatataaaataaacgaagtggacataacgattcaagactcaatactttattaaagttgcaatgatttctagcaggataatgttttataactaagattaactgattttttagagttttgtttcatttttttttttataacaataatcttttccaatagtacaaaacgacacttgcaaaacatgagtgttaaagaaacactatgaagtgatagaagatagacctaataatattaatgcgttctggtctctagtctctagtaagcttttataggacaaatccatggtaaaaggtcaagatttatacgtacaaccgactaatcttatagttgatatgtcgatcgacgacgaaaaaagatgaacatgtcacgtttaaatattatatgtagtgagctgaaatcaaattatagtacataaaacaatgaaaaatcgattggtatataatatataattcgtgatcacatacaaacatattatcaaactgaagtaatccattgatcataggtcgatgtgacatgagctatctcactagattgtcattgttaaacgtatttatcaatatacaatatataggatcacacatgcagttttacgtgaacaaaacagctttgacttcgaatgatagagatcagaggattttatcaaaataaaatatttaacaaaacaataccggcaatttttaattttaactaatggaactagtttaataaaaccaggtgatattttgttacaaattaaaacccagaaaacaaatttaatttccttgtgaatttgttcaagaaattcaggtggttttttttgggtgaaaacaaatggtaaaattaacattaaagctccagtacgaaatacgaaaaatttatttacctctatttgttttggtttgggagtaaaatgaatatgaaacttagcctttcgttttggttgcaaccgatgataatcaagatgaaaaatatgttttttgaaagaggaaagatgaataatattcataataatattaagctaagccttttagctagaatgagaaacttaattttattagtttataaagaaaattatatttttagtttttttttatcaaactgataatttttattaaaattaaatctcaaactcagtaaaaaaagaagaaatacaacccaaataaaagagaaatacagtataacctctataaattaatattcgataaattaataacttctataaattaataaatttttctggttccgagttgggactagtgtaaaaattgatacaaatcgataaattaataagataataaaatttttgaaaattctatgtaaatatatggtcccatcaatattttaaattaataactgtataaatttatgaatatatatatttatatttatgaatatatattatgtaaagcttagtaaaatatgactttcgtattgttttattttaatttatattagttctttgtaaaattaaattctaataattttactacgtataaaaaagtttttttttgtttttaaatctaataatggttttctactcgtaataatttttagaaaaattattgattgtatagaaaaactaccttttagatcacatttttgtaaaaaattacaaaatttgtaaaatctctgcataaattaatacttctttaaattaataaattttctcggtcccgacattattaatttatagaggttttactgtacaagataacaagacaagaaaacctagaaatactccaaaaaaaatacataaatgcaagacacaactttaccaaagaaaacaaacgagatcgaaacatgacgatccaaacgacttcagaagagactgtatccattgcaacccaaaagattaccaactccgcaacaagagcagagaaagctaacaacggggaggaagatccatgcaataccttgagcattggcaattattttgttgtcgatataatttaggaattgcagtctttgtttgtggttatgcttcctcatcttagcacctattgcctgtttcttttcccaaaagttttttttgtttggagtggtttggattatcaagcgtttcggagagacgatatttagttctaaacatacaaattaacaaacaaatgaaaatcatttctccatatatattacttgtcttttgggagaaaatcagaaaagaaatcgaacattcgtgcaacaagaacgaatttaaattcaacgctcttgcttttttataataaaacataaaataatgagatcccaacagtataattacttatttattcctccgacatggattgacaagaacccactctatgactatacgaagtaatttattttatcatcaactattatacgaaattacgaagtaatatatatatatatatatatatatatatatatatatataggcacaagaatgagtatttatcattgtaaccttaaatatttagacgtttgttctccgccccatacttcaacagtccaccttttacatgactaaataagaaattgttagagaaaggggtgattttaatttgctaaaattaacaatattttttttttcctccaaaagtgtttctcgaaatttgttactcaaaacatttttttaaatctttcatttcgtgttttccttaagttttattgttattgaagttgtttatttcttattttagagacttaagtgcgattccaattagcttgcaaattattttctatttgttttttaatcttgatgttttcctatctacattttttccatgagaattatgtttgatctatgattgggaatgtgaggacaataaagagaaacagacgtcagatgaacttaaatttagatttaaggggtttgaacccaatagactcgagagattaaatgatgaattcttctaggaactcatttaaaagacaagtcaaatatttctacattgcggtctttgttacaagttataaactatttttagcaatgacacatacaataaatacaaaaactgcatcattttctaaaacagaaaacgacttcattaggttgactatgttcactcaaatttggattaaaaaatcaataataaagactaaagagtttattatattgtttgtccaattcgaatcattatttctataatgcatctctatattgaactcctaatagattggcgacactcagacagccacaagtcaatgtgttctaccatctgttgccttactttgtttacataatcgggtaagctgcaattatttgatttacctgaaaatgaaaatttgttatttcaagactctttttttttagtttttggacaaaacacacacaaatgcttataccttcaatgaccattggagattgagggcatcctcttatatcacttccatggccacagttacgacattttatgatgtaagaaggcactggcgcatgattttgttagtgtcttaaaaaagaaaatgcacaaatccgagacaaaacttaagcaaaattaatcgatgtcgaaaggcataagagatcgagtctttactttcatgagtagagttctgtttggaagcatgacgccatggatcttctgacccatttgtgaaaatgattttggttgctgcataataatcctcaaacattatcataatgtgcacagactaaaatgacatttaagaaggtttaatgtcacatttataccggcgagtctatcgcctccatagtacaagtttgttgcatcaactttagggtaaacatctttcccaaaaaggctcttgcataaatccaaatgaaacctaatcaagttagcagaaaattaaataaacatgtgactttacaaaatgtaaacaaacagtataattcaagaatgttacgttgtattgatttgatgagatcgaacactatcatatttaggtgccacctggaaatatcctagttctgtgcaagcttgaaaccaccataaccgatatgcactgtctgcggtaactactgtgtttctcagatgttttcggttatatgttctaacacgtaatccccaaattctcatgcaatactctctaacatatgttgaatatgttacctgcatcacacacacaattcaaagtctttagcaaataaaatattgtaagctccacggctcaagcgagattatagcatgaagagaggaagaaaaacgttgtgagcttaccactaaatcactaccattcttctttgcttcaacaagcgggacacatagtttatctggatttccatattgaaactacaagattttgaacattaaatgttactagtcaggaaagaatagaaagaacttggaattgaaaaaatgattatggataatctttaccgccataaccgctgcatctgccgttaagtataaaaaatcagcatcaacatcaagctgtagatttcaaaaacttattatcagtttgaaacagaacaagagaaagttaaaaagcagagaagagagagacctcagtggcattgaagagagatttcactgccttattttttactttaagccctaattccagaagtttattagtctcttgtagtgcaagtttgcattcttgaccagctgattcacctatcttctcgtagtgtatacaaaagatcaaatttgtcaccgtaacttaaaaaccctcattacttatactttttaaccttaaatcttgcaaagaagattgtttaattccattcatgccagaatgatgacaataaagaaaactatgctactaatatatatacctgctgatcaaattcagagaattcatagattgcacgaacgactgcagaactagcaaggcttccacacgtcaaatgcgggaacttaagccgaaaccacgcacttaaagctccagaataagaaatcccgaagaagaaccacggattgtcactaccaccactacttatattcaacttcttattcagagattcctacatccacaaatcataataaaagtacatgaaacatccttttaaatgtagtcaccattcctctagcatatgatatgatctcactaaataaaagtaaagcaagcaagacttgcctggtaatattgtcggaaagatgccaaatcgtaaagggcttgtttcgatgaaaggtatttcaaattttctgtagctaatgagttaaagggggagctttttccatagtacctatgttctagtgaaaccacacctgcttgaaacttctttgctaatacctatatatgtttataaaacatcaatctttttagattttttttacaataatcaaatttgtaaaatcttacatttatataatcattagctatgccactacaaggaccttcaccgcatattatcataaacataggcccatctggagatcgaaagtagtccataaattcatagtatcgctgtctgaatttgcggtgatcctgtcaataactaagtttcaaatctcatatgattcaaataatctacctcaaatagatgcatttggacaaaattacgaaatcaggacaatgaagagaagttacattaggagattcatgatctagggtttgattaaaccatagttcattggtcgtcatgtaatagcggcttctggagacattatgagaaacgctactaggatgcaataaggcatgagacaaagttgaaaatgacacaatcgcagtgaaaatgttgatcagaataaagccgaactctaacgacattttttgaatctagttttccaaacgcaccatttaccatacttagcatgaacaaaatcaaaggaggcaaaaggtttcttttcttggtcagtaaattttacattacaaaaagaaaagattcaaccggaaagagaggaagaccactttctaaaaaaggaatgaaatcaacggctacaaaaaaaacaatgcattgcatcgtaaacgttaaggttgtattataactaacaaaaaatatagtaaaatcaggtcaaatttcactacttaatcatttatgctcagtggcggacccactaaataagaaggggtgtcacttgacccaggttaaatctagaaattagatttaatgcattgaaatgcttaatgagatagtagcatagttggtaaatcttttattgatgacacccctaaatctgagatcgatcctagcatgttacacttttgagtaatttttgttgttttacatatatgtatgacacctaggggtgtcaaaatgagctgatagctcatgagctggctcaactcggctcagttatttatgagcgctagttctatttttaaggatcatttaataatttttaaggatcatttaataaatgagtttagtgatcgagctttatttagctcacgagttatatgagcgaggtttaatgaacatgagctagctcatgagcttggtttttttaaagtaatatatacaaaaagctaacaatcaaagtatatatatatatatatttttctataaataatagaaatatattttagaaaatatataagttacataacaatttctgaaaataaatattagtaatatacacaaaaagtcaacaatcaaaacataaatatttatataatctataaaaatagaaatatatttttaaaaatatataatttacataacaattttagaaaatataatttttttcatttattcgcattagctcgcgagctagctcatttagctcgtgatctagatgatctgagtccgagtttgtattttgaagctcatataataaatgagttgagctgagctggctcataaaagatccaaattcatcatgagctgagcgagctaactcatgttgacacccctaatgacatccctaaaaataattttgggtccgccactgtttatgcttaaatgacttttgttgtgcatgttcaaagtttcagtttcaataaattttgttaattataaatttataatgcttgttgtttggtatgatccatcgatgacatgctaaactttttcatatcccactcagttatcatatatcatgattaataatcgtctatttgacctattcaaagtttacaatctaaatgttgcagtttaaattttgaatttggaagcccgtaaggttaaataaaaaaaattaaaaccatactcaaaccgccaccatgaagccttattggatctaaatttgcttgataggcccaacattgtataagagatttggccacatttcaaggttttaaaattctaagaaaactaggatttgcattttgccatcaatgagaaaaattacagattaaaaagggaaaaaggctaccctagctaccaggcaggagacaatgctcatgatttgtattttcatacattttaattattttgatatcctaagttttattaattttatgagttcatgtgtccataaagagatatggacatcaagttgcttggttcccaatacattctgattaagttctgtataaaaagatgcaagtatcattccacttccacatatatattttatattattacgtatatgtacaataattaaagcagttaatgtaatttttttttttttttgcatgaaaattttttagttacatagtactatctccgtttaaaattaggaagctttgattgctgacattcaggcagtgaggcaatgattatgtttggtttatatagttcgatacctattatcgggtttaaatgaaacatcggttggaagtttaaaaggcgctaatcacaatgctttatatatgaaaacccatttggtttatttgacttaatgcaaagagggatgtacataatgtttgttaattataaatctataatgcttgatgttggaactgtttatgaaccatcgatgacatgctaaactttttcatatcccactcacttatcatatatcatgattaataatcgtctatctttctcttcacgatttcatttttttattgattattttaatcacctacaagttaatgaaatatgctaaccgtgtgcgtgtgttgtaattgattactatagtagcaagacaacaagccctggatctttaaaacttattgaacagagaaagaaatatcgagatatagttaaattattaatgacaagaaataccgaaaatacatgaaacctaaataaataaataaacactttggcctttcatttaaggcaagaaaatttcaaaaataaaactttcagtttatttgttagagttcacacacgttcaaaaatagaaattttcaaaaagttcgttttcattcctaattatggcttgtaactattaagtattaaccataccgaacttatcttaaaattcggagatagaagctctatacacatagctatgtcaagtgttttgttgcatatcccaagtcccaacactatatcaagtttccaagacgggttgctctaagttagtaaaactcacttaatcatttctaatggctaacttttcatataccaagcgagttaagcttcaatatagtttagtagttataatttacgcattctttgatttattgttgttgaaattctttgatgttttttgtttgtaaactatgtttttccctgctttgtttaaatcttgcgataaacatttgattacacttttaaagccctatgagaaatatatataaatataaattgaaaattattaaatattaatcttcaatgattaatgagtttggaggaaggtctttgtcatgaaggtttaggcgggtccaactcaaagatcttcttttgccggttacgctaaattcatttatgaaaagtgttttattttttcaaaattgaatgtaaaaagctttaactttaatggggtatattggatcagtaatttgatttttttttttctttttagatcattttctttattgaattgatttttttttaaatgtattaaattctgcctcattgaatctagggtttgttaaaattatttcaaatctaaaattatttgatcacaaaaaaggttctaaaattttacataaattgaaaattgagaattttgcgatgaagttattatacacttaacaatttcaaatgatttaagagacaatttaaattagttcaaatgagtgggtaggaatttacacccaatgatgatatttcaaacagttttaaaaattgaacaagtcaattttgtcctctcattccattttcattcattaatcagttcggaatcctaaaaacaaaaatattgaacaactgcagccgtggttcctacggtagcttgactgagggttccttccaactagtggtaacaagttacgcgcccatgaatacaagtctacagataatcaccttgggaggcctgtccacattttatagttcaataacatttcataacacacttgtcctagttcacataagggatcacacaaacctgagcggtcatccaaactataagcggaagcttgttttgtccttgattaatataatagccaaagcattaggtttagggatcatgatacttacgttctccctcagtgtcggtaatacaatagccaaagcattaggtcttgtacgcagtaccattcctaatgcaatcaaactttccaactgatagtaaaagaaaaaatacaacataattatggagttagctttgccaaataaaaagtaataaaaataatggagttagtcagttagctaacaaaagacatataggtaaaaatgctgcctagcaaaaacatagatcatgaatttgaattccaaaattaccggatcctctcaacctttggcacctcattgttgtgctgccaattgagtgaaaatacgattacacgaaattaaacaatagtgtcataattggaagttggtcgtcgaaccaatggactgatgttttgtagacaagttcaggaatatgagataaaggaacatcgatcagctttcgcaaaggagactctttgaacaacttcagccatggaaattgtactccggaaatcgctctcccaaagttatcgagaaatcgcaatagttgaacctccaactcaaacgcatattttttctataaccaaacagaacaaacaaaatatgatagtttttatttagcaaaaaaaaatgaattttgatttatggattatccatctagatgagagttacacatcgcatgcatcgactgacttaccgatcatttcgaggaggtaagccgcaagatctgaaggatcgatagacactataggcttcatctctttctttgggttttgactttttactttccttcgccttcagattttcattcctcacctccacattagcatttttctcctcaaatgaacggaaaacgtcctcaccggtaggttggtttccactggccgcctgatccgctggttttcgcttccgaatgctcttcgaggacacgactttcttccatccatggtcgtcgacgtgggagttacatttagaagtctcacatacattgtactcgatcggttccattaccttttctaaagtctctcacttttttcgttgttttttgatatttgttatcactctctctagcctctagcatacttaaaccaaagtggacgacgtgattttatcgaaggaagaagggtttttcataactttgtgacataaacgttattagggttattctttatctttttattattagatttgaatatttttgcttgtaaccacttatttcattaaaatctgcatcttttaacatttatctttttcagataattataaaaaaaaattcaagaaagttatttaaaattaaatccctttgacataattacaagaaagttaaactagaccatatgttttaaaattgaatacctttcacataattacctttaaactacataattagaaaaaaagtttttagcttatttgtcaatcaaagatcatttaaaagcggtttgccaaaaaaaaaaaaaaaaaaaaaaaaaaaaaaaaagatcatttaaaagctacataagcccacaccatctacaaatacaaactatgattaatgaaaaacttatacaataccttattcttgtaaatatattttaaatctttaccaaatcacaataattctatttgcacaccgcgaaaatatctgaaaggcttgcttccattaatcggtaataattaataatttttaaaagtcgaatcccatatttagtgtagaaatattgttattattatttttgaatactgtgagaattttagattaattcataaatatttacagctagcgtgtgtaacaaaaacaataaaattgagagtgaataaatatataaaaccgggaaagattaaaaacaataaaagccaagaggagagtgacgtgaatgaatgaatggggacatggtactgaaggccacgcgcaatggaacggtccacactctctcctcctcacctttatattcaccaaatgggatcgtctttctcattaattcgtcttctttcttcttcttcctctcttcaccacttctctcttctttctaattaagttgttctcaccagtcaccaccattgatcttcctaggttttctttttgtttccgtcacatactcgatcaattataattatatattcggctgcgaagatttacaaggtaaacttaatatatcaacaaagggatttcaagcacatattagtataatacttacttatacgtatgtgtgtgctattttttctttttgttacgtatgtgtgttctctggacttcgagtatggatcatttgtaacttttgagcatcactaatttctcttttttgatcatgtttttaaaaaaaatatatatttttgctggttaatatatgtatgtagcttttcctacatattgagatcaaacgttaaatcgattctggattcatctttgaaaaatgtttaaagatcaggaacgtcaaaatcagtgtaaatcttctgtcgttatgtcataacaaagaaattaaacatggggttttatgaatctctaggtttgcatcgtcccctatatagatatattttttggatgaacaagctttttttgtttgtatactgctagggttatcctagcctttagtatatttatgattataataaattgatttcaatttaaaaaaaaagaaaaaaaaagagttttgagaagaacgccgttcttgatgatcattgccgccatttactaacattaatgtacaacagaacagcatcattataactccccatgtccgtttgttatgatcgcatctcatcttgatttcttcaactcaaaacctaaatttcatacatgtaaatatcattttacgtatgtatgcatgtatataaattaataaaaatatgtaacttattgatcataattatgcatgttatgagagagtttaaatggtgagcaagtgggaattcaccacgaaatgagttttatatatgcttatatctcataacattttgtcaactatctctcgagtactttataaatgattttgttagatagcactctatgaatgataattatatatttttcttcttattcttcttatttgtcttcacaaaatttagcttatgtttttcattatagctctaatatgtcgccttccactatcccatgttatcatttgagatcttctgaaatcatatgttgtgatctcaaaaattatatataagtatagacgaaaataagagaatatttccgtacatgtatatttatattattgttcattttggtgtttcattttgttggtgtagaaataatggagccaatggaatcttgtagcgttcctccaggatttaggttccatccgacggacgaagagcttgtcgggtactatctaaggaagaaaatcgcatcgcaaaagattgatctcgacgtcatcagagacatcgatctctacagaatagaaccatgggatctacaaggttacttaccgaacaccgtgagatattttactttggttaaggttttattgattatcaccttaaattttaaatgttacagaacaatgtcgaatcggttatgaggaacaaaatgaatggtatttttttagtcacaaggacaagaaatatccaacggggacaagaactaatagagcgaccatggctggattttggaaagccacgggaagagacaaagctgtttacgacaaaacaaaactaattggtatgaggaaaacacttgtgttctacaaaggacgtgcacctaatggcaagaaatccgattggatcatgcatgagtaccggctcgagtcagatgagaatgcaccgccccaggtacttgtgtttctactttggtggggacaaaacatttttgttttaattagggcttcttgtctcttgggctctttcgtgaggcacatgctaacttttaggtgaaagtccattaatacttatattcaatcagaaaaaagaaagtaaaagtctctcctaaactagtatcaaatttcagtctcacgtcaatttttattataaatattttgaccattgcagaattttacagttttccactaaccaaaaacagaaaagttcaatcacatttccttttgaagtagtaaacatgtaaacttttgtctcgtttataacaattataaattatttaatcccttttgtagtaatctttcgcatatatatttgtacgctagcaatttcctctatagaaaatgatctatatatgtttgtagtatatattgtttatgattatagttgtgcttgttttttcaatatcttaaagtcaataaagttcaaaagtgaaactctattagattgcatgagtatgtacctatacatttcactagctttcttatttttggtctcacacttttcaagcatgtccttatgtgtgtttcactaaaatctaactgccttttctccatctttttgtttgcattggccttatgtattatatgattctttaccaatttttgaaacatcaattcaagccaaagattctatttacatgtcatgtcttcttatgatcatttttgtgcatatatgtgttttaggaagaaggatgggtggtttgtagagcattcaaaaaaagagctacagggcaagccaagaacacggaaacttggagctcaagttacttttacgatgaagttgcaccgaatggagttaactcggttatggaccccattgattacatatctaagcagcaacataacatttttgggaaaggtttgatgtgtaagcaagaactagaaggaatggttgatggtataaactatatacaatcgaatcaattcattcagctcccacaactccaaagcccttctctcccgctgatgaaaagaccttcaagctcgatgtccataacatcaatggataacaattacaactataaactcccattagcggatgaagaaagcttcgagtcattcataagaggagaggatagaaggaagaagaaaaagcaagtaatgatgacgggaaattggagagagttagacaagtttgttgcttcacaacttatgagccaagaagacaatggaacttcaagtttcgcaggtcatcatatagttaatgaagataaaaacaacaatgatgtggagatggattcgtcaatgtttttgagcgaaagagaagaagaaaacaggttcgtcagtgaattcttgagtacaaactcggattatgatattgggatttgcgtatttgataattgaatgaaactacatagatggcatgtgagatttgttggtacgtttacttacacttatatgaaaatattaacaatataactaataaagaaaattaaacatatggtttagccatgtctagttttatgaaaagaatgtgttagggttgtgaatgagtgaggatataaatctatattacgttacgtactatttatattcgagtttgagtgactaggtcagagttattgttacgttatgagggtatgaattgtgaggttttctaaattttttaattatagttagttttatagagatgatttaaggggccattaattaagtatagttagaaatcagaataagaaatcattgttgtggggcaaggagatgtcgagcgtgcggtgtgcacaacggggctccgttgggcatgctttgtcgtccacaataccaacgagactttgggagcaagagtcttcaatttaaaactttattttatctcatatgaatctttttttaatcttgattcacttggaaattttattatattataaatgttagatgttggttctcaaatctcatgcaatcttttcaaattgtgggaatatcaataccaaactaacaaaaataaagaaaacccatgtattgtaaacaaaaactcaaaaagtgaactatcaaaattaaagattatgttagctgcgtgcatcggttatatttcagatcattcagtaatctctccaaaacaaactcgcaaacatccgcttaaaacgaggacaccttccttagtatatatatagttccgcaaactttagttgctccaaactctctattttactctttgagctagactacattatatttacgctttaaagaatgtcttcaatgcattggtaggcactatatttcaaaggcattggtcttgagaagatgttgattgaccgaaaggaggagctaatgatgctctaaggaggagcgctgtttgatcctcaaggtaagttacaaagactgaaaccgttatctaactgtgcatatttcgactacctaagtaacggatcgtttacaactgtgtctaattgtattcgctacttttaggtactggcttacgaaacattgataatctagttgaatgtcacaaatattttgaactcaaagacatcatgataaactttatagctccaagcaaaccaaatacatagaattttttactctcttagctcaaatgaataaaactgaaaagtatctatttttgtattcattactaaaccatatagagatgttggtttacacgcgaagagttgtagtgtttgtactaacgattacatatgaaccaatatgttttgttaaaacatctgtatgggctccgtgtaatcactaacttgggccgtttcaaaagtctttaggccccatcttagtcatacataagtattaggcgttttttcttttcaattcaacgacttagataaaatacataattagcatttagttaaccaacccccaactagaaataattactcgaatttgtttcgccttcgtttcttcgattctttgaacaaataatagatatcaacccaagtaaaaatctatctatttagagtatattacatggtagtactggttatacatccgaagactctttactcttacacccaaaagagaccacaccaaaccaaaacaaagtcatcatccatttacagagacaacaaaaaaccttattcttcatattcacacacagttccatcttcttctcctcctcctcagtgatcaagcagcggaagctttcatggccttcttcttaccaactgaagatttgatagacttaggctgtctcgccttcttcactttcctcttcttttcttgtttgttcacagacacagtcttcttaggccttgtcgaagaagacctagtcctctttgtgatctctttatcttcttgcttcatattcttcttattcttcttgtcctgctgcctcgttatcatcttggtggtatctgagagcttgtaagaggctctgatcttcacgagcttacctttagcaacagagtttttaagctgtagagaaagtgttttacggaaactctctggaagtaaagacttgtgtttctcctctatcttcttagctatagcataagggcttgatccgttcttctctttcaggaccatcaaagcctcttttatcatcttcatcaaaaaccaaaacgaaaaaactaagtttaatagataggaactcaaaagaaaaagttagaacctcacctgaaagtatggaggatgagtggtggttttcggttttcgcggcttcttcgccgccggagtcttctttaagatcttgtcttctgccattagaggattagtgaaagtgttgctttgcttgtcttgtctctatctgttaaattttttcgtgctagcttatttatagcgcagggaagtgtattcgtgtgttttctgtattcgttatggtttttgtcagaggatcgattacgtgtgcattaataaatcatgagcgtacacgtgtcgtttaagtaatggctggattccatgtgtttatccgagaaacacacttggtggcggtgatcgtcctttactcttactaggcattttgtgaacgagtgtgttttctactgaaacacaaaataagttcttattcttaataacgtagacgcagttattaggccaaataattggttaaatttggtttaatgaaaaaattgatgggagaaagtttaaaccagagctttgttcgtcatcttatttgatttttaaaattgttagctcacaaaaattgcgatatgtgtcaaatttactaatacaatattttttttggtcggtatttactaatacgatatttacatgtgtttcaaattttattacatttaaaaacaaaaatagaaaaaaatccttaaccctatcaaaaaaaaaatatatacataaaacaattgtttatatattcaattttttatatttaatatattaaactaaactcattctattaataattgttgatctattcaaaacataaataaaattccccattttgttcttaaaaagaagtgttttaatatttttaaatattgtaacttaaatatgtttatctttttattttcttaattttgttttattttcttcttctcagttatatcgttctatttatttaccacatttaccgagaggctttgcttggtccaactttttctttagtttttaacaatatggttttagaaaaggtaagattgaaatttggttttagaaaatatatattaaataaaatatatatagattatcatttgaaaaatttattaaaacaaaaatttatttatttttcacatctacctatttagagaggttttatctagtaaagttattaaccgttcgcaaattttgtgttacgacatatataaacaatttatgaaaaattgcaagactaaattaattacggagttaatgtttcaaggtgttattcattataattgaaaaatgagtaagtattgaacccaaatacaactatgttattattgtatcatcgtttttttctttttggagtataacatgtagagtaagctacaatttcaataaataagttgaaaagaaaaaaatcatagatttttaaaactaagctaaaactctattttggtataggaggagttgcacccacaattcttgagcattgttcctttagcatcggagggaaaaacagaatgaatggaattttcggcatggaattgacttcagcgtccaacaatgctttacaacaagatggacctaaattgccgaattttccagtgaaaatagattgagaaacctctacaatgcatccaggaatatccatcacggatgaccaacattttgttatgtcaggtaatcctgacataccaggaatcggttcgaatagaaatgaaaaaggaaatggagccggaaactgaggcatctaagcatttacagaaacgatgatgcatagaaccgctaggagtgaaagcatattttttatagacataatgagaaattgagtaaaaagaaccttagtatagccaaatatatgctgaaggttatatttgcttttgattgatgaacaacaataagacttttgattatttatatggaatgaaatgtgaaactatgacattaattatcttactttaacatctttggatgctttaattagaaatttcaatagttgttttataagtataaatagagttgaaactccaagaaaacaagtaacattaacttggaaatattgactacaaagagcaataaaagtgtaaccggcttcacataattaatcagttaccagtatatatctcaaaatttaaaccaataaaccgatttattcgaattttctagagaaaattatttgaatccttaaatcccatacaatggagttctgcatgacttgtttaaaataaaaacctgtttagattaattgctaaatggctctaaccttaaatgttgttaagaaaagtcaaaaacctagacatcccgctcagaacctactaaactggtttaaacattgaattacgcctaacagtaaacgatttctcaaatattaagagtggagacgagagccaaagactatcaagagtttaagagcaaaatgacaacacacaagatgccagaatgttgcagtaagaccatgacaaagatactgaaatgtgattatacaagtcactgtctacgacagggagtgcttatgaagcctttaagaagaaatgagatagcttgtctgattttatcatatgtttgagttgtatcaaattcgtagacagattcagaatcaaaaccacaataacaataaccttgaattaaattcttcttattcttcttcttctatgttcttctggtcaagaagagaagggaaacgaagcaggcaccttcaatacattttctatcagatcagataaggtcaagctgttctcttaatgatgtggactccactgtctgtatcgacaatgtcgcttatatctccaaccttgagcgcgtaagttgcttcctcaaatggtttctgcatttgacctctaccaaaggaacctgaacagggatggacaaatcaacataagatttatgagcacaaattatagattcatcaagaaagaaactctatgtgggagatgatctacgaagatgttagtaaacttgatgagcaccaattataaatcatcacgaggaaaacatgggtagtgatctaagtggacattagtaagatttatgagcaccgattatggattcatcaaggaatacactttagattataaacatagttatgctctaagcaaacagtagtaagatttacgagcaccaactaaagatacatcaaggaataaactttagtttctaatcatcgatgttgatctaagtggacaatagtaagacttgtgagcaccgatatagattcatcaaggaagataaactttagactctcaacatcggtgattatctaaacagacattagtgagattaacgagagccaagaatagatttattaaggaatatgaagaagctaaacattaatgatgatagaagctagagattagtaaaatttctgagcaccaactaaagatttatcaagctagaaactatagattctaaacattagtgatgactataaacacatcgaggaagaactgtgagattctaaacatcactaatgatctaagctatgatcattatgctcaatttcactgtaaagagttagatccaatagaatccagttaacaagctttctactccttcaacaaacatcacttgagactatacagattaacttcatttcctaaaatcttaattgccactagatctaaccctaagttcaatcatcctaaacctaaactcgctgatctagagattagggataagaacaaaccaagatcaccgccgcgtttagcagagctacagtcagaaacacgagtcgccacttcttcgaaattcgccttgccggagacaatatcttcacggatcgatttaagctgctcaacggcggcttctctagtggtagtcagaataatcttcccttctggatccttccacgacgctttcctccgagaaccttgatgcttaatcaaaatgtgcgatgccttaacttggtctctcgacgccatcttgctcttctttcgatgcttgttgtgatgatggtctttcttctccttcgatgttcgatctgtggaggagaccgaatcgttctttcgcttccgatctgaatctatcttcgttgattttgggaaaagtgtttttgcggctctgcttcactatttttgctttaccctaatgattatcgacgattgaaactgtgagacgaaatcaccacagatattttggtatctacgaaatcgccccagatctttcagcagattcaaaatgctcccggatctttcggtatattcgaaaccaccacggatcgcccagtatatgatgaaaccgcctcggatctttcggtatttatgaaataaccctggaacttttgattttttaaaaatcacacccaaacttacaatatttactataaaaatcccaaatcgttattattgacaaatcaccccagaactttctttgtatttgcgaaaataccaactgatgatactaagatgtaaaggattcataaaaagcatattctatgtgagagattggcaatcaaagtatatcatatatatatatatatatatatatatatatatatatatatatatataatatcaatgaattggtaatcaataccataatgatacaatgaaagtctaactgaatcttcttacaagaaaacaaaaagcatatactatttgagagatcttaaaagaaacaagacaaaacgctgaacaatcaccactcaaggggcaagagtaagacataaacattgttgtgaccaaattcctggccaaaagaatgaaccaaaacttacatctgagactaagcaatcaaatccaagaacgcgaagatctcacaaggcttatatattagatgtctctcaagacgggccaaccttttctaatgatctcattaactctagagtcgatatgtttctggattctaggcgggcagagctcggctgcgtaaccgtttagttttgtggctagagctgatctctcaagctcttcttctaccatgtttccaattagctgaataagaaatggatgttgtttcagctcgaacttctgcaaatacagaaattcaagagaagattgattttcttaatcgtttatcctctaataaacagccgtgatatgaatggaagatgcagagagacttaaagctgaacctggtgatcaggctctgcgcgataaaacgttcctagctgttgaatttgagtggtcacgatactgcttcttgtattaagttgctccctttctttgctggtagaagccagtctcaattcttctgtagaattagtgaaaatacaggatctgttcaaaaagattcccatgttttagatttggtccaaacaaacaaactcaaagataagcatcagctatttacttgctcttttacctgtattgattacccacatcaggaccttgtccaaacacttgtctagaatcatgactagaccaaaatacatctaagagctgacgataaccaattatccttggatcatattcaacctgaagacaattacagagcaagagcaacacaaatctttaagctcctcaaacactaagtcagatgaacaaagacaatttagtttaacttcaatcagacaatcacatatacactaagatcacacataaccaaatttcaacaaaacaacctaatcagctaatgaatgatgatattcacataaagcattctccaattttattatccaaacgaaatctgttaagtagagcaaatcaaatcgaacaacataggcactgatcaaatcaaatcatatcagctaaacatcgaataaacgaagtaaacattggctcaatcctcaaaattgaaacaataaaaccaacctgtacggactcggcgtgatcacctaagttcctatactccggattcgtcttcgttccaccggcgtaaccggcggaggttcgtacgacgccattgatacaaccaaacgccgcctccgatctccagaagcttccaagagcgaaaaccgcagatttcaaaggacgatcgggagaatcaacgacagtatccgagatctgattcgaaatcctgatggatacagttttatcgagcagagagacacacaagaagaagaagaagacgagattcgtataaggaatgaagaaacggttcctcttcagtgatatagccattacacagttttcgtctagctgctgtttcgaaccagggaacgaaactccatatgaacgaacaacctgtagtcgattgagtcgagtcgctcaaaaagtcacgccatggctccacctccattaaactctgtctttgagagttgagaccctctgattcatttagagggttcgctgcatgattattgaaaaagaagtgatttagattactttatttcggctaacaattaaggcatgattccttttggtaggagcgaggtaccaatatcgcgactcgaaccgtggtgagactctctcatcatgctgagtctcaaccgcttttaccagttagcaattggtgaccatatttctacttagttgatacttaaagacgttttaaacatataaccaaatactcggtttgatacggttcgtttaaatattaaaattattcggtcgagaacaataatcaaaacttgcgatgataactttttacaatttgcaataatactttaaacttttcgagagagaagacaaagattatcataaaaatgtttacaatttgagaacaaggtccaaacggatatatatacatataaaagagaagcaaatgtttttttttaatttatttattgtttaacaaccctagtggcggctgaagcagcagcttgacctctcctcctagcagcaataagaccttctgtccgaacctacgcacctctgcgactgagagtttgtgacatatgtggtgatggaagagaaaatttgacatgagggataagcacggttctgttcttatgcttaccaacccagggaaactaatttgaagtcaaggagagaaatagataagttgagtgatctgaggcaagagccgtcttgtgttattgatgatatgttgttttctgttaatcttcatgactcaagagagtattatccaataatggtgtatgtatgatccaattatccaaaggaggcgcattgaaaacccttgtgggtttttcaaggttttccggctaacgtgcttcccaaggtgtctaaaatggtgaattttgttggattttgagcctttgatcaaacttgcaataagtgtgatgaagatgagaaccaaagcaacagaagaaaagagaagaagcgtcggagatgagactcgtgaagagaggagtcaacgacaagagagaagtcacgatactgcttcttgtattaagttgctccctttctttgctggtagaagccagtctcaactcttctgtacagttagtgaaaatacaggatctgttcaacatatattcaaatgttatagatttgggccaaacaaacaaactcaaagataaccaaacagctcttttacctgtattggttacccacatcaggaccttgtccaaacacttgtctagaatcatgactagagcagaatacatctaagagccgacgataaccaattatccttggaccatattcaacctggaagacaattatagagcaagagcaacacaaatctagctattggatcagatactaaaaccaattcctcaaagtctcaaacgctaaaaattgatggacaaagacaatttaggtaaatctcaatcacataaacacaaatattacacattaccaaaactcagctaatcaactatagaatcagacttgtattacgcacataaatgtctttgagtcctctgtgtcattttgaaggtttgctgcaagattcgtttttaagattccttgtaatttttttttaggtacttcagattgcttcaattcgactaacaccaaagacttgattctttgtgatagcaatgcggcgggctgctgtttcgatgaaaatctgcaattcaactaccactttaacgatcacgagaattggttacgttgttcttacataattttcatatgtacaaaatgaaaactttgcgtattgagagtatgcaatgtgaataacataagcttttcgagaagagagaaaggtttatcataaaaatcttttaggatttcagaatgaggttcaaaaggaaacacagacaacaaaacttgaaacatagaaaacaagagaaacaaagtttatctcttttaactctagtctgccttggcagctgaagcagcagcttgacctctgagacgaccagtcctccttgcagcaataagaccaaccttctgtccaggaggtgcatcacgcctaacagtactggcgtgaccaatgtgctgatggttacctcctccatgaggatgctccactggattcatagccacaccacgaaccttaggccatgagttcctcttcacacggtacttgtggtacgcgtttcctgccttgagcatcggcttctcagttcttccacctccagcaacttgtccaatcatagccctgcatccacttgggacaatcttcttcgaacccgatggcaacttaatcctgcgcaaacatatactcaaatcatcattcacaagactacaacaactataccacaagcatttctaattaacgaaatgattccattaacatcatcataaactacactaaataaccaatgatacataagcattttctaattaatctgattaagatcatcataatctacaacaaacaatcaacagatctgaaaatgtttataagcctcagaagatttttggataagagaaacaaacctagtagtgtcgctgtcagggttgtgagcgataacaatggcgtaatcaccagaagctctagcgaggacaccacgatcaccgacgtgatgctcgacgttgcagacaacagctccttcaggaatagatctaagagggagaacatttccaacgacgagagtagctttcttaccgcagtacaagaactgaccggtgtacataccttcggcggcgacgaagagctccttttgtttcttgaaacggaaaggatgacggaaagtgacacgagcaagaggagcaccacgaccaggatcgtggatgatctccgtcacgacgcccttgaggtaaccatttctctcgccgaaatcgaggctacggaacttagccggacctttgcggtggtgagtgtgggatttgaagacggaacccgcacccttacgttgagctctgatgacacgacccatggatgctctcgacggcgaagttcagatattagggttttgagatccaacttgagagtgaggaaaatgaaccctttttattctgcaacctcatgtttgttctaaccctaatgggcctaagtggatctttatttgatatgggtcagaagaatctaaatggtgtagtaattgttcaaacccatacaaaagaccgagttaagaatcacaaaggcaggcctaccaaactagactaatccggatgctaaccaaatcatattagaatttttcttagaaaaaccaagttaaaaagcccaacccagatttatccggatgctaaccgaatcaatatcagaataaatcatatgaatataattacacgataccagaataactaaataattgttaagagaaaaataataaaatgaatgaaatatatgaataatagatatatatgattgaaaatttagttttagtagattcatcaagtttttttttttatcatatttttaacacgttatattaccgaatatttttgctgaaaatctgtcgaaaagttgcttagtattctaacggatttttgacaagtcacaacgaaatattttggttggaaagccgtcaaaaatatttcatcagatttagtttagtcagaatatcgttggaaattattgacgaatttttgatcattggaatccgtcgaaaatttcgatgatttttcaacgaaaaatttatcgtcaaaaaataattaaaaaaaaaaaaaaagtcaaatatatccgaccttttatttatcatcagaaatttcgtcgaaaaaagttttatttacttatagttatatatacagtataatcacttttcaagaacgtaaattcttaataaatactttgaatcgtaaaaagtagcaaaatcatgtttttcaaacgttaaaacgtgaacaagtggtatattattcataatacttaaaaaaaatgcgtctcatgatagtctgagtcatatgataaatatatagattgatatataaaatgatgataatgcaattctaattttggtgatggtatatcactagcatctaataatcaataatgtcaacacaagaacatatttaatgcaaaaaccctctccaaaataacaataaacaattctttggagaacacataatatgggcaagctagcttctgagcagacaaatacgggcaagcccaaattggatgttactaatactaacccacggtttgtactttgtccaatccagattccgatttcaggttaacccggcgaaaaccgaatcaaattagaaaactcataatattttcttaaaagttaaaactgatttgaactttagaataagttaatatcaagctgattatagatttttgagatacatatgataaaggtatatgttctataatatgatgatgatgtatgaaactggaaataattattaagcaactcgagttcgtcgtcgatgatatatccactagcatctatgatgtcaacaataacatatttaatgcaaaaaccctcagaagaaacaataaaaaattgttagaagaacacacaatatgggcaagctagcttctgagcagacaatgcattttttaaattgttattacatataaattgtctcgtgaatacggtatggcaatttaaatccagatatatgatagtaatgtgccttgaataaagtctatgaacatttcataaaatacaaaagttagagatgaaaaaaagtgcgagactagctcatcaaaaagaggagagactcatcaagtagactggtattaaggaatgaagaacattaatgttaagtgacatattttgcaaatgataccaatctactttgttaggacatgatggtttagcggtctatgtaccatcttgtcaaatacacatgtatttcttcttttacgagaaacataatgggacatcaaattagttcatctatattacggaagatctcttcaattttttttgtagcttaggtaacaactataaattcgcacagatacaagtatatgtagggactctggttggtaggaccataatgatccatcacaaaaatctgactcaatataattgatatatacacataaaatcttttgaaatactacttgctacgtctacatgtaaaaggaaatgagtcaaattacggtgattgacacaccgacaaataaatattgaatacacgtatagcaaaacttttgtgttgaaagaaaacaaaacaaattgttttatgactcgagtgttttatgattaatctcgtaacctgtatcttagtaaaagagaaagtattacttttataaagatgctaagtaatatttctatcattacttttgtcaaatgatggacaccgtgatactttgtcatacgaaactatgtctttgtaattctaaatttttcgaagaaatagaaagctgtttacacatgattagttagtcttagtcacaaattaggttaagaacgtgagttatgaattgttggaccattcatgtactaattttttttataaaacaacattatatattacgcggattttaactcgaacgatgataacacataaacatcgttagcacaaaccaccaaaactattgaggattcttgattgatcttaaccaataaagttttagaagttaactagctaatcctctcaagatcatcgatcaacattttacgttgacttgagggaaaaagtctcccaccccaccccaactacaacaaaatatttaaaagagaaaatgactaataaatttagcaaagaaaaaaaccacaaacgggttaatgcctacgaagctttttagccatgttcttgcatcttaatcagacaaccctaaaaaatgagtttgtttcttgtttttggatttactgatctcggcttcaaattttctttccaataaagaaatcttttcttcaagaataataatctgtctccgatatcgggctttatctaaacatggagataagagacctgaagaagacttcatcacaaggaatggttagacccatatcatggtcaaacccaaattcttcctcagctagtcggagcaatgtttggaactcggagtgatggagccatgagataggaacgatgtaccgacttcggttcggtcccacgtaaaccggaaaatgaccttttggcacgtcttgaggaagatcatcttcttggttatagtaacaaccatttacgttcttcatctttcttagactcgagcatctctttactatttgcttgatagatgctgcttgagacgacgtcgctttgctcgatctctttattgccattgttctttttttttcttttgtggaattagtttttgcttgaagaatgttatatggaggtaagaggtacaatggagaagtatttatatggacagtttggaaggctaataaattaatagagaaataatcattaatgcagtatatcactatacttttaaaattgggggctatagtttttttttcttcatcaaattgggtagtatagttcgttgattataattaaataggtttggctacttatgacgttgaccaaatagtggcaatattttatgaatgttataacatttaaatttgcatgtataatatatatatatatatatatgtcactattttatgaatgttataacatttaaatttgcatgtatatatataaggacaaaacatcaaattatgctgacaaacaaagatcaaacggtaaaattaaaattacataataccattccgtttagggcaagtgatttaattaactattaatttaatgaatgataaattaacaacactaactcttacaatttggttactttgtaatttcttatcataattaggttgattaattatgacgttgacaaaattattcattagataatatgtatatagtcttgtacaccaaatcaacgactaaccattagaaacacatggagtgattttgcattgggataaacaatgaaaacacacgtagacacgtatgtttatataggggaaaaaattgtatactagtttgtggcaaagcatgtacacggattcgagttctagtttctctacgccttccaattaaagatggaggatacaatgtttcgaatagactaaagtccaatgaaactgaactttctaactaatcatatatctagaaaatttatcaatgatttgtatataccaacatcatatatatgtagaaaaactaaaaccaatcaaatttcatgttttgattcattaggacacctagattctttgttcttgtgaaagcaaaatcatgtggcatgtaggaggcaagggcaaataaacaatgaggacagagccaacaaggacaagagagagatgcaattaaaactgtgaaagaatgtatacaaaacaaattttggtagggattataacgttgccctacaatgtctcccttttgcctttacatacttagacaattttacaaaataaatgtccattttttcttctcttacctttaatatcatataaattagaccatggcccgttagatacatatatgtatgtacatagattacggacgaagtaaaagagatttgtaagttgtaacaaaagtacgtacttgaggagatacatacataaggaggactcgacaaaaaacagatatcgcaaaaccattgtgtttattttgcatatacggacacgtgtattttgttaccatatttggacattattgaaacatacataaatgcccacttccctcaacaaagaaaaacatagaggtacattttgtttttttccccaacaatgtcatctagatctaagacaaaacatttctataaagttaccctttcagtgatgaccgaaaatgtctattcaataaaaaagagttttgttctagacacatatgaagaaactactgaataattacaactattttcacttaaaagctcatattagatggtttggttgttaagttgttaccatttgtttttacaacaccaaaatagttacatttaataagccgcatgaatctagacatgtattctgaaatactcttaagacgatgatcacttaattatcaattttcatttagttttaatacacacaaatgataaaggatgtatgttcccatgtgaaaattagaacattaatgctttaggcgagaacctaatcttttgttttgttatgaagccatcctcgaggtcgatgccttgtgttcatctacttcttcaccgtccttgatgatattgttttgttcaaaaaatttgtgtgttaaactaaaaaaacaaaagcagaatcgtaatgatcatcatgatccctgtggatataatggagatgaacttatctcggcgcttgtttcatcttttcacgatgttattggcttagttactagctacaactttgacttttaagtacaaaacaatgtagaaagtgtattatttttagaatttaaccaaaaacaaataagaaatttgacccaaaaaaatgaaaatgtgagtaaagaaaagtcaaaaagatgagtggtgtgggatcaaagagtggggacagtgagatgatggtgacagatggctgaatttaattggcacacctgttgtggttataactcgtagacactatcaattcattccttagttgacatcaaccgaaagccccaacaccttcttctattaaagtttaagataaatcttgattttaaaaacaaattttctttgtttatacaatttataattctcacaaaaacaaaattgataaagatgaaacaagaagaagacaaggaattagaaaaaataagaggcaagagggtaaagtgtgaagggtccattgtcttgaaatcacaagactcacccatgtggctactatccaaaagcctaaaacaccacaactaagccaaagagtgtcataatacataagcagacatatattcctcaccatcatctttgagccaccagtttcatttcttggataaccctaaagtggggaagttcatttcccatgctctatggccactatgagaaacaatgatttcgacatctttgtccctctctttcggtttctaagctcacatgtgattattttcaatttcactaaacaagagcctgataaacgtctttgtcacaggtccctaccctttacaagtgaatgtgtgtctcttctagaaaacttaacaagagtcttgcaaaatgcctaaatcccacgcaatctttatatgaaaatgacaagtagtagacgataacaagatgacttacatatatagaagagaaaaaggcaaataccagtttcgcaccgcctccatcggctatacaaagaaagcatgaaagatacagagcttcacctttaggatactatgtcatacaacatcatgtatgcaaacaaaccatttagaagaaacattaagttaaagttgtgttttcataacaaacctgtgatgctcaagtctgagagaaactggaaacaaagaagcaaacaaactgagcaaatgcattttgtgctttgtaggtacacacaccgatattgactacaaattggttcttttttacatgttctatcagttagaaaaggtgttcagataataagatatctaaggttttttaacccccatcgagatctgttaacagttatcacaaaaactttctgagcaacctcatctctgttgtggtatgatcattaacattcatagccagaggaagactcaagtccttcaggttgcccatctaccattatcaactgtctttttagcttggcaatatcagcttgtacctataattacattgtaaacacagtcagttaataagaatttctaacacaatcctataaaatcaagacaaagccaaacaagaatacgcccaatgtcttaactactactatttaagtttgagcagaggaaattgtagctgtatcgtctaagaaatccacgttaaaactattgtgagtttttcaaaaatgtgagaccaattaaatttataaagtggtaacaatgaaaaggtaagttgggctgcagaaaccttctgacgagctgcagtaagtttaaaaagctcttctacttctgaaaacttcaaaaaccatggactgagtggatgttccttagtgtctcctttttccatcagataataagtgtcagcaactcctaaaacattgcaatgcgagaattattatgcctccggcaataattattaattcattagaagtcagaacaagaatgcacctggaggaggcaggttcaaaccatctgggatgttagagatctgtatagccgggtgattatgaacacgggcgacaaaactctcaaaagggtctggaaagacaacttcattgtaagactcagcgacaacgggtatcttaatagacttaggaataggaccatatgcattctccgggttcagctttaagacgtgagacctggaaagaagttcaatactaaaacgtaagagatataaaccaacttactccactgaaattcacaatcacaagggaaactcacaactccaacttcttttcacagacatcggtatggaagaaaacggttatgtcgattttgaattctccccaaccacactcagacaatgcaaagggaggagcatcaaccactctagttggattattaaaacttggatgcaaatggaagataacccgcttgataaccacaccaagatcctcattcgtagctccacgtacataaacagtccacttatgtgttcgatatctagttgatgaaaacattagaaccaaaaaagttcaaagattgcagcattaccgtaactcatggaaattgcaacatgaataaaagagatagaaacactaactctgtggctttctttccaagataaaaagcaatcgatccacacacaatcggaacataaacttcaacatctttgattcttcttctcccattctatcaaatcacagaaaaaaaaaatcagaaacaggaacatttcaaaatttccgaagacattctaaacaaaatgacaatgtccgattttcataatttcatacagaaccaaagaactaccttcgtgttccagaatcacaacaacgaaaacgaaaacgaaaacctaaaaatcaatcatcggagaaacaatcaaaggtggcattttttttagggtttatcgacaatagaaaacaatacctcatcttcgcgatcatcaattccgaaaatgcgtagcttccgcatagacgcatcagcttcagacaaaatctcgatatccgactccatggaaacgaagaaattgctcaaaatcgcactagtcaacttttttctttctccgattaatttctcgcaaaggagggaaaaatagatttggggttttagagagaaacttcttcaacacaaagtctacgaaaacagagcgatcgtatttacacgtggataaaagacgttggctaattctatttgccacgtcatacacgaatttgctacgatggcaaattcttgccgtctgatatacagacgtaagaactactcgccgtttcggagtacgaacattcttccttatgcataaaccataataatctacagataaaaaattacaatgtcacatttgaagcaaagaacaatgaaggaagaagattgcattcatctacttctgcgaaagcattgtctcaagaaaaaaataagagatgagccaacaacaatgcaaagataaagcaaatttcatatgtttgatgcactcaaagccataactttgcattgttcattcaaagctagaagctgagcctctttcttgtcgagaagtgctgtcaatttcacattctcctccatcagtttctgtacttcaacctccttttgtgccttctccccttctaattgtgtcgtcttagtgaccaacctgcttcaccattaacatattgtggtgtggtgaagaaaatattaaatctttgtggttaaggagtgatggaacagttgcataaagaagatatgagactgaccgttcaaagagctcctcaatggttttgaattgtctctcggacgaaagaagtgtttctcgaacattggtaaaagtactgacgtagcttttaagcgactcgaactctctcttcacacgacacaactcctcttcgttttccacagctttttccctctgcctcatcgtctcttcaactaattcctcaatcctttcccgcatttcgtttagaacactattagtcccataagcaaatcgttccatctcttctaacttcacggacaaattttcgatttggatagtcttcctactgatttcttcctctcccaaaagtgccctctccttttgaacagcagactcagattctgctactgtaaccctcctcacaagagagtccagcacatcagtaaccatctctatggactggagcatctcattagtataggctccatcctctacacccaaggaaccactgtaccttctagtttcaggattagtgttcctagccccgtcagaagaagatgaaccaccatctttctcaacaaggttcaatcctttcagttcttcaatctgttccacaccgcatgacacatttgctagatcatcaggaatggccaagactctagcttttgatctcaaataacgcaacatagttgcagtcgatctgaccctacccgaaagaactcctaactcctttctggcatcttcttctgagccaaactcaaggtaagccttgacatccacaagttcagcttctaaactatctacctgaaaccggcgagattccaactcactcctccatatctcagtggcctccctggttaaagacccttgtgcagatacatcagtctcctctttaccagccattcccagcctcttcagcctacaacaagttagaaacaaaaaagtttaaaaccaaaaccaaagttaaaggcagatctagcttcaaacatggcttagctcataaaagatgattttaaaactctctcaaaattcagaattaagaccaacccattagccttttagcttcgtttaagtttgaaacaaaaattcaacaaaacagagatcaaaacaaaggtgaccagtgatttagattggctggtcaaaacacaaagccactaaaaaaaagagaagcgttattaactgttgaattatcatcttcaatcatctgaggctattgaaataaacgagagaatcgatcatttctggcgagaaaccatatgaaaatcgaaatcgatcggggatgagataattattattatacaaaagaaaaagaaaaggaaaagaggatcctcacaagtcgagatcataagcttcgagattcgctccggctgattccagatttgtaggagcaaattagaggcaaaagttttatcgtccgtccgtccgtccgtcgctgtggtttccgaggagagtgggtgagagagatggaaggtagagacgaagacaaattacagagaaatgggaacggaccacctgctttgcttttgttgctcctttactttttttttttcttttgattttttgcttttttcctcttctcttttttagtataatatattcttatgcaaaatatcataggagtatattttattttggaaaaacactgtactaaatggcataaaaaatgttaattagaaattagtaatgttagattacaaatttctttttcagacttttgttcatacctttttatttatttttattattaatgacaacctagctaattgtcatttactttttcaaagattatgacaaaaaccatttaacaatcttaactaatggagttataaacacaccttaaaatgttctgtagaaaatgttataacgagactgtaaactgtttgttaaataattcaccactggggatttatattttatagattaataaaaaaaaactctcaaaagccaaaagaaaaaagaaagtaacagtgagtaacactcagtgaccaccagacaatgacgttgaagcgaccggacctcctaatcccatcttctttcccaaaagtccaagctgctccaccaactcacctccgttaagaatctcagtggctccataaataacgtttttaacggttaactgtctctgagtcaactcctgcaaacttccatactcaacatagttacctccaccgatcatgaacactatagcttctctgaacggtccttttacatggctaccaccggagctagacgactttggagctcttgggtccaggaagcggtaagaatcgatctccgggtttggttttccttctgttaaagcttcgactgttcgagtcactgccaattgttgatcactagataacagattcttgactcctgcagtcactgcgcttatagactgtccgtaaagcttctcggcccagtctacaatgttgcttctgctagctgaattcgctgatgtagctgcaaaagatgcgtttaacgatttgattttctttacatactgaaacgcacttgtatcagcctcagcttcattcaatgctgcctccactgcttcaacttccgattggtttatggtttctgtggagatcaggtacatgattgcaaaccggagcttgtccatctttgtccctttgcctttcagagcagccataagttcagttctgtcgattccgcccctcatcatcatgtcgctttctttcttagtgaaagcgtcaatagatctctccttgatctgtcctaagagcgctgttgcgatattggtgtgtttgtcaatcactttctttcgctcagttaactccgggagcgatttcacagtgttcatgagatgctcggtgtggatgtttccaatcagatctgtcccatcaaactcagcgccgctcccacctccggttttcttgttaacctcttcaacgtctctcttgtacttgttcaactgtgtttcgatctccacagcgacatctggaaactccagagtactgtttgctgaccagaatgggtccgaactgtccagctcaaacgatttcggtggtcctttctctccctgcactttcaattggttgagctttaacccgagaacatcgtgaacgagaggccggtatctgaaatcatgctgaatcccaaccgagagctcaaagttcctatcaaatatgcacaagaggggacgctgaaacgagctcatgaaaccgccaccttcagtaaacagattgttcttggacaaaagatgatccctcagtttctgatccaacaaagacgccaccatctctgcaggtccaccactagggcatcggataacaggaaccacaccaagcgttaccaacacacaaaacaaaccactagcgaccctttcgataatctcattaatctctttctcccctgctgatgggtcattcatttgaacataggtagattgctgagccagcgagaacaagttatcttccaaagtcacaaactccagatactgatcatgcactttcgagactttctcaacagaaccagatttaagagtcccagaagctagctcttcaagaaacttacgagggatcgaagacgagaaattcagatgaaaggtatcgtagagagatctagaagcatcggctatgatcctctggaggttggattcagttggttgaacaaagtagacagcgggaacatcatgaacaggttgtcgatctttgtctatgagaaagaagagtgtaactccatgcttacgcagatccttgacatgggtcaatggagatagaatgttctgacaaaacctatcgtaaatcaagatcttgtaaacttcttcgttcgcagttccacttggattcaaaggttggttcagattcaacatccggattacacattctgaaaccgagagagagagagatcaaagatccaatatcaatattaactcataagaaaccagaattctctaaatttccagattcctaaaaacaaattaatagatcgaacacaatctatgaagcaatagaagaatcatcgcagaaacttgagattataaagagataattaccagtctgtttctgacggagattgagagccatggaagcttgagattcggttggattagagagaaaccttgtcaattcaaagctattcctttctgtatctccctttgcaaaacgcagatccaacgatgaaaagcagtagaaacaaagagatctaaatccaaaatcgatctagagaaatttcaaacccaaaaatcactgatgaagatgtatgtcagtaagtaacgattgccacctgcgaagagaaggacgaaagagattttctctgaagaaattaatgggcctaatgggcctagtcacttcacaacaaatgtggcccagctttagctttcttcaactttctctttctttctcctctctgaacgaaaaagagtgagtcgtcgtcgccggagactggagtttttccgggaagaagaaatgggagacggaagagaaggagactgggaatgtttaggatgcagaaacaggaattatgcgtttagatcattctgtaacagatgcaagcagcctcgtcttatcatggataataatacttctccaaactctaagtggcttcctcgtatcggcgattggatctgcactggttcgttctttcttctcctatctcaattcaattcttttatagcttcccagattgtgctaatgaactagaagcaaaactaggattgatcagaatcgtaagttctgagttcaaatccttaaaactttcaaatgcccttttccatttgcggattcattagattgaattgtgaatgaaaactaggattgatctaattcgtaagttctgagttcaaatccttcaactttcaaatgcccttttacatttgatgtttcattagattggaattgtgaattaggggatttacttataactaggttgagctgttttgtgtattctgtgttatgtggtatatggaatttgctggtgggtgtgttgtggtgtgcgtgcgtgtgtatcttcttcgttctacgttttgcgtttgggtgtgtggtgtggtgtggtgtggcaataggttgtactaacaacaattatgcatcacgagaaaagtgcaagaaatgtgggcaatctaaggaagtagcagcattgtcagcacttgctatccctggagcttctcttcaaactcatctccattacttcacccgtggacctgagtcacatgatcaacctggttctttactcgcattctctaacgctacaaatcaagcttcggttcataaagaatggaggagtggtgactggatttgcagatgtggttttcacaattattcctctcgtatacaggtgaggaaatgggttcacaatgcaaaaccgacttgcagattccggcttgttgttttactcatttctgttttgtatgtctctgcagtgcaaaaagtgcaatgaaatagctccactaggtaaggtttttgtctaagaccgatgcgcgtgcaatcttatataacccgaaggtgtctgataatcctttcacgagttttaatatgggaaagtttattttgggttgcagcccttggtacaaagagattagcatcagaagctttggctcatgaatgggatagcaaaagactgaatcaaggatatgtaaggattagttagagcgcataaattgattagtacattcatcaattttacttgctgcttaaccaacctctgtttcttctggctcgttgtgcagacaagcatgcaaacacagtcagcgatatatgcatcttttcctggtatgagcctaggaagggtctcaaattggcaacttcctctcccgtttctacaacaacactcaacacctgctttacttggaatggggtactgtattgatctctggtctccattgttttcttgttttctaaacgctagaacaatggcgtgatcttttgcaaccttcccaattctttgtgttgtctgatttcttagagtgaaacaatggcgtgatggcgactggatgtgtacaaattgcaagaatcacaattatgcatcacgagcagagtgcaataggtgagttttaatctagttttttcagttaataattctgattctttgcattgagttaaggtaaacaaaaagccgaagaaaaaaatattttcttttccatgtcaggtgcaagactacacgagatatccttgatcaggacataactccaacagaacaatcttgaaaattcatgaagagtgttgttctcttgtgtatcttaatctagtgagacatggctacacattactcgaaactaacttgaatatataagcctcaaaatgttttggaacagagaatgcagacacagctacaaagcatttcttaaccctttaagatgttcttaggatcaagaggcggtgtatcgagttgataaagattaaacgccggtccaacaaaccggaaaaaaatccaacctccaatgacaatgtatatcgacgcgtaagccaatttgtttagccaaaacaacaaacctttctctccaacataaagctccaatgccttctcattcaatgtcatctcttcccatggcttttgaacagtctcttttttcttcccgctttgtcctcctccttctcctgaaccctcttccctcattttccttctggatcctcttttgaatcttatctccactccatccaacggctgagtaatcttctcttcatcaccgccactgtttacgcagtttatcgatagagttcttctgttgctacgatgcaactggaacttggtttttgtataagattgttgcttcagattgataatcgttgaattgggagctaaaaagtggagacttttcatttttgttgttgtttttaagattttgaagctatgatgaatgaaggaagaaacgattttgcaaaaagataagcttcttcatcttccaccgttaaaatcctctgacccaattatgtctcgacaggtggcgtttcgaaattaatgggcttttaagaattttaaacggcccaagagctttaattggctgcttaaataccgatattacccttgtttggttaatactagaatttacaagtgtaccgtcacagaatccacactgacaaaagagtactagatttcaaatcgtggactaggaaatttgaattttctgtaacaagagtactagatttggattgtatcgagcgtatctcatggaaaacgatccatttctccggcagtaccagccgtcggagcttaagatcgcttcggagtttctgacgaattggcttccttttttatctaaagatctatgcaaggattgtaatcaccttctctccaatcgaatccgttctcttgacccaggtaacgattctcaactttttcttagaggcgagagactttctggtttctatggatattgaaattctgtatagaaagcggagattttcttcattattgtacttgattctgcttttttgattgatgttctgctaaatgataaggttacaaaattagggtttggtaattggaacaaataggaggcgagagagtagcaagtacgtttctaaatttgtgaattaagttatgatgtggagttgcttatgagaaatcatgtttccatatgtgtagcacattgtagtaacaacactgacaaagttgatggagagtgtaaaactggttcttgttcagtggtggaaaatatgggatcagaaagagctagtaacaatgtggatgataattatgatgagaagtcggaaaatggcgaagactgtgataatcattcgttaggtagttggaagggaagtgaaattgtatttggttcctttcctgaagattttagtagtgtattgcaatctagaccagctgttgttgaaacagcaagccctcgtatgcgttgggctgatatggcacaagaggatgagttcgatgaggaggaggaggaggaggaagaggagagggattcgagtaggaaaggttttgatgcgagttcgatgaagactccagagaagcctaagttgtctagagatcagagagagaatctcaggctgattaatgtgaagagaaagaaagactttatttgcttggagagagttaagggaaagattgttaacgtgcttgatggacttgagttgcacactggtgtttttagcgcagtggagcagaaacggattgttgatcaagtgtatcaacttcaagagaagggacgaagaggagaacttaaaagtaacttcttgttttgatctgaaaatgctcttatcttaacttgtgacctatttttaatctgaatcttgtcttgttctctctctgtagagcgtacatttactgctccacataagtggatgagaggaaaaggacgtgagactatacaatttggctgttgctacaactacgctccagtaagtaacgttctctgtcatactttcattaatctgtttcattcttaaaaaaggagttaagagttttgccttcttgtattttgggttgataggacagagctggaaacccaccgggtatccttcaacgtgaagaagtggatccactacctcatcttttcaaagtaatcattagaaagttgattaaatggcatgtactgcctccaacttgtgtgcccgatagctgcattgtgaacatctatgatgaaggtgactgcatacctcctcacatcgacaaccacgactttctccgtcccttctgtaccatctctttcctcagtgaatgcgatatcctctttggctcaaacctgaaagttgagggtcctggtgacttctcgggttcatactcaataccgcttcctgtggggtaagcaagttcgtaagaattcccagtttcaaaactttcggccattccttgtcgaatagtatgaaatcaaagactgttttttttggatattttcatatttatcagatcagttctggtgttaaatggaaatggagctgatgtagctaagcactgtgtacctgcagttcctacaaaaaggttataaatattgttgcatcaattttcttctataaacaaacattttttctcttatgagtatgtttcttcccggttctattcaacaggatatcaattacatttaggaaaatggatgagtcgaaacgcccggtttggttcaccccagagcctgatttgcaagggattgagccattgccattggacctgaaccggtctggttctacttcaaggttctcaagattaaacaaccataacggtactaaccaaagaggacatggacgtagaggaggaggcaatggttatgactcaagaggttactataatcctgagagaagcagtgaacacaatgactctggagactggccatcaagccagagaagaggaatgccacgtcctagtagaagaaactacggttaaattcttcaacttctgaaactgaaatttataagttctttatttaattaaccaattttccatataaataattaatttgtgcaacatatatacataagtcttgaattttttttcaaacaattatttatgtccggggtatttttatatccgtttttgaatttttgaccgtatttgtaattatgtatatcttacacagttcgatttgtcatttgtgtgtttagtgtgaattgttctgtggtttgtttcgctttacttttttgtcaaattttccaactgatgtgactaaagaatttcgatctacgagagcatatatatatagtaatcgataattgatttgaccaagtaaccaattcttcatttatatgtttttgtgactatagtgtaagtgtacaattatctttttcaatttttttgactgatcacaacttatcgtataatcaaacctttcgaacatgagtgacttatatgaatgaggcctttgctaatctgattttgaaggtgtaacttataaaaacagctcaagaattcttatttaaataatttacaattttaccggatgtaagacaaattaagggaaaaaaataagaaccaaagaaaacgaaataatgaaagaacacgtgggtttagggatctaataagaatctctttcttaaaatcaatagaaagagagaagaaaaagggtttgggctctattgagtatgacacttttatatcaatgaaaagcgacgatgtgttgtatatgagatatggaatgatcttctcatctcaaatccctattcgttttttaacatcatcattctcttttccaccattctttctactttctaacaatgtatcctaccttttttcttcttcttggtacatactctattacttttactttctttttttttgtatttcaaaaaccatgcatcttctaaacaatgttatcggttgagttaagtttccgaaattacattaccgccactattatatttttctaactttggtatacaatatagatgattaatcattttatgcaaggtttagtgatcaatcattttgttaaaaacattatctaaaaattagaattgtcaaatcatgttttgttatgcaatgtgatcatgaatttcgtggattttcaagttttaattttcttgcttggatatatagtatagatatagagaactctcaaaataattatgactcttaaactcatcttatgacactgcgattaagatttaagacacagtcagcatgcttttgaacttattagggaacccctactacatagtacatgattttccttgtctgattttgaaacttgtctcaagttttatagatacaaaaacaaagaatgaaaaagttcaagaagccaagattaattattatatgttgggttgataggggagtgagagaagagagcgatgaaaaaatgattacccgtaagaaaaggaaagcaaaaaaaagcagctttgatgtgttgttgttgatttggataaaagagatgtgtgtgtgtgtgtatgtgcatacaaaacaccttttcatattagcccatcaacatgtattgatctgtcttctgttgaattgatcttgaccatttatcattccaaataacgacccctgattttttgttaaagttgtgttatatatttattttttatagaagaactttgtaacattttctgaacgttttggtccttcggaaaaacactcacctaaaaccctatttcttacaaatatgttttcgaatagtattgatcttttaaaaataacgaattgacacagtctttaaacaaacattctttccccacggccaagggacaaactagtttttaataaaagaaaacatgtacatttttctcttaattgatttagtagaatcctccaaatcaaattaagtattaatgcttataaaaagagattaatcattaatgaagtgaaaacaaatctctctcctcgttttttcatctttatctcagtcgaagcaatgataactcttctctaactttctaggaaactaacactttgctttttctttcactcttcttatcctattcattcttagaaaaaatgtacatgcacgagcacgacgtaatataataatcatattaatcacccttttctaaaatatgtaaaatcaaaattctgtgtttcaagtttcgagttattcattttcccaaatttttaattactttatccaaaaaacaattgtattaaatcttcgtttaattggtataaatcattagttttgtgtacatattggttgcaaaatcactagtggtagtggatatatatttcttatagcaaaattataagagtatgtggtttaaattggtagttcacatcatcacactattaaatggttggagtatcaatggaatggaaaaacgacatcactattaaatggttaaaaatatatgcagaattgatacgaaagacaattctacggttgcaaattactaatatataggacagattttgagtcttcaagaggtagagaacgtcatgtgcgttgaatattctatgcaattttctcacaccgtataatcaataaatcgacagtgagagagagatagagagaagtaataaatgtcacaaccaccaatgtaactggtgcagttgtaggtgaaaggtacatcttctatccaaaataagaagcttacaacaagagacatttcccgtttatatgatgtaatattccatcttttaaaccatatgtaacggctttaaagcatgtatatttacactcatatttaaatatgcatgcataagcatgtcatgattgtttcatccatcttcacgtacggtgtgtgtgtttgaatgaagataggtgatgatgatgaagatgtgtgtgttgatgatgatgatactaattctcatgaattcacttcatttattgtttgcattgcatttacgttatcgaagggcgtgctctttcttcgacaatgaaattccttctgcaccactcttactctctcgatctctctcctctctctcactatatattagtattaaattaaatcatggtgtaacaaaatgaaattaagtcatgcatagaaataaaataaagtaaattaaatagtgaaagaattgttgttttaatttcaataaactctagaataattatccaagcaaaagttattattataataataccaaagtattgattttaacagaaaattatatggcagatttgattttaggtttattcacctagctaggtttcaaaaatcaaaaggagctttgtaactaaaacagtatgtttgttagttcaataggtagttggcaaaaataatgagatatagtttatcatattaaaaatattttaacatacacagattcttcacacaagaaaacatacaaagactaaaagtagaaatttagttgaaatcctcaataaacaattttcactttcctatggtatttaatgtaattaattattatttttgttaactttaagaaacagcccaaccagattagtaacaacttttgaggttagagcaagaggaatgttttatataagagtcagaacaagaatttataacatgggatttgatcatttgaacatggaaatgtcttgtcaatttgcacgtatatatgtttattttaatataaaatctgttttgttaattacgttagtaacatgtatatatgtacataatatagtataaactctataaattaatactcgataaattaataaattttgtcggtcctaaattggggcaatgtaaaaattaatcaaaatcgataagataataagataataatttttttgaaatccctatgtaaaattatagtcccaataatattataaattaataatcataaatcttaagtatatatcttaagactaatttttatatgaaatttttgttcaagctacaattacaactctttttaaaatataactggtatgatctctgttgtactcacataactatttgcgcatttgatctatcgtagttgattttgtaaaatcttttatttgagaaagcatggctaagatttatgtaaagagaaattggattaagcttcatgtttacgtttacgttcacgttaatgtcgtagatatacagacataatatcttgccgaaaaataaattaaagaagtaaataaaaaaaacctaacagaattatatatgcaaacaacaaagcatatagaaaagtaaattaagaaacattttaaaaagaatatagtattgtattttacataaatatttctataaattaatattcattaacttatacaataaattaatattaatttataggataaattaatatcactataaattgataaaatttcatggtcccaacattattaatttataaagtttctactgtagttttaattcatgtgcatagtagtttatagtttctacttcttcttaaagaatttcaataaaatagttatataaatctcagatatcattagtatttatatcctactatattatttgggaagtacattttaaatctaaccttaatttttgtaattaattacatgacaatgccattaaaaaaaattaatcaaaagaaaattttttaataacgtcattaaggttaccaaaatcatttaacgacaatatttatctcttaattatagggcttattggatctaaagacgggtcattaaagattttctaaactgaagcaaaatataccgaatattcaaatatctatctgttaccaaattataaacaaataagttcatatttaattttttatatacgaaatcaattaaatcttaatcacataaaaattaacacaaaaaaaagtattcaacaattaaaaaattatcaaatctctgtgttatagaagtttttatactatattcgaataaagtgtaatataccttttcaatttgtattctttaactaatttaagctaactaatatatttgctaatcttatacctatcaaaaccgactatcttttcttatctttatagtatttttgcaagacttttaggtggatttgggttaaagtgcattcgggtcatatggtacattccttattaaataaatatggtgcactcctatgttattagctaaaatgtttagattataatttagagtcatatcataaataaaattaatattaataaaataaatggctttttggcaagacggatctggagggacgggtttttgaatcaacattaataaaaaagtaaaatataattaatccaccgtttcaatacgggttaaatctttaatctttttttttttaagaccactaatattaaacatatcaaatcatcctaatttagaaaagagtatataaaactaaaaatgttatgtggtatgtataatgttactatatataaaattaaagtataaaatataaatgtattagagaatgataaaattttcaaaacttatatatataataaataattcttaaattttaaaaattactactttaaaaaaaatcaagggacgggtaaagaaattacagaacgggttttattttggaattgggttatatggtagatgtattttaatcaatatttagaatatttataaaattttattaatatgttgttttgataagagttaaaaacttcagttttttaacaattgtctaatgtattcgtggtatagtgttacttaataacaattataaactgtaaaatataaatattttataaaaataaaattagcaagttttaatatatattacctttaaaaaataaatcgtcccgcgttatatcgcgggttaaaatctagtcgatttatatttacaagatcttaggttgaaaataacatacaaactaccttcgtctataaattaaatataaattggcataatatctggaaaatttcttacaatcaagtcatgacgattgacgaatattgaaagctcaaacactaatgttgtacgttgatgaactaattaaaaattcaataaatgctctaaacatataaacagtgtaacgtaaggtgtaaatagcgaataacatatgacagactgaatataaggctcggatcgtagaggggaccatgttccaaacccaattttcccccattaatttccgggaaaccaaaataataaaagctaattataaacgttttcatgaaattagggcaaaagtacaaactgaaactaatgatgccctaaatgaaaatgaaatctctgcaataaagaagagtggctttaggggccacgtagacattagttacaaaagctctgcgtcttttagccctctgcctcttcaacagtactttacgacaatgaaaaagatcgtgatgcgtaaattaagatcccctgtttctcactgcatgctcgttaccgtacgtactcataggagtttataaatcaaagggcctatagagagtattctaagtagcaaccactacgtaaagttttaccaaaaaaaaaaaccagtatgtaaatgtgaccatatgttcatgtagttgcttgtgtacatctttttttttttttttaacttcaaactttatgctttattatagtgaagaagtataatcctcatggagtgtacatctatatatacactgcatacgcatgtagagtaacaagacattctttgtttcttgtcaaaagacattcacaatccaactagagatatgattttatcatttgttagttagtttatagtttggtgacttggtgtaatctcctagttggataaaaatattggaccgttgattcgatagaaatgccaaacgacattacaaatcggatatatcgattggatggaatccaaaagtttatccaatataatcgactaaagttaaaaaatgagtaatccaccagtctaactaaatactttctttaccaacaaaaatttgggatacaactgagtttatttaggtgataaaagattataagacttaaccttttaacaaaaaaaattttttaagacttcaatccttagattgttttccaaatattaatagttacaatagttagtttgtaaaacctatttttaattttccgatactctttgcacgttgtgttgaatccgagaaatcatgggggctatataaacaaaactatactatgaaatagccaagcaacttcagtgatcggatctttggttttttattttaaaaaaaataaatattttatcagccgtatcttcagggccattccccataaaaactataatagcttctatgaaatttgtagattcctaaaaaaatctttatatatcttttatatacaatatgtggctgttacgtagaacaataagactatacaaaagttgggtattgttccttttcaattacaaaagtcatattcactaaaacaaagcccttcaaactttttaaaaaaaatgaataaatcacgcatttatacaaaaagatccatccatgctcctataaattcgagcatataattaactaaagaatactcaacatgttcataagtacacctgtcttcacactcgtttcacacattgtaattgacataaattttaatatcttttaaagcaaagcataagtaaaattatatagagtatttcttcaacacatttccggacgatatcaccacgaaaaatatcctatatcacctatgtgtcatgactcatgaccataaggaaggaaaaatgtatttttatgatcaaacggttttcactttttttattattcattctagaaaaaaattataatcgttttctttcattcctacgatacaataattcataacgatcttttagaatttttgttttgttttctgtgtgtatgggtaaatatctttcatacgtagacagatacataacaattaaagctggtgaagtaataattgtgaagagacagagaaattgaaaaaagagagtttgtttttcgtctaagtaaataccgatgatgccctcacctttctaattccctcctttgtccctttccattttcatgtttatttctaacttctctgtccctttcaatccttctccaccagatatcctctgattcgatcccccacaaattttttcataaaaattattattattctcactaaaactctcaagagtagtttcgatttttcctctgaataaaaaaaaatcaaataatatatttgacaagagaatttccttcctaaacataacattttatttgaatgttaattcaattgattatttttctttcttatatccttttctttggcaaaatttatttcttatatccaagcacatttttcaatagggttttgtatgtatgaaatcatatctacatgcataaaagaataatatagtgaataactgattttctagaatattgtaaaaccttctttttgggtccccatttatatatataactcaataccttactatctctctatatatatataatcttctctctcacacaaaacctaaaatctctttactaccagcaagttgttttcttgctaacttcaaacttctctttctcttgttcctctctaagtcttgatcttatttaccgttaactttgtgaacaaaagtcgaatcaaacacacatggagccgccacagcatcagcatcatcatcatcaagccgaccaagaaagcggcaacaacaacaacaacaagtccggctctggtggttacacgtgtcgccagaccagcacgaggtggacaccgacgacggagcaaatcaaaatcctcaaagaactttactacaacaatgcaatccggtcaccaacagccgatcagatccagaagatcactgcaaggctgagacagttcggaaagattgagggcaagaacgtcttttactggttccagaaccataaggctcgtgagcgtcagaagaagagattcaacggaacaaacatgaccacaccatcttcatcacccaactcggttatgatggcggctaacgatcattatcatcctctacttcaccatcatcacggtgttcccatgcagagacctgctaattccgtcaacgttaaacttaaccaagaccatcatctctatcatcataacaagccatatcccagcttcaataacggtgactaatctctcttatacatgcttttttatgaatttattcaggtggttttttataattactaagagaaccatttacaccactagctattacatgaattagcacacacaaaaaaaaaaaaactaacaagatctacatatatgactttgatagatatatgtatatgttaattgttaaaaagattttaaaaaatgctgttgatttatgaatttattcagatggttttgatttaaaaatctaaaatatatattataggaacatgttacacaccatctattattacatgaattagtaaaaataattaaacccaagaagatgttatgtacatgtaatgacgtatatttgaagttatggatcttgattggggcaaaccaaatttgcatctaaagaacggtttctttgttgtgtaatggaaactagactcacgtgcattttattttcatttgtgacttgtaacacaattagggatttgggttagtagaaaaaaaatcactaattttatgtctctttcttcattcttttcccctgtatatagtatggtctggattctggaatcacaacatatatgatcactgatgatacgtatattaatatgtttgaagggaatttaaatcatgcaagctcaggtactgaatgtggtgttgttaatgcttctaatggctacatgagtagccatgtctatggatctatggtacgtaccaaactataattcattaattcaaataatatttatactacatatatgaatagaaatttaatgaaactgaaatttttgggtgaaggaacaagactgttctatgaattacaacaacgtaggtggaggatgggcaaacatggatcatcattactcatctgcaccttacaacttcttcgatagagcaaagcctctgtttggtctagaaggtcatcaagaagaagaagaatgtggtggcgatgcttatctggaacatcgacgtacgcttcctctcttccctatgcacggtgaagatcacatcaacggtggtagtggtgccatctggaagtatggccaatcggaagttcgcccttgcgcttctcttgagctacgtctgaactagctcttacgccggtgtcgctcgggattaaagctctttcctctctctctctctttcgtactcgtatgttcacaactatgcttcgctagtgattaatgatgcagttgttatattagtagttaactagttatctctcgttatgtgtaatttgtaattactagctaagtatcgtctaggttttaattgtaattgacaaccgttttatctctatgatgaataagttaaaattttaattactactatgaagaaatgactatttcagtaaatttttaaaaaggaattcctcacagatccggaggcatgaaagaaatgctagagatgtactatatttgattacaatgttatgatcttaattatcgattacaacgtgatcttgaaccgaaatcaacaatagttgttttacaacagaacttgtgaacagttgaatgttttttggtagttcaaaactaaaacaagcaagttgcttttcagtggaagttttcttcttcttcatgttatgcaatcagcttgatctatcgataatcatggaattttgattacatcaatacgaacggtcaaaatcaatctcaattatttctatgcggttttttcctacctaaattttgattacatgcatttatcaatccgaactcacacaattttcaaataataaatctgagttatgtaaccgttagccaatttcaacatatattcattataaattaatattaatcgttagccaattaaataaaaggaatgatttagatacaaaataagtgataattttaacttaacaattcaaatcgacattaacatgtatatgttacacagttcagtttgttatttaaaaattatgtaagtctaggttgataaatacagatgaccaaaatttgaattaaaaaaagaccgcatcaaaatagttggggttgattttggtcgttatccccaaaaaatgcaacctcgaaccctttattgataagattaaactatatgggagggtaataagtttataggggtttcttctaagttcatatttctatttaaaacctacagcaaagtaggccaaaatggtacaatagcaaaccattacaattcaaatcaaattttgttattgataagttagaatttgttgttgtttaaatacttcataaatacttttcgaaataatacaattttaaattgttaagaaaaaagaaataacatttatcaataaaattaagattatagtgaaaaaccttgaaccctagtcattcaacgatctcgtttacccttattttttccaaaatgtttgttatgtatactagggatgagttagggaatgaatatcctcgattttggtggtatttgtgatatgctcttagttatctgatatgtattcgttccgtaactcatcatatatccgttaaaatcagaagtatttgcttaatatataactaaaaataactataaaaaatgaaaaacatataaaaaaaactcaaaaaataaattcaaaatagcaaaattttattaaaaatatttcgttaacttttaaaactagtagttaaataaataattaatttgatgaacaaaatttataaaagttaaatatataaagtaaattataatggaattagctatatacatatgtatatatatacgagagcaaaacggaaatcaattttttactagatgggttatatgatattaatttttaatattcaatttgtttcataaaactacagatgtcaaaagtttttgaatcgaatctaaacgaataacagatctaaatggaactaacaaaatattttgccgagttggtatgtttaattatatctgaactatttaatgatggtcatcgatatgacgatatgaaatgtttttattttctccatctcgttcaaaacgacaaagttaatgatgaccatcaatggctgattgatcactacaatttttttattttttatttttaacacttatatctaaaattagtttgtagtaacactaatgtccctttgtaatctttggatacaattaagtacatatatgattagttataagttcttctttagtgctatgaattacgtcaaggtggctcacgcgttgtgagagtgcgtgtcattcagtatttccttaaacagagagatcttttacaaagagctatcctcgagccacgtgaactaaaatgacacaaggaagaaaaatgttttttttgttagttgatctatgtcacatagatcttgttcaatgaccgtagcttttgatagaatttttttaaaaatatgttacatactcataaataaattatatgggttatatttgcttataaatcttgtacattatactatacaatctgttttattgtgaattgtgtattaagaatcattttaacaaaaaaaaattaaaaaataatataatactgtatgttaaaaaaacatgaatgtggcagttagggacatttgtgcatccatgttttaaagagtacattttttgtagtttgaaccctttcttcctcgtaaactacgctcataattgttacattgaaaactttaatcatggagtattaactagatatgtttttctttggattgcctcgttatatgttgttccttctcttgttatccaagtttctctattatccaagttttgtccaaacacgaataccaacaaactacatgtctatatttatattttgaaaaaatgaaaatttaagtggtttagcagataaaacgaactgatgtgttttcggccaaatccatttataattaagattttccattttaccattattaatttacagtaatgcgtagattaaaaatattaagttgttatgtatcagtgatagtcttctacttgtaagtagaaagtctactgattaagcttatgtatgtttcagaccttcgtactaatgaaaagaaactttgaggggaaaaaaaagattaaaaatattaaaatatattcacagtggattaaatatggagcgctcttacgtataaatatacttgctctactgttatttattgtcttctcaaaaataaggtgtttagtccgctaacggtttatttcgctttatccacaatatttttccaaagcctaaataatactattcttgatcacatataaaataaatattctagaatttttcttgttctataatatttacgtttttatattcttatatttcaacaaaattaaaataaacatgatttatttaggtttttgtggtttagcggatggaacaaactaatttgcttatggaccaaatctgttatgtttttgagactaaataatattatatccgtccctaaaaagctgatattttggggatttttcttgttccacaaatattaatttttctatatatttaactatttaatgttaataatttgtaaattttaaaaattatcattgaaaattgaatttatgaatggttattggtttataataattttgtgaaaataatgtatttataactaaatattaattgtttgtaaaatttgtgtgaaaattcctaaacatcaattttcttaggaacataagctgtatacctattttgcatggaaacgaaaatgttgaagcaaaacgttttgaaaacggaaaatagtttttttctaacattttgaaaatgtatattatatatatatatatatatatatatatatatatatatatataacaccaaacataaaactatattaaacaaaactgtttcaaacaatacatatccaaaacgtaaataatttaactaaaatctataaaaaaaagattaaatgtttaaattcaaaaatttagactatgatttttatttattcatatattgttttaaccgacggaatataattaagcataacaataaattttctattatttaacatgatttttataatgggtaattgagtgaaaacaatattgtttttttttcatgtattaaggtaccttaactctgatcatttgaacagaataattcttgatttggtaaaccaatactgagctttagctttaccgtatttttttgacagaaaatcacaattagtaaacctctttccgcaattttgattctacttttttctttgcaaatactgatctcggatagtcaggattcaactggtcaagataccaactcaatgttactaattcattttctttgacgtctctaattgatttctttctttctatgataagcttacgtgatcagtccctctttatatagaccatgaaaccaaacccttaagaagaataaggagtctacatcaaggagatctcaaaatcgaataggcttttaaattcttcaaacataaccaaattacacatctatatcttgaccaaattgcccaccttcattttgaacccagagagagagagagagagagaatgaatcaagttaccaattgtttgaataaagtatttgaacgtatatatgttcctatcatatggtctagatcactgacatatgtagtgatgtgtcttaacgagttacttacttgtgatgtatatatattacaagtggatatacatatgagtttttttctgcggatccgagaagatctttagatgctttttgaggattcaaagtacgttattcctataagaagcaaagatgtgaggcttgtgtagcatcatggtctatgattccctttatgtgaaaattttcctaaaagacttgtttggatcagtttggtccatttgccattttttgttggctgattttttttaatgttcctatatacaaatttatatccgttttgtgaatattacggtgaactagatgataatccaaaattgtatgaatagactttttattttttctataattaaaactgaattattgtggtagagagcgatatgaaatcgctgtgcggctactttatatcataaaatacttttttttttgttgagaaacatgttgcttaattagtatatggtcggattcacaacactttaattttgtaacaaatctatttattttgctctgaaatcatatatatctcacgttctactttctccgagtttcaattttagatgcaaacataaacctaacatcataaagactgtacaacaacccaagaattgaagattagagacgacacctacataaaaatcgcaaaagtatgttcaatgtgataacaagtaaaacttttatctatagagattattgtaaagaaccaagcttagatcattgcaagatgcaagactcatttttaacgtaagtattattcatcaaactcttagaacgagattgatatatagcatcatgcacattaactatattatataacgatctaaaatcataataatcaatatgaccgcattattggagatatatagatcaatctcatccacgggttgctctaaaccatcccatgaacggagcaaaacccttctttaattttgtcttcttgaccgaacaatctctctcaaaatccttctctttcttgtttctctcctcttcgtccccgacacttgacatcacacgtgtcagcaaaggcgagctcgcgaatgtcactagtctcctcttttccaactcctccgtcgtcacaacctcttcttcaaaatcattagacgtcatcgtttgatgctgttccacgaacttgagttcctcaatctccggattgtctaggcgactcgacctcgtcctgctgagccgttgtatctccttcttaccaagttcgagttcttgtgttagagttttgattctgttggagaggctggtgtttagttgtagtgttcttgtcagtgtttgttttgtctgctcaagctcgagtgttagagatggtagtcttgatagagaactcggagttgaatttgtttcctttgtccgtatctgaaaccgtcaaagacatgtgatgtaaaaagtaaaaactatacgagccggaacgtatcaatttattcatatatacaatgcccattcaaaactataaatgtatgtgtacatattttttttttttcatttggttgtgttgtatatctagtcaatagaaaatggttacaaatatatctgacatattaattagtttatatatacagtatatattatgtatatataaaatattatttcaaaatagtaatctttgtgatgatattgaagtattgaacattgtttattttcgttgtgataatatagaacattgttacctctctaagcctagttgcatagatctctccggctaaaactttctctccgaacatggccaccgcttctttcaccgacccaaacgctgcttttgtctctatctccgctcgaccacttctccaaacgtttcctctctccattactatctgcttaattaattatgcgtataccttccatcaatattacatcacacaagaattagtgttactttttgtgtcttatacagtaatttggagggtgttagattcttggcgttcactacacttgaatttggttaataaaaattataatgatggcttttgctcctgtctaattaatattcgttagctaaatgtgaccatcttgataacaacacctctcctaaaataaaataaaatgcacacaggcctcttgaaattatattgggccgaaaattttggcccattaaggaaacaataaaactgggcggtacaagtcggcgatctcgcccgtgaatcctctcggagttcacagaactcactattcaaagagagtcgtcacagagaaacaaaaatgagagggaaaattgcttagagaagcatcatcttccatagtcttcctcctctaattcgttagtctttgttcaaacgattctgggaaactctccagaattgtctctagtttagtagcttttgtaaaaaaccttcgctaaaattccacttgttttgacctagtctggcacttgtacggtgcgtttagagatcgtcgcgtcggtgatcggcgaaagagctccgccgtgtaaattatttcgctcagctctttgttcaccatgagtccaattcagaatttcgagcaacactcccgtcgtctcgtggatcttgacctacgtaatttctctattgatttcactctctatataactcaaatcagcttcctttgattttgaattttgagagaattttcatgattctcgtatgaattatagtctgacttcgactcagttcttgttttagttttaactgtgaaatcaaaaattcttttgttttttttgttaatttatctgttttgaaattgttttgtgtagctattccaacaaggcttgagatggtggtggaggtcagggacagtctagagatagcacatacggcagagtacttgaatttcttaaaatgctacttcccagcattctcagttattcttctacagattactaaaccgcaatttatcgataatccggagcacaaactgcggaacattgtggttgagatcctcaatcgtcttccacacagtgaggttcttcgtccctttgttcaggacctcttgaaggttgcaatgcaggtgctcaccgcagataatgaagaaaacggtttgatttgcattcggataatctttgaccttcttaggaattttaggcccacgctagaaaacgaggttcaaccgtttttagactttgtctgcaaaatctattcgattttcagattcactgtcagccattttttcgataatgttaaaatggaagaagtgaagcctatggagatgcctacgtcttctgatcagtcccttacccctaccccacctatcgggaatgtgcagcttaatccgagtactcggtcattcaagataatcacagagagcccccttgttgttatgttccttttccagctgtatagccgactcgttcagaccaacattcctcatttacttccactgatggttgctgctatatctgtccctggacctgagaatgtcccttcacatttgaagcctcagttcatagagttaaaaggtgcacaggttaaggtgagacaatgtttcttcgtaaggaagggaaccaaagctttctacattgttggaaatattattatatcaaggcctacaccgactcattgtttgatctgaattatattgtttgtaactgggagatgacatgatatattgacttttgttttcggatcatttgcagacggtttcttttttgacttatttgctaaaaagttgcgccgaatatatccgtccgcatgaagaaagcatatgcaaaagcattgtaaatttgcttgtgacgtgttcagattctgcttctatcagaaaggtggaaaaccttatggtccttttcgtcagtatgttttctctggtgacacagttaagggagtgcagctaaagatttacttttcattacataaaatgcaggaactcttagtctcattaaagcatgtgcttgggacggatttcaagagaggcttatttcctctgattgacactcttttagatgagaggtatgaggcttaaggcatctgaaattcgaaaatttcgaaaattttcatatttctaaaggagatgtttggttaaatcaagcacagcttttgtccgcatatagtttatctagttgaagtatctataaacaagtattgacttttttcaggtattcttctttgtcttctgtgttagggttctagttggaactgggcgagcatgttttgagtctttgaggcctttggcttacagcctactcgcggagattgttcaccatgttcgcggagatctttctctcgcacaggtttttactgatgcagaactttaaacagtattaaacgttgattgtgatagcctggattcattataagtgaaaatacttcattacaatacgcaattgcactgtgtgtggaaaattttaggaatgtaacatattgatcaattttctttgcatcattaggctttcctttttgacgtcatttttttttccccttattttttgtcgagcttaatgagtgcatttcctttacattcctctgattaactataaacaacgtcacagttatcacggattatctacctattttcaagaaacatgcacgactctaccctctctcttagcattcatacaacatgtgcccgactgatgctgaatctggtaattctatattctctaccgtgcttgtcttgtttaattcgataaactgctttaaacagggatatagtttatttattttttctgaattaagcttcaatcaaaacttgtgtttgatacaggtagaaccaatatttgagaaaggtgttgatcagcagtcaatggatgaagcacggattttactggtagaaattcactggagagttcattttagaattgattggcttctctgtccattaacttacctcatgttgcacctgtaaatagggacgtatcctggatgcctttgtggggaaattcagtactttcaagcgtactattcctcaggtaatgctggttgctgttcaaaatcggatgttgtgatcaagagttcaattttttttggctttgttttcttctattactgatgatttactgtttgttaagtttcaaaaccaagttatgctgctattaatttggtctctttccttctagtgtttgagattgggaaagatgtgtatttattattgaggtgatcacttgatcttcaggggcagtttgcaagatgcatttgctttcttgctataactttcagttttcagatggtctttgagaatagctgcaaaaagtattcttgcttgatatgtcatttctttatttttatgttacctttaaattatgtgctaagaggttaataaaaaggcatcttgagccttcagctaattcatttctcaactccattatatttttgatgttttacctattcttgctttgcgattcgtagcttttggaggagggtgaggtgggaaaggatcgggtcactttgaggtcgaagcttgaacttcctgtccaggtaatttgtgtcgctcatcagtgattacttttttttctttctttctctgttttagtgagtaatacgaattatcagtaatacgaattatcagccaatgtgtgatcgtcttgcacatgtttatattcaaactcaattgcttattaaaagctctcatattatcttacaccgttacatggacattccacttttgctttaagttggaatataggtggtattgtaattccaagctggattcttagattttatactaggctttttgtctcctgatgaagcattatgcagtcttattgataacttcataaattttcttttgttcgacaaatggattatctagaagttttatttattgctagaccacactggttgcaggcagttttgaatttgcaggttcctgttgaacattccaaagaagtgaatgattgtaagaatctgatcaagacactggtcatgggtactgaatcttagcagaattatctttttacattgaccatgattctatacttgacgatcaatatttattcactttcttgattgtgttcaggaatgaaaacaataatatggagtattacccatgcacatttgcctcgacctcaggtttgtgttaaattgtctcttgtatcagtgttctattgttttgtcatgcaagtatattaattgtgacggtttctcctgctggccaggggatgaaccctcaagctcttgtttcacaatcatctgctccgcagggttttaaaggaatgagagaagatgaggtactgcttgtaagattatttactttagtcattaatagtgcatggctataaaccttagtaatctctgccttgaagtaggtgtggaaagcttctggtgttttaaagagtggtgtccactgcttagctctcttcaaagaaaaggatgaggaaaaggaaatgctgaatcttttctcccaaattcttgctattatggaacctcgagatctaatggacatgttctcgttatgcatgccagagctttttgagagcatgattaacaataaccaactggttcagatatttgccgcactcctgcaagctcccaaagtttacaagccatttgcagatgttttgattaatttactagttagcagcaaacttgatgttctgaagaatccagattcagctgcaactaaactagttttgcatctgtttagatgcatctttggggctgtcaccaaaacaccatctgattttgaaagaatattacagcaccacgtgcctgttattatggaagtctgcatgaagaatgctacggaagttgaaaaacctcttggttatatgcaattgctccgcactgtgttcagaggtcttgctggatgtaaatatgagctgcttctgagagatttgatccccatgctgctaccttgtcttaatattcttttgacaatgctagagggtccagctggggaggacatgaaagatcttttgctagagctttgtttgacgcttcctgcacgcttaagctccttattgccatatcttccccgtctcatgaagcctcttgtattctgtttgaggggaagcgatgaacttgtgagcttggggttacgcacccttgaattctgggtggatagtctgaatcctgatttcctggaacctagcatggcgaatgtgatgtctgaagtgatcttagcattatggtcccatttgaggcctgtgccatatccttggggtaaaaaagccttacaaatccttggaaagttgggtggtcgcaaccgaagatttctgaaagagccacttacacttgaatgcaaagataacccagagcatgggcttcgcttagttctgacgtttgagccatcaacaccttttctggtgccattagacaaatttattaatcttgcagtagcagcagttattcaaagaaatcacggcatggacatatactacagaaagcaagctctaaaatttctccgtgtatgcttattgtcccagcttaatttgcctggatgtgtcactgatgtgggtcaaacgcccaggcaattatctactttgttacgttcctccgtggattcatcttggcacaggagtgaagcagtggaaatcaaggttagttttaagcatcattcttataatcttaatttctcatggttggactctgtactttttctttcacatgacagaggttatctctgtggcaggttatcttatttgtctactttttgaattctggcacattctaggtgtatcaatgccatttagttatgatgcatatcggctaggatcttgacagttggtattagagaaaagtttcttgattgacccacattgacgtggggcatgattatgattctttaatactcgttttgttaccattcattttcttaatagataattgatcttgtaatcttgtatatatgtcgtcttctctagatgtactcttttttccttataatacctgtttcactttgcttaatatgctgaagaaagattcattacattaagtgggctgtttcttactgtgtaggctgacttaggagtgaaaacaaagactcagttaatggctgagaagtcaatcttcaagacactgttgatcactatacttgctgccagttctgatccagatctcagtgacacggacgatgactttgttgagaacatctgccggcattttgcgattattttgcatgttgactatacctcctcaaatgcatcaactagtactagttcactcggtggttctgtgatttcaacaagttccagatccaagagtaatcaatcatctaatttaaagcagttagatcctttaatatttttggatgcactggtcgatgtgcttgcagatgaaaacaggctccacgccaaagctgctctgaatgcgttaaatgtgtttgctgaaacacttttgttcctcgctcgtgtcaaacatgctgatgtgttgatggctaggggtggtcacaatgcctccatgattgtctcgagtccttctacaaatccagtatattcaccccatccaagtgtgcgaataccagtgtttgaacaacttttgcctcgacttttacacggctgttatgggagcacatggcaagcgcagatgggaggggttatggggttaggtgcattggtggggaaagtgaatgttgaaacattatgttatttccaagtaaagattgttcgtggtctggtttatgttttaaagaggcttcctgtttatgctagcaaagagcaagaagagacaagtcaggtacttatgcagattctacgtgtggttaataatgttgacgaagcaaacagtgaagcgcgtagaaaaagctttcaagatgttgtagaatatcttgccacagagttattcaatcctaacgcatccatccccgtgaggaaaaatgtgcagaactgccttgcacttttggctagccgaactggaagtgaggtaactgagttgcttgagcctttataccaactattactacagccacttataatgcgtccactccgatcaaagacagttgatcaacaggtgcgtcgcagtgctatttttcttttgtgtatctctctccgatcttgtcttcctctttgtctttaatgtttaccttattatatctacatacaggttggaacagttgcagctctgaatttctgtttggctctgaggcccccccttctaaaagtgactccagagttggttaattttctgcaagaagcattacaaattgctgaggctgatgaaactgtatgggctgtgaagttgatgaatcctaaagtgcttacatcattgaacagacttcgaacagcttgtattgagcttctctgcactactatggcgtggactgatttccgaacgcaaactcacaatgaactacgtgccaaaataatttccatgttcttcaagtctctaacatgtagagcaccagaaattgtggcagttgctaaggagggtttaagacaggtttgtagttgtcttttatcttaatctggattcttgcatgcacatataatttgaagatttttgagatttttggtgaagaaaatagatattcctattcgtactagtctggctagttttctttctggggagtaattgatatgtgcaaccatggtatagctacatgcaatacttgccttgtgaaatatgaggaacttgctcaacggagtgatcataggaatctatttcttgatatctatgacgttaattttttatccttataattttttttttttttttttgaaattctattttctgatttaggttatcaatcaacaacgcatgcccaaggaacttcttcagagtagcctcaggccaatacttgttaatctggcacacacaaagaatctcagtatgcctttactgcaaggtctggcacgccttctcgaacttctgtcaaattggtttaatgtaacgttaggaggaaagttactggagcaccttaaaaaatggttggagccagagaaacttgcccagtcccagaaagcatggaaagctggagaagagccaaaaatagcggctggtaatttgggttttgaaaataactaattgatgtctagtcatatgattattcacttgaacacaactcttcttttgtttacatggcagctattatcgagctcttccacttacttccacatgctgcatcaaaatttctagatgaacttgtaaccttaaccattgatttagaagcagctcttcctcctgggcaagtgtacagtgagattaatagcccataccgtctaccgcttaccaaatttttgaatcgatatgcggccctcgcggttgattatttcctttctagattaagtgaaccaaaatatttccgaaggtgaggacaatgtcttatgataagctttcgttcaccgcatcttgtaagaagtttactataagcttggagtagattttctaaatatgctaactatacttgctatttcctgtaaaaacaaaactcaggtttatgtatataatccgatcagatgctggccagccgttaagagaagaacttgcaaagtctccacagaagatactgtcatatgcctttcctgaaatttcgccaaaacctgatcctacattgagcacgacggcttcaactcctcctgctacatcatctggagatgaaaatcatatctctgttaaattagagagttctaatgtggcatcaacaaaggctaatatagcatccgatgcatactttcaggggctctatctcatcaaaacaatggtgaaactgatacccagctggttgcagagtaaccgcagtgttttcgataccttggttctcatttggaaatcacctgcaaggatatctcgtttgcagaatgagcaagaactgaatttagttcaggtagtttcttctatctcaaccacttataatttttggctttgcattgtgtttcatgctgaagctgcgtagtttgataggtttcctggaaatagccaggtatgaaaagttaaaactgatgtctaagattagaaaccattacaggtaatgattgctgctgatttgtagccatatactggtgctagagatttcgctacactctggaatatgttaaatttgtttcgattgaattcttgatttgcctgtgttgtgatggtatgcacattttttcttatattgcttgttggaacgctcctgacattgtttcaatttcatcttttagtatttattgagctaccaacgtatatataaatttctttttaatcatgagggtatggtgaatatagctgtgacatttgaaaattgaatagttttccttttgagttatgtaaaatattggaatctgaagtcttttgtgtcctcaaactcaggtgaaagagagcaaatggcttgtcaagtgcttcttaaattacctgcggcatgaaaaatctgaagtgaatgttctctttgatattctctccattttcttgttccatagccgcattgactacacctttttgaaggaattctacattattgaggtatctgagattttaaattttagttacaatttctatctgactccattttagttttcacactttcagcagtagtatagtataataactgggatatatattcatcaggttgcagaaggatacccgcccaacatgaaaagagcactcctactgcattttcttaaccttttccattccaaacaactcggccatgatcatttagttcaagcgatgcaaatgcttattcttccaatgctcgcccatgctttccaaaacggccaaacttgggaggttattgaccctgatatagtcaaaaccattgttgagaggcttcttgatccacccgaagaggtaggttcctttactcccctaaacaaatatatcaagaaaattgtggggaagacttctttataattgtcatactggttatgaatgtatctgtacagggttttgggggttaccctgtacaaatgttcataaatttatttttctccactttttcagaattgttaagatcttattgttaaatctcctcatgattattgtaggtttcggctgaatatgatgaacctttgaggattgaacttttgcaattagcaactttgcttctaaaatatcttcagagtgatttggttcatcatagaaaagagctcattaagtttggatggaatcatctcaaacgggaagatagtgccagtaaacagtgggcatttgttaatgtttgccacttcttggatgcttaccaggctcctgagaaaatcattcttcaggtaccgttaaaatttatatgtcagtgatgtttattgattttcttgaatagagaaaaaaataattttcttgaaacttctgatatcatcgtatttcatataaatctcctctttccattggtaaaaccctgttgtcataacatttgtgtatgactgtgacggtcaattatttagcttaagtggaaatcatttacaatgcgattgttgatagacaaactacatgaagcgagatctgaatgcatatttttcataaaaatgcatgtttgttagacttcatggtactatgacatgcacgtggttagtttttgtctatgacgttactcctccctgcatctgagtaagctgaagagaagcatatgcctacaaaaacaacttcgtctaattattaagtgacacaaatgtaatttgccaattggatgtaggtttttgttgcacttcttaggacatgccagccggagaataagatgctagttaagcaagccctggatattctaatgccagcgttgcctaaaaggctacctcttggagattcacgcatgccaatttggataagatacacaaagaaaattttggtggaggaaggtcattcaattccaaatttgatccacatcttcctacttgttgttcggcattcagatctcttttacagctgtagagcacaatttgtccctcaaatggtgaattcgttaagtcgtctaggtttgccatataatactactgcagagaataggaggctcgcaattgaacttgctggattggttgtcagctgggaaaggcaaagacagaatgaaatgaaaatggtcactgatactgatggaaccagtcagattactgatgaaatgcatacttcatctggtgctgatcctaagcgttcaactgatgggtctgccacatcagaagatccaagtaaacgagtcaaaatcgaacctggtctccaatcaatctgtgtaatgtcgcctggcggtgcatcatcaatccccaatgtagaaactcctggatctgctacccagcctgacgaggaattcaagccaaatgctgccatggaagaaatgatcattaattttctcataagagtaaggctttatactcgtatcttacaccatggaacatatattttactttggttagcttttcaattctcttaaccatgtcacctcatgtctaagagtgtatgtgcgtgccattgctccagctattacaaattcatctataagtcgagttgaatttatcagaatcgacctcacttctagttttgtttctctgttttaaaaatatttcgctttcttgaacaggtagcgttggtaattgagcctaaggacagggaaaccaacactatgtacaaacaagcattagatttgctttcacaagctttggaggtttggccaagtgctaatgtcaagttcaactatttagagaaactgctgagcagcatgccaccgtctcagtcggatccatcaacagcacttgctcagggattggatgtcatgaacaaagttctagagaagcagccacatcttttcattagaaacaacatcaaccagatctcgcaggtatagttgctgcagtaacctgttattctaagatttgaaatacaatagtgttgtttgcctgctgtcacttgatttactgtttgtttcttcactagattcttgaaccgtgtttcaaacacaagatgctcgatgctggtaaatcgttgtgctccttgctgaagatggtgttcaccgcattcccattggatgcggctaatacacctcctgacataaagctattgtaccagaaagtcaatgagctgataaacaaacatgtgaatactgttactgctccacaaacttcaggagatgataactcttttggttcgattagctttgtacttcttgtcatcaaaaccttggccaatgtacataaaaactttgtcgattcatatgtgttggtgcgtatccttcagcgccttgcacgagacctgggatcagcagtgggttctcatcctagacaagtacgtcattcttacttaaatttttttctgctaagaggtcaatactgcttgctttcgtttgtatgggaagtttaaatgagatttaaaaatttacttggcattttccacgttagtgagtattggaatctcctatgcatcttttcagctttgcaccagtgactttcattaatgtcttgtaaagatcttaggagttagactggttcctctcttacatcacctttctactcagactcatgctttatgttattagctgacatctttctggtcttttcatacatcaagatatcatttctatccctgttttcctgtaatctaccctttttccatctgactagtggatggagactagataacctagtcgttacccaatcacggcttactctggatctttttctctccatttccagggccagcgaacagattcagattctgcagtaacttcttctcgtcaaactgctgatgttggagcagtcatatgtaatataaagtcggtcttggaacttattgatgaaacggtcatgcttatagcagattgcaaaagatctgttactcaaattttgaacaccttgctttccgaaaagggtactgatgctagtgtgcttctctgcatactagacatgataaaaaggtgggttgaggatgatttcagcaaaacaggcgcatctggtttgtctggttctttccttacccaaaaggacgtacttacttttctcaataagctttcttatattgataagcaacacttctcatctgaggctttggaagagtgggatcagaagtatcttcagctgttatatggactatgtgctgattcaacaaagtacgttcgttgctttttcatttttcctcccttttgtcacatctttctgttaggagatggataatatatcttcatctatttaatgaacaggtatcctctaggcctacggcaagaagtctctctgaaagttgaaagacattttatgcttggtttacgggcaagtcatcctgggatgagaaggaagttcttcttgttatatcacgagtctcttggaaaaactttgttcgcgcggttgcagtatattattcaaattcaggattgggaagctttaagtgatgttttttggcttaaacaaggtcttgatctccttctagctatcttagtcgaggacaagccaattagcctggcgccaaattctgcaagggtactaccacttttgccttcagataatcctggaatacaacaccaagctcctgctaacttagagggtcccgaagaagttacttcaatgtttgacagcattgttatgaagcatgcacaatttctgagcgcgaccagcaaacttcaggtgattacaaatcatttaaaactttctttagtgttatcatgggtctttctctttgttattcctgatcgaaaatgttgactagattaccgtaagtccttaagcgctatatccacctgatccatatgggttatctgaataatacgttattcatatactgattactgaagtttataactttttgaaatttccactataggtggctgatgtggtcattcctttaagggagctggctcacacggatgccaatgttgcatatcatctgtgggttttggtatttccaattgtatgggtaaccctgctcaaggaagaacaagtagcattggctaaacctatgatttctctactatcgaaggactaccataagaagcagcaaggacaccggccaaatgttgtccaagcacttctggaaggacttcaattgagccaccctcaacctaggatgcctagtgagcttatcaaatatattggaaaaacgtacaatgcatggcatctcgcattggcattgctagagagccatgtgatgttgttcatgaatgactcaaaatgtgctgagtctcttgctgagctttatcgtttgttaaatgaagaagatatgagatttgggttgtggaagaagaggtccatcaccgctgaaacaagagctggactttcattagttcagcatggtttttggcagcgtgctcagagcctcttttaccaggcaatggttaaggcaacccaaggcacgtataacaacacagtccctaaagctgaaatgtgtctgtgggaggagcagtggcttcactgtgccagtcagcttagtcaatgggatgccctggtagattttggcaaaagcattgagaattatgaaatactgcttgatagtctttggaaattacccgattgggcatatttgaaagatcacgtgataccaaaggcacaagtggaggagactccaaagcttcgtttggttcaatcttattttgcccttcatgacagaaattcaaatggtgttggagatgctgaaaacacagtggggaaaggcgttgatcttgccttggaacagtggtggcagttgcctgaaatgtctgttcatgctagagtgcctctactgcagcaattccaacaactagttgaggttcaggagtctgctagaattcatgttgacatcgccaatgggaacaaagtttcaggaaatactgcggttggtggacttggtaatcgttatgcagatctgaaggatattcttgagacttggaggctgaggactccaaatgaatgggacaatatgacagtctggtacgatatgctacagtggaggaatgaaatgtataatgttgttattgatgcatttaaggactttgctacttcaaattctccacttcatcaccttggtttccgtgacaaagcatggaacgtcaataagcttgccaggatagctaggaaacaagggctttatgatgtttgtgttcagattcttgaaaaaatgtatggacactcaacaatggaagtacaggtacatttctccaaaatctttaattgcagcactctacacaagagctgtatatttttgctttttttttggtttcatatctcatcaagtttttttaatagttggtttcatttgtttttaaagctt

SEQ ID NO: 244 - DNA, 57550 bp, Arabidopsis thaliana
agagggtttttattacagtgttcctttgttttttctttcaatttatttaaccggacaaaacccggtttgacttcggtcgaaccgtaattcgaattgttctactttcccagaacagaacaaaaacagagttcccaaatttgagaaaccagaggggcacgttaacgagagattacctgcaattcccagaaaaaaactcgacgagaaaaaatgaagttgttgtcgtggtcgccgaggctgatgtctgaggaaaagtttattgttttagggtttatctttgtgagtttcgaaacgtcttagcgcaatggaaggtttaggtttgacacgtctaccaattggtttaaccaaaaatccaatttgcgagtgtttaaccgaattatttaggctttaaccggcatgtgttcttcaaaatctttattcatctatgtcatcaaaccccaaagtatcttatgcatgacatttcccaatcccttgtatatttcaagtttttttttgtttagttattttcattttaccacattttttatttacttaaaagatatcaaatattcattatttataaattaaagtatttttgaaaataacacatatattatcgaacaattcttgagttcatctttacgatgaattctttttttcacttccattctaaatactaaaagcatctacattgcataatcttttattaatgtctccaagaccaaccatggtaaaaatagactaaccatgattaaaattaaaaacattttattttttagatgtctaaaatatcttaaggaagatatttttgacatccaaaaggaaatgtctttaattttaactatggttagtctttaagacatacatgagaggttatgcaatgtgaatggtctaattgtttttcataaatcaaacatgatatatgatctcgtttgattacaaaatctaaactctaattctcttttttaaattcaaaccgatatttaaactcgtttaattataaaatttaaatctaaccgttttttctaaactcaaaccgatatttaatctcgtttaattataaaatctaaattcttttataaatcttaactgacatttaacctcatttacttgtaaaatataaactcgtttataaatccaaacagatagctaattttgtttaatcataaaatataatcattaatcctctctagtaaacccaaacggatatataatttcgttttgtgatagataaattttatagttaaatgaataattttttattaggtagcaacatccgattaggtgattatttacaggaagactgattatggtggtttcgtggttaaaagattcactatggtagttgaatgactaactttgagtcttactactaagatttcaatcatgttagccactgtgaacattttaaatggcaaaataaaaaactcaatgttcgcataatttataatattttagtgaacaaaaaaaaatattgtgttatttttcaaactttttcacataacttatattattttggtcagtaaatgttaacagctatttataaatttgtgtgtatcacgaatttcatatcctttaaattttatcggtcgaaagacaagtttctctagttagcgcttagcagcttccaagttccaacgattcgaaagcaactgatgctttgaccgatttgaaaatgcaaaagattggtctctgtgcatatactatcctttaaatttaaccaaattctttttgtgtaattcagaattttctttttacagttgtagctattcatgaattacaaatattttcaatcatttggttacgtgatggactaatatataaaccaatcaaccatgtgcttgtcgtcatttcttttgtttattaattgtgtttataaacacatatataataagtatgtgtttattctattgttaacacaacgtttatcatgcaatgcaagtcttagtctatgtttagtttattaacggaagataaaatatattattactaatagaaaagaggatacgaccgacgaagtttgaattttccaaaatggcaacctaacttaaataatgcaaaatcattaaacctacaattcttatattatcaataaaaccatataaagactctctatagaaaaaaactatataaagacaatcaaagactctctcgttacaataaccacaaacaacaatacacttctcttgacgcctatctctttctcaccaccaccattaccttcgtcacttctctcttccaagcaatttaaaccttcaactaatccagaaatgcaaatgctaagaaacttaagcacgaggacgaggagtcgtcgcggcggatatgagcgtgtaagcgatgattccaccttcagcctacttggagcaaagctaaggaggtcaacgagcgttccatactatgctccatcgataaggcttggtggagattttcctgtgattttggaaaagcttccacgccaaaaaccaactaaaacagtggtgacaagcaaattaagccatccaatcttcagtttatttgatggttatcgccgccataacaagaagaaagcgacggctaaaccggagttctctagataccatgaataccttaaagaaagtggaatgtgggatttgagatctaatagtccggtcatctactttaagtagatgtatataacaccatatatgttatgatttgtgttcatttattatattatttgtgacaattcttagtgatccgattgatcgatctataagagctattttctttttctcccccttgtaattttttaattgatctataaatttaaaatttcaaagaaaaataacattggttatagaactactttgtttataatgtatggaagtttgttttaaatttttagcacttacaactatttttagaaaagttcagtcgtcatttagtatttttacggagtattcattgaatgaaagaaattttggtccacatctatatatatttgggacaaagaagtccacatgatttcttttaaccaaatttttcgtgtcaaagttcatgttttgcttagagttgagttacaatcatatggttacgtgatacactaatatataaccacatcaaccatgtgcttttttggccatctttttgtttatcggttataacatacaggttatgtaacgtaataattagtcttttgttttttggtcaacagtcttgtgttattctattgttaacacaacgtttatcatgtactaatgcaagtcctagtctttgttaatttttttaaaacgggacgaaagtttgaatttttcatatcggcaacttaactaaataatgcaaagtcattatagtatattatatcaacaaaactacagtatattaagacaatcgaactctctctctacaataaccacaaacaacaacacttctcttggcgatatctttcgcatcaacatcattaattttcaactttgatcgccaccaaaaagaacaataacccaataatgcaattgctaagaaccctaaccacaagaacaaggagccgtcgcagtggatacgagtgtgtaaccaagcattccaactttagcttactcggagcaaagctaaggagctcacgaccgttccttactatgctccatatcgataggcttggtggagactttcctgcgattttggaaaagcttccacgccaaaaaccaaataagacagtggtgacaagcaaattgagccatccaatcttcactcatgttatttacatatatatgttatttataaaaatttacatcgattcagttagcctgataaagtaatcatttcactgtttttattttattttaatcattttgatgtatttttctaatttttgagtaaataattcatcttaagttttttaattattataaatagttatattatttaacgcttatttacgattacttattttataaagaaataaaaaataataattattttcttatttaaatagacagaaaactaatgtttatttggtactttatatagtcgttaaatgaactgtaaattcaactaatattcacgaaatctatatatatatattaatatatatatatatatatatataataagttataacatcatattatataatctttgtaatataaaaaaaattacttaagaaaataaataacataataacagattaacattagagtgtctttggccttaagtcagattaagtttctcattagtgacatatcaacgtaagagaacgtccttcatctattatatattggtgtatctagcaaaattcacaagtaagtcaattagtatatcaaccaaaaacattggagtgtcttttacttagtcgaattaagtttctcatccatggccttatttttcttaagttggtaaaaagctttggattgtttttttcttagttggattacaacttacaagcacacatgaaaaataaagggtgaagaataaagtttttcaggaggaatatttcttaaataataaaaataagggaacttaggaataaggaataatagaaatggagatgagacgagcgagtggtttcttaatcagggccatgcagcagaagcagaagcaggagcagcacatgctccatttctctaactcatccacctttatcaacattgattctctaagatcatccatcaatatagatatgtctttttcatgtttacaatatctgcgtgggaatatcgtgttctctcctgatattttttctagtccggatgatactgacacatgtgacatatctaaatatgctctttaaaaaaaaacttaaatctatggtttcgtttctatctaccgacgataaagattttcgagaatattatatcatcttagcatctatggactattgtccgtctagattaaatgggagctgtaattgtttattcttcaaatataaaaatatttcatgtatgctttttttcaaattaacatttagatttcatgatttttatataattaacttctactttaaacattccgcaattctcctagaaaaaagttacagcactaatctaagggaacataaatcagtacccttgatattcggtttaactgtgtatgttctactctgattctctattagatgttacatactctttaattaaacttcatagtagataatgatatacaaaaagtcttatggtctccttccactgggtataaaactatatatattctaaatcaacttattatattttcgtttggatctttaataaaatcttctctttatagcaatgtgcactggataatgcggttgcggccactttattggtgatgaccaattaagccataaaaccaggacaatttatattcttttgatttgattatatacatcatgcataaactatagtgccacatttctttagaaatgcatttaaaacatttgataccttcgcattatgtcaagactaagactaacgctttttaataaattataattacaagaagctttaattatgaaagttattactatatgttatccacagaattagctaagagcggaaattagtatgtgttgagtcatattttctacatgtaaatgactttgcaacataaaaataaatatcacaactcttttttttggaggtaaagaagagatcataacttattacaaagtgaagtgattccaaaggcatatcttccgttctgtctaatcttattctttgttttaaacccctccatgcactcctcttgtttatatatttattgcttcttctctaagtttgttgagtcctaatcatctctctatctagcaacgtataaatataaagagagagagcagagaaatgggtttcggctccttcatatctaccatcacttactgtttgttctttcgctatccacataagaagccaaagttcaaaagtgtgagccacctcaaccattaccacaccatgccaatggctcgtccactttctttacaggtattctctttcctttttatgtatctatatagtataatcgaccataattttcatgtatctatgtagttttagtctcaaattgactctatgatcatgatattagtttttcattaaaatagaataaattttggtaacaattatctttcaaaccgttattattctgatacatgcctaattgaacgaagagtgcaaatgatttttgtttttagagaaaggtatgactttgttaggtttgtgatgatggtagctagagcgaattaagttgctttttttttttagctaaacataaagatcaaagttcaaactatagttagctgatctcctctaattttgtaaataagttggcaaaacagattctcgatcgcaaaaagaatattaaagtactcattgtgctcatttttttttttctcttttgttagttaaaaaatgtcttttcaatttttattgattcgtttaggggaatcggacaaaactgaaacggaatgtcataagtttgtctcactagtggatgttactatatgtgattataatatcctttggctgattcagcagagagttggtcatttaaataattattcttctaattaattacctttttctttatggacatatatcacatattaatactaattgtttttgaagcagtcatattagttctaattagtttgtaatatatgaatggtgctaattaacagacgatagacctgaaagtaaggatgtgttgcagtggatgtgagagggttgtcaagcatgccatttacaagctgagaggtaatgttataattcagagtgttttcgaaaataactaatttcttttcttccataaaatattttcgttaaattaacgaatattaaattttatattataaattatggttatagaataataactttatatttttcataaaaaattgtaatatgttttttgttttgctaaaacactcctatatagaaaagggtaatattgtgaatatatcaaactagtaactaaacgggcgttgttttggtggtgaaggggtggactcggtggaggtgaacctagagatggagagagtaacggtggttgggtacgtagagaggaagaaggtgctcaaggcggtgagaagagccggtaaacgagccgagttctggccctacccggacatgcctcgctacttcacttcctctgaccattacttcaaagataccacccgcgagtttagggagagctacaactactatcgccatggctacaaccttagtgaccgtcacggtaacattcacgtcaccaaccgtggtgacgacaaaatgagcaactttttcaacgacgacaacgtccacgcatgtagccttatgtaatttcctcacttctttttaggtatctatgtgtttatatttgttgtatcatttatagggttgattgaatagcttttatgcataagcgtaagtgagacaagtaaaaaggaacacaatgctttattagtcttgggcattcgttttttttaggttcggtttatctgttattcggttatccaaaaatattaccggctgaaccgtaaaacaattctgttcggttcggtttggaattagtaaactgtacatggtatcaaagtttggtccttttcctataaaactatacataaacatgctataagccagatggtatatactaaatttgtggccactgttgaaattgctaatggtctaatgagataatatgcattgtttgtttatgaccgatcctctttcattttacatgaaaatgtccatagttcaaccatttgtttttgcctctaggcctctgaaacagaaaaaatccgaacaaacaacgtctatcttgaacaaaccgaacctatcgcaatctgtctctctgtttgtctatcttgcattctcttacgatcagattgtgttgaatgaagctttgaaaattgaaagcttcaaacttcttctattgtctatagtgcatatggggaaaaaaaatgcttgggctcttgtgttttattttgggcctgaacgaacaacatacactaataataccaccgccccactaagagagaggcaaattttcaatactattattctagaatgatacaccattttatatcaaaaatctagattctcttctttctttttttaataaagtttaaataaacctaacatgttttttcatatattttttgttaaaaatgattttttcatattgatctcttttttcttaattgaagaaatcggatggtcgaatcttagagcatcattattggtaagttcttagattagttcttaaaatttttttttgtgattgattattaagaacgcctcactttaactcttatataagagttaaagtgaggcgttcttatcctaagaaataatttaaaagcttaccaataaagatgctcttagtacactaaagacgataaaaatgattcgtcaaaaaggttttgattggaaaacactgaaatgtaaagaaatgtaaataattaatattccactcgttttttttaacaaagtaaactaaattatccattttgaaaataaagatattccaaaagagtaaaataacaaaaataatattttgagtcgatgttatttgacgtattcgtcgaatatgttcttcatcgaacggaacaaatcaaacaaaaaaagaagcaagtggatccgtcacgtgtcactttactattgacctctgacgtgtacacggacgtcaagtaatttccttgcaccgcacgcttccttcctctgcaagtctcttactttttttcgcttccctcaaaatgtctcttattaattttctatccttaaatgtgaaacagacaaaagtgtttgccatgtgcttctataaagcctatcttctatttctcacatttttaactcatcacttctaaaaccttttctcaaatctctctcactctctttcaccggaataaaattctctaggtcatcggaaattttttacttcagccgacaatgtttccttcatcagatttctctttctcaccgtcgtcgctgttctcagcgtacgcatctttaaccggattcttgatgctctttagatcgatgctccatgatttcgtaccggagaagcttcgatcttacttctccagcttactcgaccggtttttcactccgaaatcaaagtatctcactgtgatcatcgacgagaacttcggattgaaccggaatcaagtcttcgacgcggcggagatgtatctcaggagcaagatcggaccggaaacagagcggttgcgagttggtaagatcccaaaacagaagcatttcacaatctctatcgaaagaggcgaagagatcctcgatactttcgaggagtcggaggtgaaatggagttatgttcaatcggagaacgagaaaggagataaagtgaaacgttactacgagctcacattcgagaagaagcttagagacaaagtcttgaactcttatttaacccacgttgtagccgaatccgaggagatcaagaggaatctgagagtggtgaagctttatagcagagatgtgtatgctagtgatgatgatgatggaatggctggtgggaattggggatgtatcaatctcgagcatccgtctacgttcgatacgttggcgatggatccgaatgcgaagaagaagatcatcgatgatttggagaggtttttgaagaggaaggagttttacaaaagagttggtaaagcttggaaacgaggttacttgttgtatgggccaccaggaactggtaaatctagtttgattgctgcgatggcgaattatcttaagtttgatgtgtttgatcttgagcttagtagtatttatgacaatggtgagttgaagagggttttgttatctacgacgaatcgttcgattttggttattgaggatattgattgtaatgctgaagtgagagatagggaagctgagaatcaagaagatgaacaaattaagggaaaggtgagatatcttttggatttgagtttgagagaatctattggtttttagttctgattatgatattgtctttgagcaggtgactctatcagggattctgaatttcattgatggtttatggtcgagtttcggagatgagagaatcattgtgttcacgacgaatcacaaagaacggcttgatcctgctctgctacgtcctggaagaatggatgtgcatatcaacatgtcttattgtacaggtttaggatttaggacattggtctctaactaccttggtttagatggcttaaaccatcctctttgcgaggaaatcgaggcgctggtcgattctactgaagttactccagctgagttagctgaagagctgatgcaagacgatgatactgacgttgttcttcgtggagtaataagctttgttgagaagaggaaggttgagagaagcaagactaagaaggaggtttctatttgtaaagcaactgatgatgacgaaaaacagaatggttctttgggttgtgtaaagaagaagaagaaagggggtaaacagaaaggtaaagggaaaggtaaaggaaaggccaaaacttatttgatataagagataactttgaacaatatgatctgttgtgttgtgttgtgtaacatggtaaatcaaacctgtgttcaacattatgccaaataaataaagctttgtatggttctaaacattctacttttgactgaagcttccgagaaaatagattttacgtctctggaactatttttaccaaaattatctcaaattagtctttttttttttggcatactaaacagtctcgactttaataaagaaaccaaaccaaacaaaacataaggaagaaacagaggtgcataaagaatggatgtgcatatcaactcaatctattaaagcttgtaggatcaacgtttttaatttcgggtgggttaggagtagtgatctcttaatcacgaattcaaatacctaatcgggtttaccattcaaagtagacaatcttaaccgttcaacaatattggtatctctacttcattttggtatctaaatatgagcatattccatctcaaaaagaattataatcacaataaaatatttcaaaaaacacttataatcacaaaaagaattacaccacttttactattttacatttttgttactactttacttatatttaaattacatacacatttactaattaatatacatatttaaacacattaaaacatattattataatcactaaataacgaccaaccaataaaaatcccaatcagtatttataaaattttaaaataaaagaaatattttataaatttacaatataaaatataatcaaatacttaattaaaaaccatataaaaccgaagcccgcgataaaccgtgggttaaatcctagtatattagtaaaagcccaacaattttcttattattactctaacacatccacattctcataaggccacatccttcttatataacaaacacaaacttgcacctcaagtttctccaatcacacataagacatatttctaaattctatattgtcaatttgcttttctcttcaagcaaatttcccttttgcttatatgattctttttgtcttcaaacaaagataatttttcctttttcttgacttaacagactctcctaaatccaagtaatcatcatccttccttccagaatcttcagaattcatgtactactaacgactagtacagaattactgaaaaattgcatcttcagttgtttctcgctaacctcttcatagttcttttttttttgcttatttttaatactttctatttatttattttcattttaatacaaatggcaaaaaaacgttttaagatctttctactcaaaatttggatcattttaggtttcttatacatttgagtgttaatcgaattatttttgtttacatatatcaaattaggaaactctcagtattttatatttaaagattataaacgcttggattcttggttatgttttgtgcttgaacgaacaacacaccctaatgacatcaccgccttactaattgacgtttccttgtgacgcaagctccttcctccgcaagtctcttactgtttgttcacttgtttgcttccctagaaaatacttttgttattttcctattggtctactttaagaaaaaaaaaaataataataacttaaaaggaaaaataaagataaaattaaagaatagtattttttcatttgagtctatatatgaagttataaaaccccaattttaactcatcccatcacttctaaccctagctaggtcaaaggaaattccgcaagataattgtggatttcgattaacagagatgtttccttcaatatccaatatctctttatcaccatcgtcgctgtttacagcgtacgcgtccttaaccggattcttgatgctctttagatcactgttcaatgatgaagtaccggagaggctccgatcatacatcaccgacttactcaaccggtttttcactccgaaatcaaagaatttgactatggttatcgacgagatcatcggatttaagaggaaccaagtgttcgacgcggcagaggtgtacctccggaacaaaatcggacccgagacagcccgtttacgagtaggtaaactccctaagcagaagcacttcacaatctatatcgagaaaggagaagagatcttggatactttcgagaatagcgagctgagatggacttatgttgaatcagagaacgaggcaagccaaaaagagaaacgttactacgagctcacgttcgagaagaagcttagagataaagtcatgaactcttatttgagccacgttgtagctgaatctgaggagactaagagggatctgagagcggtgaagctttatagccgagatgtgcgtgcgagcaaagatgatgacggaatggctggtgccggttggggatgtatcaatcttgagcatccatcgacattcgaaacattggcaatggacccgggtgcgaagaagaagataatcgatgatatggagaggtttttgaagagaagagagttttacaaaagagttggtaaagcttggaaacgaggttacttgttgtatgggccaccaggaactggtaaatctagtttgattgctgccatggcgaattatcttaagtttgatgtgtttgatcttgagcttagtagtatttatgaaaatgctcaactaaagagcatcttgttatcaaccacgaaccgttcgattttggttattgaggatatcgattgtagtagtgccgaggtggtagacagggaagctgatgagtatcaagaatacgaagaaggttattatggaagggtgagatgttttgaatttttgtacagttttgagagaatctattggttcttagttttgactatggtattgtctttgccatgcaggtgactctatcagggcttttgaatttcgttgatgggttgtggtcaagttttggggatgagagaatcattgtgttcacgacgaatcacaaagaacggcttgaccctgctctgttacgtcctggaagaatggatatgcatatcaacatgtcttactgtacaggtttagggtttaggacattggtctctaattacctcggtttaggtggcttaaaccatcctctttgcgaggaaatcgaggcgctgatcgattccactgaggtgactccggctgagttagctgaagagttgatgcaagaagatgatactgatgttgtccttcgtggagtagttagctttgttgagaatagaaaggtcgagataagcaaaaccaaggagctggaaggttctacttgtagaaaacttgatggtgacgataaacacaatgtttcttctaccaatgatttgaagaagacgaagaagaagaagaaaggtggaaaaggaaaagcgaaaggaaactaggaaaggcattaaagtttatcagttagattttggttcgggttaatcagtttggtttgatttgttactttagaaacataggtctatggttaaagtttatcacttttttgttctttaaataaattttgaatttttggttcggatacgttcacatatagacgtgacattttctgatatggtcgtattctagcaatagcatggtatttctcttccctccgtttctatggggaatgtacaaagaacaaaaaaagtgagagaaagagaaatggagaagagaatcaatggttggtcaaagagaaaacaaaaacatgtggtgtgtagctttcaaagaaaagattacgagatatttttggatagatttcattctcacttttctctctcaccaatctctcattcagaggtaattttatccttttttttgttcttctatatccatcatcatgatcaatactcttacgtgtttgctttcgatatattatcgaatggagaatttggttaaagattgtgtttatgattggaatgtgttttgagtcttgcaggcaattggaaaggactttggttattataagaacactcttttgtagagtgctcttctcgcctatataacacatcatgtctctcaacgttggtaagtgttttttttttgtcccattgatttgttaggaatctttttttcttgttattacctttcctgacgaatgtgaatttttggatcttacttgataagatcttgacgtatgtgttttggagagacccaatgtgtgttcttttaaaaagaggagttgctccaagttgagttgttccttgacgaagaagagaagaagtagcaaggtgatgtccgtggagatcttcgaggatgagcatgacgcggaggagttaaaggtggttgatgcattccgccaagtgcttattctcgatgaactacttccggacaaacatgatgattaccatatgatgcttaggtctatcttggaatatatcatgccaatgtgcatctatgtccattattagcttgaatgtttcttcatttttcaggtttttgaaggctagaaaatttgatcttgagaaaacaaatcaaatgtggtctgacatgctccgatggaggaaggagtttggtgctgacacagttatggaggtgtgaattcatagagtttctttatgaatgcaagaaggtgcattgtggttgaaaacaatgttcttactcttttttttttctttgtatctcttaggattttgaatttaaggaaattgatgaagtgttgaaatactaccctcaaggacaccatggagtcgacaaggaaggaagaccggtgtacattgagaggctaggtcaagtagactctaccaagttgatgcaagtcacaaccatggatagatatgtgaactaccatgtgatggagtttgagaggactttcaatgttaagttcccagcatgctccatcgcggcaaagaagcacattgatcaaagtacaacaattcttgatgtccaaggagtggtacgtacataactgaatggtcatttgtagaaactataatagccaataatgaccaaaaatggtgtatatatgataaaaggggctgaaaaacttcaacaaggcagcaagggatttgattacgcgtcttcaaaaggtcgatggtgacaactatccagaggtgcactttatattattatcatcattggtttatcttttatgaatgattcttgctctctcaacttttttttttcatttatctgtcattggctcagaccttgaacaggatgtttatcatcaatgctggctcaggattcaggatgttgtggaacacggttaagtctttccttgacccaaagactacagcaaagatccatgcaagtatacaaaccctttttatcactcttgactgatataaatgagagatattcttactacttagctaatttgatattcaggttcttggcaacaagtaccaaagcaagttgcttgaaataattgatgctaggtgagctctgcaaaaagtttctgcatgaacactcaaaagattagtatttctcgaatgacagacttctcatttttctttgtatcagtgagctgcctgagttcttgggaggttcttgtacttgtgctgacaatgggggttgcatgcgctcggacaaaggaccatggaacaatccagatattatgaaggtttgttttctacaacttctttgatctagtaaagcaacaacaacactcatagttagtttctttctttctatatgaaaactaagatgattgtcaccgtaaacctaacagagagttaataatggtgaccacatatgctcaaagagatctcaagctgataatgctggagagaatattatctctcaggggaataactctgcagttgaggaagctcctgaaactgaccagtcacagccctctccttgtcaaaatgtaagaatgacactattttccttcatgaggcttgtattctccttatatttcttcccacatctcaggtcgtggttgctcatccagcttggaacataccagaagctcacaaattttccctctcaaaaagtataagagatcatgtgcaaattacactactaaagagacaaatactactcctttttaaaagaacttgaatttaagtacttctctgtttttgaacaggggatgtttacgccattcaagaagcttgcaaagctacaaatgaaagtggaaggtctcctattttcactggagtcatggcttttgtaatgggtgtagtcaccatgattagagtgactaaaaacgttccaaggaagctaaccgagtcaactatatactctagcccggtttactgcgacgaaaactcgatgaacaagagctcgatgcatgggaagaaaatggcaacaacaaccatctcaggggaagatttcatggcggtcatgaaacgaatggctgagcttgagcagaaagtcacaaacttgagtgcacagccagcaactatgcctcctgaaaaggaagagatgcttaatgctgccattagccgagccgatttcttggaacaagaacttgctgcaaccaagaaggtaacacaaaacaaaaaaaactttcatatatattactgatttgttctcagctttcactatctcacactaaagagttgttgtatcttcacaggctcttgatgattctcttacccgacaagaggaccttgtggcatacgttgagagaaagaagaagaagaagaagctggtccgctttcaaatcaatgcctacttaactaatttttgttttggtgtttaaaatggtgttctgttttactttttatctccatgtgcagttcacttggtaagtgaggaacatgaggaagaagaagcctctagtggagttagaggtggccaatgcactcatgtcattaacttaaatcttacagtcacattaaaattaagagaatctccaaagaaagaattttgttatgtctctgtatatatatatcatccttagatgttaccacttatccgcatcatatgcgagatcatgtttgatttgtacaaaagaaaacaatgaatttataagaaatatattttgtaaagtagttttgtacaaaagattagtgtgcaaacatttttaacatcaacgtataaaattcaagtacactttatataaactaaattactagggttgaagatgaattggggcttgatggtttggagagacagaatcttcgaagatctatggagaaactcaaagttgattgataatctgcgttcgtcaactgataggtttactcaaccatttgccactcaaattagttatgtcatcatctgatgttaaatccatcagccacacttatcctttttttaatctaatcctcaaacctctccgaaagagacagaaggtcttcaaaccaagagtggttttgtagttgaccactttttgaggcttttaagttaggtttaactacacccagtggaaacttcggttcggacaacaacaagaagttgctcccaatctacgtttaccacgtgtcactttttcagtccacccacgtgcttagccggttacttgatccatttaaatcctcaatttctgtattcgtgtacgtatattataccaagacaaattctacttaataaatatcttactcaatctttttaattaattacaaaaattcctatgcattatttttttctaattaccaaatatagtaataacaatcctgatttgtatgcaaaaaaaaaacatgaagagtccattaaactttagagattttttaattaaagatagtttgtaactgaagttttgttacacaaaaaatatctaatctaaaaagaatgtcgttttcgtaattagaagactttgtaatttgtttttttcctaaaaaacgaaaagaagtaaccaaagcttcttcatcaaccaacgtattttgcttcctttcttcttcttcttcttcctcttcccctaacattccattccccgtatgggtctcaccacttcctaactcttctctctcttatctcttcttgttttagctatgaagaagcaatctcaattcagatccaatcatacccttctcttctttcatctctgatcattaacaacaacaacaacgactcgggttctgtaaattcagttattgggtatgttcgatctcttgttctgtttcttctctttattcatttagcttgttttaactcttaatttttgagttttgattatgattaatcaagagttatcatattaaaaagagaatttttataaccaaagtttgcttttttcttatggagtagtaagattgatagctaagtaaaggaaacgatattaaaaagagaatttttcttagttgaatttcactttttggagacgtaaaggagaaaaaagcttcaatgattcataaatcgaaaattctctataaacccttttccaaaatcttaccaatttaggggaaaaatactgaaagttttggtttttgcagagagaaaatggcgatgttagttgagccaccaaatgggattaagcaacaagggaaacattactactccatgtggcaaacattgttcgaaatcgatacaaagtatgttccgattaaacccattggaagaggagcttatggtgtggtttgttcttctatcaatcgtgagactaatgagagagttgctattaaaaagattcacaatgtgtttgagaatcgtgttgatgctttgagaacgttgagggaacttaaacttcttaggcatgtgaggcatgagaatgtgatcgcgcttaaagatgttatgttgcctgctaatagatccagtttcaaggatgtttatttggtttatgagctaatggatactgatcttcatcagattattaaatcctctcagtctctttctgatgatcactgcaagtacttcttgtttcaggtaactttaagtccttcctcggtaactctatgtttcgagttttgtatgtttagttattgaaataagtcttgttcttgttgttgtgtttagttgcttagagggttgaagtatcttcattctgcaaacatacttcaccgggatttgaagcccgggaacctcttagttaatgcgaactgcgatctcaagatttgtgatttcgggttggcgagaacgagccaaggtaatgaacagttcatgactgagtatgtggttacacgttggtacagagcacctgagcttcttctttgttgtgataactatggaacctccattgatgtatggtcggttggttgcatattcgcggagattcttggtaggaaaccgatttttccaggaacagaatgcttgaatcagcttaagctaatcatcaacgttgttggtagccaacaagaatctgatattcggttcatagacaacccgaaagctcgaaggtttataaagtctcttccgtactcaagaggaactcatctctccaatctttatccacaagccaatcctctagctatagatttgttacagaggatgcttgtgtttgatccaaccaagagaatctctgtaaccgatgcgctcttacacccgtatatggcggggttgtttgatcctggatccaatccgcctgcacatgtcccaatctctctggacatagatgaaaacatggaggaaccagtgataagagagatgatgtggaatgagatgctttattaccaccctgaagctgaaatctcaaatgcctaaatcaacatcaatgatcattaagagtaagctttttccagttttttttttttttgctttctaaaatgcagctttgatgttatgttatatatagcgagtccacaaacgcgggaacagatcgataaaaagcccggtgctttgatctcgtctggtttgatttagttgcagtgagtgagtagtagtaacagagtttgaaaagtggctctcagtatctttaccactttgtaaatgtgactgtttgttactaagtaagttaaggcttgtttttgttacattatctttgagttgatgagttttactactgattttcaggccaactcttgtattttgtatagctttgccattgcccacttgctagccacacgaaataattttttatagtttagatactctcatactataaagtataaactaataaaagtatagatgttattttctctagtttttatcctacctttaaaaagccgccaaacatgttttcaattcattataagggaagattggataatgtgtcacttcatatttttcgttctttttagtactaccaaaacaatttcagaatatattagtaatcttataaataatgatctaaggaagtgtgctatttttttcagttccaatatgaagactagtgtgttttaaaaatactttattttataagtgtatttatttcaaaggtgaattagctaaataaccaattcctgaaaagaaattaaatatctagcaccataagttgccgaattcagagagtaacacatgaggtgtgtgtaatgacaacacactctttcaccacacactccttcacccaactctttcattcatgtttaaggcgcgtgaagaaaacagaagtgtagtgaattatgctgacgtggtcttttaaggaacaataaaagtttaagttatgttgagaagagaaaagagaaatatgattaaaatatgttcaccctttttaatattgtttactatattatgttaacaatattaattggttaaattaataatactattaaaaaaacagattttttttgtgtatctaatatgatttgaattttaaaaatcggatacgaatttcttaaaaaatgaatagtgataccaaattctatacatatcatcatagaaaaatagaatagtactccctatgttcctttttgtttgattttttagaaaaaaaaattgtttctaaaagattgattttttaggttttcaatgcaatagttattagttataattgagaaattgtaaacttcaatacaaattattgaatataattggtttagagttattgaaaattgtaaatcccaaagaacaatacatttaaaagcaacatttaatatgttttattaatatttgtgttttttctaaaaaatcaaacaaaaaggaacagagggagtatatatttgttcaaaccaaaactttgattccgatgaatccaaataatcaattaaatattttttgatggaaggatactaaaccctaagataatatatagggaacccaagggttttaatctaaaataatgattaaatcacttaacatccttaatcaaaacaaacaattcgttttaaaacgtatatagtacaatgtatacgtaaatagtatattcacaaaatagaaaagtatctctcaaaaatcttccaaaatcaaaatcgatttattggctatttccctttagaatttccaacatcgtaaaccctttatcgcttctagatctaagaaatccataacatgattgtcaatttgttattcataattctcaattttattttccatggatttacaaattaaaattctcatatgaactttgatgggaaagtgaagattaatttgacataattggcgaaaagatttccccggatttttctagtattctctggctgacgaagaataaatatagtcagagtattattgcgctaatggtgttgttataaaatagagtaaatcagatttgagtgatcctatcgacatttaagattgatccatatataattttgacttttgttcagttgatggtgatgtatgtaaagattcgtaagaaaagggagagagagatgaaagaagcacacttcataaaagagaagaaaatttattcactaggatgtcttttgaagaagaaagaagaaggagagcgagatgtacaaacacagtaagagaagggagagagagatgaaatgagcacacttgataaaagagaagaagatttattcaataggatgtcttttgaagaagaaagaagaaggagagcgtgatgtacaaacagaagatagtattgtcaatattacatatattatacataatatctctttctattgttcgaagtgttagtttatcaattaaaatatttttgttggttatatttgctaattccccttatctcaattctaataaataaatgataaaaatattcttacaaatttgtcttttaggtgaaaaaattgaatacaattcaaaaaagaaaaataaattgagaagccaacaaaaaggaaaaaaacacagcatacactaaaaagaaaaaaaacgaatggattgagaagatatagggctgacctaaactttaagagggccccaagcacaactcaaattttgtggcccatgagcttagaaaatatatatcttatacaaaaaaaatagacaaaatgaaatcaacgacataaaaaaaaaaacaaggaaatctagcccacctggttagaacagtaaactcatttttgagcaatgtgctgctgagtttgaaggcaacattaatttgtggccacatcaataaatatatgcttgaaaactccaactccaacccctagtttctatatttggctcatgttcaggtcataaaatttagtcaatatactatttttcttttttaaatgtgtataccaatttataattcttatatattcatcaaatttctttaataaatgtaatcaatttgttaaaaagttcaatatattttttttaacatatagatttattgtttattacaaataatgaaaacaattacatagaatattctataacggacaattccttcttatcctaattagatctacgacaaacgatactttcttctttatatttaaggctcggcatatgggtaacttgttcatgttcatgttaaatggataatagatttactacccaataaggaattgtaaatattcggttccagttcggtttgagtatattcgggtttgggtcagtctggataataattttgagaaccggtaaatacccaaaaatttaaattctctttgtttcgtgtctgaatgggtaaaaattactcataaacccaaaatgtatctccaatacccgaacttttaaactaatttacatgcacaaaacaaccaaaagaaaagaatgaaacttcaaacttgacatccaaatccaatccaaagtcacagagattaatacttagaattaagagtagagaaattagaatatgaataagaaaacataaagattgtccgaaaatcaaaaacatagaattagaacggtaagctagtgtgaaccctatcaatgtataagactatatattaatataccgtatatatacacatgtcttgtatcaggtttatgggtaccgatgtggtaatgggtaatcttcgaaccggaccgatacccacaggtttaccaacactctatccaatgaagtattttcttgaaaccctaacccgtccttaacctctttttttggtctgggtattggtttgggtcgaatccgatttattttttcatgcctatttatgtttttgatggacaccttcaatgatctacgacctgatgatacttccctttcagcataaaatctcgtgaacgactataattgtacatcacaggagatttcatatacacttttctcaattaatctgtaaatatgttaataaatcgtagtatttgggacaccaaccttaaacctcttaatatagaaatattagttaacgtttggtcaaccaatagattcttgtttaaatgtttgattgcatgtataatttttttgtaattcttttattttttttaattttcaacattgacctagtttcttatacatggaattataaatttttgtgaaaagaatgacaaaggaataaaattcatgttccaaataaggagtttttcctcttacaatcaactaatttgaaggtttaaaaatttattgatgaaaaaaacgagtgtttttttttcttgaacgccaaaagtttcgattgttatacaacattttatatatatatatatttaattctttaattagagtataaaaaatgtttttgaatattagatagtagagagaagtggcaataaattattttcaaatccattttgattcattgattgaaaatgaaattaaaaataaatagaaaggatgatgggaatgatttttctttttcaaaaaatcaactaatcaataagtgatatatatatatatagaatcagccaaacataatacaaatttgatttagacattcaaatctagtaattaaaccgcttggtgttcaaaacctagtttttcaaaaagaaaaagaaaaaaagaattagagtaatgaaatgtatttaacaaaattcaattacaaaaataaaattaattttcttccacacacacatatcacatatgacataacaaaatcatttgacaacaaccgtgtgattttttttactttttaaagatgcagagaatcaaatcacttttaacagaagcacatgacctgtaatcttttacaaaatcttcttgaacagaagtaaaataaagctttatttttgcttctttgaaggctttgcttagtggtgaagtagtacacaatagtagctctttctcgattttatggtgttattgtatttaattattcgcatattaaactaatgccgaccaaaacaaagaagaaactactaaatcactaagattatttgaaacaatacaactattaacttcaagactcttggttctttatttaaaaagcgaatgtttttaggtatgcagcttataatagaccgtcttcaaaatgaatcactataaattaattttcgagtatgctcatctgccccaaagaaagaaagtaaaggagtatgccctatcgatatttatgctaagcttaataatttcacttgtaagaatataagttttcattttggttggagacaaacaaaataaataaataaagctttcgaagtaattattaatgtgccgaaaatgctgacttataagtcatttataaattaatcaactcaataatcatagacaagtgacctcattgatatgcccattacatgtttaaacttttacaaagaggttcaatgaatataaaacaaatcgttgtttgggaatattcctcatcaattacatcattgagatatttatatattaatacctcacattaaagtgagattaaattctatttgacatctcattttttaccaattttaaattaattaagaaattaattttcttaaaaaaggaatggtccaatttaaggtctgacctatgggctgtggttgcatgcagtgactttacttttttaattttattttaacagttacttttttcctcatatttccactattcgcttctctttctcaaagttggaagctaacaatttgtgactcattacgcagcccattttttgtagactttttataaaaccttgtctaatactattatacaagagtcaagactaatttttgtgaataaatatattgactctcaggtaaaattaggtatgtattctgttgtaagcgttttaaatgttcaatcacttaaaacgataaaaatctaggagaaattttctctttttatttttggtattcaagtattttcttctgaagttatcgcatccgtgaacagtactagaaatctacattataatgttgcttaatgcctatatattactattaacatgaccatacatgcagattttaattatatctaatttgcaaagtggatatgctagtggtactttcacaaatcttaacaaagaattgaaccattcgaacattaaacaaaatgttttaaaggagtgttatgccatattttgatggccccttccgacctaactttgcattgtcttaactttattatcatgaaaacctagttagtatatttttccattgttaaaacttgatacgtaaaccgggacgtcattcattaaagcaaaacacttaaaacttgaatatataacaataatacaatttctgacaaagaaagattccccgaatacatggtggagaattaaattgtgggaaatattttaaaaccgtacttttctttaaataccagaaaatatttacaaagccttttttaaagaaattttatttaaaaaagattgtgatggttttttggaaaataaaaattatattctataattttcgtcttaaattaataaatttactaatttgtatatcttttttttataatgtattttacatatctttctaaataaacttatgtttgagtgattttacctaacactaatggccaattagaaattagtcgtcatttcatcatcgattagggactgattttgatagattatcaatattttatacaattaaaaaatggctatgaagttccagaagagatgagctatatggacccatgtgcttattgtcccctgcatctgcttagaggttaagtgttaatcacctttatttatatatgtttaatacttaattatttttctttcgccaatctcataattaattaggtttaaattaaaactggaactttgacgtgtattaagagccgctcattgagaacatggattgtgcaatgcacgtggtttcgtacggtgcagatctacaaaagagattctgcgtcaaagacggtgtcgtgcactgttgttgtctaaattttgtaggcggtgaaattatgaaagttgtctactaacggtaactaaattaactaccaacggtaaataaattttgtctcaggtgaagggaaattattaaatttgtctagcctttttacccgctataagttactattcagcgtgggacgaaaaaaaaaaaaattactactcagcgtggtgtgccgacataaaaataattactcgtgtaaaagaaaataaaaactatgaaatacttgaagtcgtactattaaattataatttccttggttaatatcatcgctgtatcaaaatttagatttaaaatatgatcaatgatataatttaaaatatatatataacgtatgataaaacgatcaacttacattgttaagtgtttctagagcattttaaaaacatattctataatttcatatataacattttgttcataaaacttaggtaaatttgatctcgaatctttaaaacaaccaaaatattgtccacaaaaattcggtgtaatattgaaggttgttgttgttcatgttcttgattacttttcaattctctacatttttacatattgtttcatttagaaaaggagttggttgaattgtggtttatcacttaatttttattatttatatgtaatttatttttaatataaggttttattaattaatttgcctgtagtattgttttaatgtatgtttatagttattcatcaaacaattgtgatcaatataaagattatccgaccgttagactcgtcacaggaaatttttctgaagttgaatttcaaaagctcaaacaattaaaacgcgtaatgataagtgttgtaaaatgttatagaattaaatttaaaattgtaaacaaaaagatatacaaataaagaaatgatgttgatgatgatagtgctttattttcttatattttttgtgtgtctttaccaataagaaaagaataatccatttttatagatatgaaaatttagtaaatcaattgaaattattacaaatgatgtagtgtagttattttgaaaatggagtaaacattatctgtagaatatgaattaatgatacgtgttacatgtattagacattcattggatttgtaacaatttataaataattagaaacatacttcagatttatctcttataactatattataactttttctaacaatttgtgacagttttcgtttcattttagttcttaccttcagtaagatcagcttttattttgtgttaaacaaattcaacaactcgtacaaacactttatgagacttttcaataattaagacgaacaacaatgatctagtacacacaaattagatactaacatttttagttcgaaatcatttactaaattcaaaattttgatatcaatcacatggctcgaaattactgtattagattgaaatatcagagcacatatcaatcccacaaatcctcatgaatttacttaatccacatactttaaattttatttttaaatattctatattttcttaaaatgttggctgaaataatgttttacaaaattttatttcgttggaaaattattaaatttatcaccttcctatttgatatcacttttaattcaccaattgtatgtatcaaaatattcaaagccattgactgaattaatggcaacaaaaattatcaaagattttctgtaattcctacattgactacatgcaattttcaagacattgactattttcaatagttttcactctttttaatcttgatatctggtcaacttttaccacctacctatttgtctatcctactacatatcattaatcacaccattaaaccacacaaatctatacttaccattaatatttttcttttgaataccaaaaaaacaatcaaaaagtaaagtgtcattaccaaaaaaataaaaaagcaacatccacctactgacctacatattttttttaataaaattataatgaatcattttgttagtaaaaaataaaaatgataaaacaatgggcgcgtaaacgattccagctttccccaccatccattatttcccaaaaaatcaaaataaattaaaaagacacaagtggatgcttgagatttggtttctatataatccataacacacccttcatcaaaaacctctttcccattcactcatcttctcttccttatctccttaaaaatcttctgctgttttcttttttatatttagagctcctctgtttcttctccaataaccaaaaaaaaaaaaaaactcttcctctgtttgttttcaagttctgacatcataaattcagaccgagaaaacataaaaatttgagtcttttgatgatcggaaactgatgactcccgttctctgcgaaatcctgctctctgggctcacggtcaaatctgctctctgccgtagaacccatctcgttcaatctttctccgtcgtcttcctctactggttttacaacgtttcatgaattgctacaaactctaattaattttttcagacagatcataaaaaaaaaccaaacataaaacataaaactctgtcctttttttgtcttcttgtaacttttcttgttaaaaatcaatggcgtcatctagcagcacataccggagctcaagctcttccgacggtggtaataataacccgtcggactccgtcgtcaccgtcgacgaacgaaaacgtaaaagaatgttatcgaacagagaatctgcacgtaggtcaaggatgcgtaaacagaaacacgttgatgatctaacggctcagatcaatcagctatcaaacgacaaccgtcagatcttgaacagcctcaccgtaacatctcagctttacatgaagatccaagccgagaactctgttctcaccgctcagatggaggagcttagcaccagactccaatctctcaacgagatcgttgatcttgttcaatccaacggtgcaggatttggtgttgaccagatcgacggctgtggttttgatgatcgtacggttgggatcgacggatattacgatgatatgaatatgatgagtaatgttaatcattggggtggttcggtttacactaaccaacccattatggctaatgatatcaatatgtattgattaataaaattaattaaaataattagatgccccttttttgtctttttattttaaaatttagcccattttggtgtttttgggttggtgtgatgatgtaattatagtacatgcatctttgattggttggaaggataaatataaactttatatatatattggggcatatatatatgagttgtactttgtcatgtattggtgtgtgttttgttataattatatgattatatatgtttatgttatcatgattttgtctttcaccttaatattccaattgtttattcggataatggtttgtttatgcttcgagaaaagcaactttttggattggtaatttttaagaatgaaaaaaatcacattttggattgatgattatatatatatatatatataagctgcatttacaattaagttttggtttttctgcaaataacaataaaaaggaacttctagataacatgtcaaatctaccaagtcaaatttcacctgtaatataattcgttgtcagcaacgtaagtgctaaataatgatcaattatataacaaatagagttccttgcgactaggagaaatttatcataatgtatgtgaaaaataaaagatcttcaaacatatatatgatgcttatatgtttagagggttttgttgcaagaacccatcattttaatataagattatggtttttttagttaaaacacagatgagcaaatcttaggtgtatgataattatttagaaatgtattaaaaccttcgtcagtcaaacatttttgcttaaaagtatcattcatacaaaaggacataaatttaaaattcaatgatttttcctttttttcaaatgtaataacaccagtgataaagtttattgtacgaacgcaaaacgttcatattaatgatggtatcttgaagatttatttgtatttattacatatgtggccaagaaaacatataacgtcaatttagttttattgcttttgcatttatcttttctaagaatctctatgaatatattgtattatagatatatattgtgtatattatataatctatatttttttttttaatattagatgtttcagggtcagggcatatgaacgtaatctattcttttttttaagaaagcaaactttttccaacacgaatttaatccgtgacttcaaacatttccatatttacggtacacttgtattattgtgagtgaatatggtttatgtttatcctttatctttttgaatcttattatatataaaaaggttggtgttgtgtctttacgattttaatcttaactttatgttatatgaagacatatatgaaaacgatatataaacaccaacaaaataaaaataatcattattggatgtcctattctcttctcgtatatgtgaagctttacacttgctgaaaattattggctgtttcttctgatttgttcaatatatatatatatatatatatatatatatatatataaatgatctcatcacaaacgatgggctattatttttcgtatatgacatgagacaattattaggtatgcctatatatgaatgagcacttttgtttgtttgcctgtgttaaagatccagaagagtgtactgatgggtacacatgtgattcataagcatttcgcatttttcacctcaatacacataaataaaacacttttgtacgcctttttgaaataagataacttttatggaacaaaacaaaatgtaataaagcaacaaacaaggattatggataaatgacacatacagtgttgtatcttcgataatattaagttctacaccatgccgtggatagtccatgatttaataccgttttgtcgatatattagggatgacttacacacgtaaaatcaaagagtgatatgttaaggatgagcacatgtaacattgaagagcctatgagttttattagagagcgttcacaatgaattttagtgtttgagctagttattgattcattctaaagataattagtttttgaggatgttaaagatgaacacataaaatcggagcgactatgagccttggagagctcacttagggttgtattgtttgagacagagttattttttgtctaaatatactaagaatttttgttgtttccattttggttcatcactatctaagtctatttagcccatattgttctaaggaacaatagacttagatagtgatgaatcaaaatggaaacaacaaaaattaatgaagtttagacaaaaaataatgtattaatatattcataattatgctttattcagcccatattgttctaagcttaatgaagtttggcccacttagttattgtttgtacacttcttatagaggctggctcaagttatttttgggcattgtgcccactgcccatttaaagaaaattctgaaaactgttcataatataaaatcataggaaacactacaactataaatatgtacttaaccctaagatacttctgatgagagcaataacattgtcgttcaattttatatcaatcctcactcgatcatggtatatcagagttataattatctaacaatcggttacattcctgtttttaagccatgtacttctactttttatatttgttttaacccaattgcttccaatattcaagttcatcataacctctgaattaagccaaagtacttccataattcaagtctataatatacctcgcaatcaacccaaattgcttctaaaatcaagctaaaatgtttttttatgcaataaaaaacaaatctcatgttttcttaagctgtatacatttattatgtcttcagagcttatatgcttctttaaagtttttgtttattaaaaaacagattttcttcaaaatatatttggttttagttttatctaagaaatacaagaaaagaaagaaaacagccttcggtttgttcttctcgacagaagatcaagcattctccatggcttcaaccatgcgctcatgcagcctctatttttcccttttacttcttcatcatacgaaacatcttgattgaatttagttctagtaaataatgttaagttttttttttcttttctactaaataaaaactcatgatgaggcataatctatatactttgcaagaaatgctttcatattagtgttttattcatccataaaaaaactatttaagttgaaataataataaatattagtatcatataggagtataacttatatatcagagaaccatttattaaacttgtcttaattatgtccttaagattgtacacatgacatggctctgcaaaacataactcagttcaagtatcccttgggatgacatgcgttttcggggttttgtttctcgatcattaattagtttctagaaagagagacgacgtcaagagtcaaaaccaaatgaaagtaggaaccacacacgcgttgaaatgttcatagttttcttcacctttgatattcgctttttacctgcatatccatgttttatgatagaagacaaaaacccttttgcttttttattgtttataagtcaacaaacgaataacattttgagggatattatttgtttttccttttgtcaagagagcagttagaaactgttcatactctttgtcccttttagttaattttttatcacaacaaaggaagacttgtgaaaccttgactacttacttactaaaccacgaccaagtaaaacattgttttttttttgtaactatataaagctttctttataatagttaggtttaaatctgaagtgtcaagaattttaaaaaacgcgtgcgtgctttgtgaccgaatcatcatttatgtttctctatgatttaatttcaaaatggtgcgggtttatagtctaatagcagtatttgtttatagataaatagcatttatttatttctttttactctaattaaattctttggttctttctttcctttctatttggttgtgacatttacatttcatatcaatacattgtatctcccttgttatttagctttcaactaataagaaaactcttcttaaagaaatctgactagttaacgtgatcaattatacgttctatattgtcgatcggtaagagttccatatattcactcgtttcaaacaaagttatatatcaaaaccggcagtaaaactaaattttaaaactgtcaagatccgaacaatcttaccatttgttgtgtacaataaaaacttatgactgaaaatgcatgaaaataatctattaaaaaccaaataaaaattcaaaatcctagttttcaaactaaattgttaactgttaatagatcaccattaattcgtcacaaagttcaccttaaccttttaatcactacttttaacttttggttctatgttggctctatcaaaataaattttagttttaactttataaaaataactagaaactagtataataaccaaaaatggcggtgaaatagtcaaacaattcatgcaagcttgggacatttggataccaaacccaagatttagtctctttgatttcaaaccattttttcaatacattgtcattttttaatatatctcttaattgattaaaccccaatcaagttaccaactctattgccttgctttttcctcttcatgacgctataatccacgaaccctctggcctatatatactttcgattcttcttctaatccttcatatctcctaccatcacaaagtcatctccttcttctttcttgatctagctagcggaaaatttgacaatggcaagaatcggaagctttctcattattctttacctcatttacgctcttactctctgcatctgcgacgacgacgagagtaactatggcggcgacaaagggaacctcttcccaggtttctacagaagctcgtgccctagagccgaggagatcgtgaggtcagttgtagccaaagctgttgcaagggagactcgtatggctgcttctctcatgaggctccatttccacgattgtttcgttcaggtactagagaggttttttttaaggaacttgctcaataagtttagtgttgagacacatcattaattaattttatctgttcgaatgaaaatgtgtagggttgtgatggatcgttgcttctagacaccagtgggagtatagttactgagaagaactctaacccgaacagcagatcggctcgcgggtttgaagttgttgacgagatcaaggcagcattagagaacgaatgccctaacactgtttcttgtgctgatgccttaactctagccgctagagactcctctgttcttgtaagtcgctttctttctctgtctctctctattgcttctttaagttctcaacatctaatttggttcggtttgtgtgtagactggtggaccaagctggatggttcctttgggaagaagagattcgacaagtgcaagcttgagtggatcaaacaacaacattcctgcacccaacaacactttcaacacaattgtcacgagatttaacaaccaaggtctcgatctcaccgacgttgttgctctctccggtaagcttacttaacacacaaggaagaaatttacttgcttctaaagctaagttgaaccttaataacgggtttatcataatttgacctcaatttttcagggagccacaccattggattttcaagatgcactagtttcagacagagactgtacaaccaatccggaaacggaagtcccgacagaaccttagagcaatcctacgctgctaacttgcgccaaaggtgccctagatcgggtggggaccagaacctgtcagagcttgacatcaacagcgctggaagatttgataacagctacttcaagaacttgatcgagaacatgggactgttgaattccgacgaggtcttgttctctagcaatgagcaatcaagagagctcgtcaagaagtatgcagaggatcaagaagagttcttcgagcagttcgcggagtcgatgatcaagatggggaatatctctcccttgacaggttcgagtggtgagatcagaaagaattgcaggaaaattaataactcttgatttcctagtatcggatgggagaaatagaaatgtgacatgttttggaggaaggaatttatgtttatgtttttttttatattgtatgagtctgtatttctttgtgtcaagaatttgaattttgtaagtttaaatgattgaaactatctataattaaaatgttattacagttacgtttgtttaaggccttatggaaactctataggtcatgaaagtcgaccagaaataacgagatatgaaaacaaaataaaataacatcatggaaaatcttaaaaaatgtagtgtctaaatatttgatatcctaactataatcttttaaaataattaggtttgaaggaaattggccgaacatattctcaccttcttttttgcatttttcttttctaaatatgtcgacgaaattttgaaaaaaaaaaatatgcatctcgacgaattcattgtccagttgtatatgtgagtgaataaggcatatgtttatctattagttttatccttttcctctttgaatcctattatagaaatccaaagttggtctgtgtctacacgatttcaatgatgacatataggggcatgcttgcttctccacatttagttattccatgcatatattatacacgatgtgatgtatttttgaagatattccatgcatcgttcaagttataaataatatatatatatgactgatcgagaaaacaaaaaatcgtttgtaatatgttagcttaacatagccatgacttaatctactgtttagtaaatatgttaagctttaaaattttcatagtagaatacttgtggttgtacttgcctagtagcaaacacgatgttttaaacgccaaaattctatgtaccgtacaaggcatagttcacagtatatttctctacatatattttaagatcttttgttgtgtcgattttggttatagaacatgtcaaaactcatatttgtggctaagcctataggttcaattacttatatgttggagtgcgaatatgttaactacacagaatttgttaaaggagatagcttttatgtacatcttagggacctagtttagaattcattcactacaaaaggccgcaaattgctataggacattcactattcttctctagaattacaatgaatgttattgaaatagtaacaacctcccacaaccaaactaccaatcttgcatcatttttggtggagcgacgccacaccttgtgtacatctctcgagaatacatttaagcttgtaagtcttcatgaaacagttttttgaaatttataaaaattgctcaaccctaaaccttacaattgacaattttcttattccacaccaattggaatttcctattctactaaaaataaatattgacaaatttcttttttgtttatggacaagaaaactttgtcttcacattctcatcttgaatatactattcaagatgtatatccaactcaacagacgcatcttctcttgtctaaatcggccctaaacttctgaagaaaccaaatttagattagaaatttgtctacgaatgaattatcaaattatagaaaagaacatacgaatgatttcaatcatctactacaattttagtattaattaatcataaaataatcactaaaattacttactttagatatatgtcgctgagtgccttaaaattgagaagaaaccaacaaagaaaataatttataaaatttagttaacgaatgaaaaaagtaggtcaatgtactcaatgatgcctcttctttccgtcggttattatttttgtcttaggactgagacatattttttatgagcttttctgtttaattgttttgggctgaaatattattttcgttttaattgagttgggttggacattaggatagggcaattcattttctattctaatggcccaaaatatataatcagtaaatgaattcaatgtgtaattttgtttttcctgaaaaagaatgtcggacacgtgcccaaccccctctagacgtgggtccgcccctacttgcaacttaacaacttttaatgctcataatgtaatcagtaaacattggtaaatttaaacaggaaaaatatactaaaaagaatccatatattttttattggacgtttagtacgccaaatattttagttggaaaaaatatcccatttaaaatatatataattaaaaaaattcatctttgaattatggatagatttgagcctacgacttaatagccattaacaggcattacaaaatcactgaacgatgttaaatgtttacttcatgtgttgatatatatatatatatatatatatatataatctttattcaaaatttacaaatgtattagcgttgtctggtggtaataaatggattatttaaaccttttaatcaccatctatttgttacaaagtttattttaatctttttaatcactactacttctaacttttggttctatttttgctctttcaaacaaaaaaattagttttaaccgtaaaaagttaaaaacatatatctttttccgaccaaacaattttttatttttttttgaatatttgaaggttctgggacaaagcccgtaatcctaccagacctgaaatcataacatataatattagtttcgttccaaacgtcactcgaaccaacgatatctaaactttgcatcgaatattaattgagctaataacacttggtcaaacaactttataaaaaccattaaaccagcaatgtaaccgaaatgacggtaaaatagtcaaacaactcgtgcaactttgcgacatttggataccaaaccccaagatttagtccttttgaattcaagccattttttcaataacaattcttcaaaataccacacttttaaattttgttgtcaggaatactactattaatttaatgttccaaaaatactatcaaaatattttgtttttcaaaaatatcacaacatcaaaaattgatgttcaaagattcaaaatattgtttttaggtttgggttacctattttagatttagagtattttttttaagggttaaaattttgtgtttatagtttaagggccttagttttgaatactgaaagtttaatttagttttgtggtatctttggaaaactaaaatgtaattgatatttttataattattaaactctctaaatattaaactaatagtggtaattttaaaaaccaaaatttaaatccacgatctctctgtatttttaaaaattattgtcatttttaatttatatcttcttaattgattaattccaatcaaggtaccaagtctattgcctttgtttgttcctcttcatgacgccaaactctctgtatataaattgatttatatctacttaattgattaattccaatcaaggtaccaagtcgattcttcttctcttatcatcacaaagtcatctcctttcttatttcttgatctagctagcgacaattgaaaatggcaagaatcgggagctttctcattcttctgtctctcacttacgctcttactctctgcatctgtgacaacgcgagtaactttggcggcaacaaaaggaacctcttcccagatttctacaggagctcgtgccctagagcggaggagatcgtgaggtccgttgtagccaaggcatttgaaagggagactcgtatggctgcttctctcatgaggctccatttccacgattgtttcgttcaggtactagagagtcatttttagaacttgctcaacaagctaattactaatgctgagaatcatcattaatcttatctatttaaatgaaaatgtgtagggttgtgatggatcgttgcttctagacaccagtgggagtatagttactgagaagaactctaaccctaacagcagatcggctcgcgggtttgaagttgttgacgagatcaaggcagcattagagaatgaatgccctaacactgtctcttgtgctgacgccttaactctagctgctagagactcctctgttcttgtaagtcgctttctttctcttgctctctcttttacttctttgagttgtcaagattcaatttcgtttggttttgtgtagacaggtgggccaagctggacggttcctttgggaagaagagattcggcaactgcaagccgggctaaaccaaacaaagaccttcctgaacccgacaacttgttcgacacaattttcttgagatttagcaatgaaggtctcaatctgactgacctcgttgctctatccggtaagcttacttcacacacaaggaagattttgactttacttgctttggaagctaacgttaaaccttacaaaatggtcgtgtcatacgttctgaccgaaaaaaatttcagggagccacaccattggattctcaagatgcactagtttcagacagagactttacaatcaatccggaagcggaagtcccgacacaaccttagagaaatcctacgctgctatcttgcgccaaaggtgccctagatcgggtggggaccagaacctttccgagcttgacatcaacagtgctggaagatttgataacagctactttaagaacttgattgagaacatgggactgttgaattccgaccaagtcttgttctctagcaacgaacaatcgagagagctcgtgaagaagtatgcagaggatcaagaagagttcttcgagcaattcgcggaatcgatgatcaagatggggaagatctctcccttgacaggttcgagtggtgagatcagaaagaaatgcaggaaaattaataactcctgataacgtaatattgaatgggcgaaatagaaatgagacttattttggtcttttggaagaatgatgataacttatgtttgtggtttttttttcttgtttctttaagttaagaatttgaagttgtgagttcaaaaatgattaaaactctatatacttaaaaggttattgctataattacgtttgttaaacacctaataaaaattctatagatcattaattagactagcgtaaaatggtcatgaaaactgaatagaagaaatataagtactagcctaaaaatataagaaattaaactagggcaaaaatttatgtttgatatttatttcttattttgtatgagtctgtaattccttatgtcaagaatttgaaattgtgagttcaaaatgattaaaactctatatacttaaaagtttatttctatgattacgcttgttaaaggtccaatgaaaactctataggccattaattagactagcgcaaatggtcatgaaatctgaatagaagaaatataaggactagcgcaaaaatataagaaattaaagtagcgcaaaaatttatggttgtgttttttttttcttattttgtatgaatctatatttctttatgtcaataatttgaatttttgaattcaaaaatgattaaaactctatatacttaaaaggttatttctttaattacgtttgttaaaaatccaatgaaaactctatatgccattaattagactagcggaaaatagtcatgaaatctgaatagaataaatataaagactagcgcaaaaatataagaaattagactagcacacacatttttatgttttttttttttttttttcatattttgtatgaatctgtatttccttatgtcaagaatttgaatttgcaagttcaaaaatgattaaaactctaaatacttaaaaagttacttctatatttacgtttgttaaatgcccaatgaaaactctataggccattaattagactagcgcaaaatggtcataaaacagtatagaaaaactataaggactagcgcaaaaatataagaaattagactagcgcaaacatttgttttgtgtttttttttctagttttgtatgagtctatgtgtttcctgatgtgaagaatttgaatttgcgagttcaaaagtgattaaatctctatatatttaaaaggttatttctataattacgtttgttaaagacccaatgaaaactctataggccattaattagatttgcgcaaaattgtcatgaaaactgaatagaagaaatataagaactagcgcaaaaatataagaaattatactagggcaaaaatttatgtttctgggttttttcttattttgtttgagtctgtattttcttatgtcaaaaatttgaagttgtgagtttaaaaaatgattaaaactctatatacttaaaaagttatttctataattacgtttgttaaacgcccaatgaaaactctattgaccattaattagactagagtaagggtgagtgcatctcaggataagccagaaataagaacgagataacggagtatgtttctaagcgagtgtttgcttagtgtgtcattgtccttgtttttccctcctctacaataaatgttttatgaatttgtctcccttaccgggatgaagtgttacaatttcagggtttgttgtctaggctttcgaacatgagattatgtattcacaagattccaaagattggcttagctaatcaaatggagacatgttcttaaattaggacttctaaaagtattactttatagctaggtataaaattacattggcaatctctgccaaagaaatcagctagcctagaaagagttctaaactaattttgtagaactccaagattcttgctacatttctttgttctttggctttctaggctattatttataatccaaaaatcagtaaaggcgtaaaagacgaactgttgtgtttttgtacttgaatgataccagcaacttgacgggcattttatagcaccaaaccttattgatcaaccccttcgctaataatctctcgggctatttacgatcctccacgaattttgtggccgaatccaaaacaaaattccttcctctctttattttcaggaaatcatcgatgttgaaaataatgaatggcatttacggctgtattcaataaatgaatattgatggtacatattcttcccgatcttgagaattataaggaaactagtattctactccgtactacgtacgaaacaaaaaattgaaactaattgcaatgtaatttataacagattattaaaacatttagatctataattttaactgagatataaattttttgcatccaaaaattgaggtagatagagagccgtagagatccaatcataactaaaggggttggaaaataaaaggggatccgtatactatctaaaaatcctggttatttttctgtttttacttttcagataatatttaaaatttatggagttaactaagaaaaaatagttttaaactaacaaattattaacaacagattgcatattttgtgcaacaaataattaacagaaaatgcaaatatttgtatttgttaatcaacaacaaaaattacaatatggttcaaactacaaataatttgtaatttaaaaagcatgagtataacaaaatcacaattaatatgagttaaagaacaaatgaatgaataaaaaaaaactaagcattaacctgaatagaatttccatgaacatttctatagcatctacaagagagaaaaaatgaaagataatagaaagaaaaatcaaatagagaagaagttgaattaattagagttaaataggggataaaattcggttaataaatcatgccctgattttagttttgatagtggagaggttagtaggagcaaattaaggaatataggtttttaaaaactttttctttacagattgaatcgacttgattttttttttttttaaaaactttctctacattacgaacccataatttttggttaataattagttttgttttttcctttttctgtttaatacgatctcaaatttttgttgaattagttatttgaaaattaaattaaaataaaataaaattatatggcatgtttttattggataagagatttatgctttataatataaaagatgtgaaaatctaattacagagttttaagtggatgaaataagtatccaggattaccaggccggtatctattttgatgaactaatagttctgtatttttgttttatattttttgtttgttgtgccgatcattaagttacaacatgaaaaaactattttttaaataagatgaacgcgtaaaaatagacgtaaacgttttgattcgcatgggccaacactagtatattttaattagcattactaagattataaaaaataattgttgagagaaaaactcgaaaacaataagattttttctgattttttttcatttgaaaatgagaaataggaataatactaagaatcgacaaaaaggaataatacttaacatattttttaaacttattatctttggaatataatcttcaacaagagaatatacttagcattttgtgttttctataaaaacacattgatccaatcataaaaattatcatttacaaagcaaaatttattaaaaaattttaaaaacgaaatggagttgagtcacttagcacttgtttgcgctgcgattgcattctcaagcatctttgtcgttagtcaagctggaatcaccagtactcatgcccgagtatcagaaccttctgaagaaatgtcactagaaacatttcctcctcctgccggttataacgctcctgaacaagtaattctcaatttctctttttaaatcactttttacatattatttactagattttaacctgctagactatattgtttaaaaaaaaatcaaattgtaatttgaataattaattaatattattgtataacctgttgtttggtgttgtttgaatgtagaaacctcttctatatatatatatataataattaatgtacaattactttgttttaggatttattatgtggtaatacaggcaaaaaaaattattagtatatataataattttagattttgcaattattttatttagtattaaatttgataatttaatattagtgtaataaaaaaatattgaagctgataaaatatttaaataagatttaaacagtgttattactttgggttgatgataaatattattttttgtatgtttaaatattaataatgttttataacgtttaaatgtttcaataataatattcaaaaattaatatatttttgtctctatacttaatgatatttttaaaaattattactgaaacaaaataactcagtttaatattttttaatatagacaatgttaaaaataatttttagtttaatcataattgtgattgatatgtacttggattttttgcctaattgttttcacgtcatttaatagctaaattgggtagttttgttaacattatttgaaacaataatatcaactgaaaaagtgagattttattaactgaaaatgaatgatttaaaactaaagatcagaatgtaaaatagtttagcttagaaaataactaaaacattttgtttgatttatttagtttcctaaatttagtttagattcttaaagtaattgtttaacttcctaaaaatataataaacatatatggaagatccaaatctctattcatactatatattaactaaatcgataacgttataattaaaggagacattaggggaaattttgttgaatgctaaataattaatttttgatttataaacgaaatattaaatatcagtgattgtaagtactctcaataatttcagtggcaggaattattttataaatatactccaaaatgtatatatagattagatctaactcgtaatacatggtaatttagtagtttagtattacaatgattcattgggaggtagaaaaaaacttaacgctttactcattatacatcgaaaaataccaattcaaacctgccacaccatttttgtctttccctcaagataatttttgtcacttataaatattataagttttttattaagataaaaatataacttatagaactaattgtgtgattaaaatctatatcttatttataaatacaaatagatgttatagatatttaaactttaaaatatttgagctaatcaagatatatttgtattgaaaaaaataatatataaatatatttctagacacttaacttaaatatttgggttaacctattgaatattttcaaaaataattgaaagtgcttacatagaaacattaaaatcgaaattaaagtacaatggtaacgtctactcaatatcatgaatattttaggtcaagccgttagagatatttaatttgccaaaagatgaatatttagagcatttcattgtttgttttaaaaccaaaaatttaaataggtgtatttcttatattttctcacaaatattagtcagcgatttcgttaacaaatcataggatgtcgatttagtaagttcaaattttagaaaaatccttagtcatccgtttgaagaataataaatgttcataaagtttcataaaaaataaatccaattatcgccttgaaggaaatatagattataattcgatttgattttctttgcttttttattattaattttactagtaataagtataagttttcattctgatatcattgtacatagaatttagaatatagaatatagaaacaaaatatatttgttacaatcttttcaaaccacaatttcaaaatggtttatttgaaattaattaataatgttagatttctaaatgaccatttctaaatgaatatagaatttgatttacatctttacttaaataaaatatatctaaacaattaatattaatggtatgtactcgtaaataactttaaattctaggatttattttataaaagtgttataagaatgtatatgtaaatttctttcgtcacttaggacttatgagcttttacctttgctcttttctcaggttcacataacacaaggagataatgcgggtcgagctatgatcatttcgtgggtaatgccattaaatgaggatggttctaacgtcgttacatattggatcgccagtagtgatggtagtgataataaaaatgctatagcgacaacttcgtcctatagatacttcaattacacatctggttatcttcaccacgccaccataaaaaaacttgaggtattataaattaatttgactatttataaagtaatatatatatatatatatttaaacaaggtttgtaagtaaattaatctttgttgtttcttattcagtatgacccctccaaaagtcggtccagatgttccctacacattcggtattataggtatgttgttcacatattcatagtttcaactttacctaattaatattataaacactatagattatattagaaagaaaaaaaagaaattcacaaaatattttgtcaacaatttttttacgaaaaatataattgattttgtctaatatgttacgctaaccaagacatgtaataatttgtgttagtgtttcattatatctgacataatgtaagttgtttacttcagtataacaccataacaattatgcttttctacattgaaaataaaatcagatgccgccgtaggcaaaagtttcttattattttattgaagtggcacggccctacaacagagtcatgcttaggatttttaaaaatatatttagaaagttaaatataatttattattataaccataatatatagtgtaactattttacgattaacaaattacaaagattttgtaaatgttattaacagatattaaagactcgagtcaataagtgctttaatgtttttcgttctattactctcatttattccagaaatgcatatatttttaaacttgtaaaatcaatatgaacgttattatttcacaaatatatactattatgtattaacaaacatgatttgctatatttgattcaaaattaaagatcgtagacgagtgtttcttattttagtgaataggctttgagtttcaagattcaactatgagttaaatattttgaatctaattttagtaactttaacttttttttaaagtgatcttggacaaacttatgcctctaaccagacattgtacaactacatgtcgaatccaaaaggccaagcagtgctttttgtcggagatttgtcctatgctgatgaccatcccaaccacgaccaaagaaaatgggattcatacggccgctttgtggaaccaagcgccgcgtatcagccttggagttgggctgcagggaactacgagatagattacgcccagagcatagtaagatccaatctatatctatttccatacatttttaggttcaatattaaaccatcaaatccgcttgcagagcgagactcaaccctttaagccatacaagaatcgttaccacgttccttacaaagcctcccaaagtacatctccactttggtactcaatcaaacgagcctcgacttacatcatcgtactctcttcttactcagcttatggtaggatctaagcctcccactctactacattttactctatattacaatgttaatgtttttcttttttgacacattactatagacaagtacacaccgcagaactcgtggctccaagatgagctcaagaaagttaaccgatcagagacttcatggctgattgttctggttcacgctccatggtacaacagcaataattatcactatatggaaggtgagagcatgagagttacgttcgagccatggttcgtcgaaaacaaagtcgatatcgtctttgctggtcatgttcatgcctacgagcgatcaaagcgcatatccaacattcattacaatatcactgatggaatgagtactccggtgaaagatcaaaatgctccgatttacattaccattggagatggaggcaacatagaaggaatcgctaacaggtaaacaaaatctttatatatatatatatatatatatatatagtgattttgattaaagcttttgtttgtaaattgtttaactaagattatttatttttcatgcagtttcaccgatccccaaccaagttactcggcgtttagggaggcaagttttggacacgcccttttggaaataaagaacaggactcatgcacattacacttggcataggaataaagaagacgaggctgttattgcagattctatttggttgaagaaaagatactacttgccggaggaggagactgcttagaatcgagtttatttgatttcttttaagaatctctatttctctttttaataataagactagtgaagcgtttatcgttctttgaacattggtaggttttgcttaatttttctttttaggttttatttaaattgtactggatttatttagttaacgaaatgtgaaaatcatttctcttttaataattctactatcatacatcttttagattatctccgatgtataagcaccataatacaaaatctaaataaagagataactagattatattcgaatatgttgttaaaaacaattttgatatttgttctcgctaaaaaaaaaagaaaagaaatactaagttagttagggatcttctaatatccgtcgatttttaaattttagcagaaacaaaaaatcagattaggtacaaaatatacaaaaatataccatatttaagaatataaaaaaaaaaaaaaaaaggagagtaaaattataaagtaggctcgagaatcataaccttatccctccataaattactaattttcacaaatttttatttttgtcttatatactaaaacagaacaacaaaagataattttaaaactaattttgaatactttcgtccatattttgtaaagcagatggtttctactaaattattaactatcaccccaagagaaagaaaaaagaatgtttgaacatattttcattttcctcatatttatcccacaataaaagttaatggagaatagtgatacaaacaagagcataatgaaaaagaaacgtacgtaggtggcgcaatgttcccttgcatagccactctatatactatatcatacaaattagagtaacatgcatgcttttttttttttggcttcttgtacatttaaaatttttgtgcatagcatttatatatatatgggatcttaattaattactaagtatacttttttaattatagttaaagttttctaagagagatgaaccccttttcaattcaaaaacatacaaccatttaccaaaaacggtgagtgattgcatcatgcatgtgcatagtgattatactgatatcaaccatctattagttttatcaaatcatttacaagttgtcaaaaatttatacggtctcttttctttatcttattaaattgcaaattaccttaactaaaaaccattatgcgattgctatcctaatattacattgggacacaacccatagcgatttttccggtcaaattacgtccacgtgtcaagctatagtccatgagatgagtactagtgagtagtgatgaacatagagttagagaaaaagagataaagaagaagatagaaaatatagaagaggtatagacaaagggagaaacgttcttcgtgagagtcaaacgaacagaagaaccagaggcattttgctttcactattgattcacaaagctcacatctaaagctctctctctctcttcttactcttctcgcttttgtcaccacaacaactagtcatgcaatgaaagcacacaatatgaccggagaggaaggtcactaaaagaaaataggcaacgcggccggagttatcaaaagctcaagacttgatggtaactaggatttttaaattatggatattgtaaattcaagattagggttagagaaggagctatgtcgaattttgaaatggctgggacaggatcatcaagaaacaacgaagaagacaatcaacaaaacacaaattgggtttggtacaaacacaccaataataacctaagtacgagccacaacaatcagatatggcagcagccaagcctcgatctatatccgggtcagatcgacgtctgtgatatgaccacgtcatcgagatctctaacgataagctgtcaagagtgtggaaaccaagccaagaaagggtgcacgcacgggcggtgtagaacttgctgcaagagtaacggactccactgtcccacccacgtgaggagcacgtggatccccattgccaaacgccgtgagcggcagcagcagctacagacgccaacctccaacccaaccggcggtagcggcagagttgggaagtatagagacattaatcaacatgctactttagactcatcaggtttggtttcagtagtttttcattgttgttgcctaataaatctttctttttacatgataatgcatcagttttacttcgatcaaatatcatttcgaaattgcaataagcaatctaagaaatgtaaaaatgaaattccatttcaaaatgatgaaactattaaatattaatgtaagaagctaagtaaaataaagaacaaaaaattgtgtttgaaaaatgaacatagttttgttgttaggatttgataaatgtttgttgtgaagttttggccctaactttgtgtaactttgctagggttagagatgggagagacaagatttccagatgaagtgagctcggatgcacttttccgatgcgtcagaatgagtggtaccgatgatggagagggccaatacgcataccaaacgacggtgggcatagctggtcatctctttaaaggaattctctataaccaaggtccagaaaacaagtccatgcgcagtacacaattctacgagaacccaccaagatcttaattttttttatatcttctttatttttgtcgtatgcaataatctctattaaaactttgttgattcaagattatccaaaactcaatactttacagatgaagtaactcggtaaatcgttatgttagagagaatctgtttaaacatttgtttataattttaagaaggtggataaatgaacatatataagatggtgttaaaaaataaaaacaacgtattagataagaagagtccattgggaatatttgtggtaaatgttcctgcacagaagaatgtcaactgtgcaaccatagtaatagtttttgaaagaacaaaatagataatttgtttttttttgccaatagattattaaatatgaaaaagactactcgtgatttatgttaattgtgtaacgtgcctatgcatgattagggattgtctatagcagtaaattccaataaatgaggttgatggttattggctacactgccacccctttaaaatcttgtacggatgtagaatttgttatctattatatattctattagcttagccgttgagtcgttcgaagcgtatatgaggtttgaactttttaatctgattaagatagtatatgtatcggtatagtcagatttgttattacaatttataagccaccaaataacggtcttatcgctgtaaacttcggatccgtcgctaaaatatattagcagtggtcagtggatttatttccgttgctagttgatcgtttttagataataaaatacaatattacaaaaggtggatttttatgttaaaaaaatccaatatatacaaaaaggccaatacaaagttcaatattcatgagtttatttttgtgaaagcttggagagttggtgtacaccaacttttgtagatattttcatgtgttcttgtattcacaatggaaccttgttggtaataattttgttttcaccacattagatggaatttgaaaatgaaaccacatcatagcatgtaagtaattaggaccaagacaaggcacaagaatcctcgatctcaatcttgttagtaattaggactaaatctacgtctttataaaatccaagttttaattaatttgatcctcctactttccaacttctctttacttaacacaactccaacctaacgttacgagcatctcccctctttgcggcctacataaatgatatatcaaaacattttgttaacataccatcaactccacacactgacacacatcaattctatgcttcataacttttgtctttctcaaattagagaaatattgtaacaagagaaaatggaagttttcattgattcgacctttgccgttcaacagcattatctttctctttgaggtgtattatatgcgattcatcaaaattgttgtatcgcttcattgattccaaaagcttaactatttttgttgatgtcgatggaccaattgatatttgctcccatgtttttagtcttttttgccatgggaccaaactataggttttacattcttgtaattcctaacttttttattttctaatgaaatattaacatttttagaaaaaacaaaaaaaaagaagagaaaatggaagtattattattactattcattttgttttaaatggatgtccaattataagcacctcaataagtaaagaaagaatccatattgaaaaccaacgtagtatagataaatgtaaaacggtctttaaacatgttgatcagtgttgacctttcgttgactttttatattcacaaccgggaaaccaacaaccaccgccgtttccaggaccccatactcctccgttgctatctcctccccatccccatcctcctccgcctcctcctccatatccaccaccccatccacggccatatccatatccatctcctactcctccaccaccgcctccaccacctcctcctccaccaccaccaccaccaggtccactaccaccacctccgccaccgccgcccccacctcctccacctccggatccagggctaggttcacctcctatacctataccaataccaataccaacaccatcaccgttgttcctatcatctcctttattcttttcatggtcattgcaatcttcttttccaccgtcgtcaccttgtcctttcccatctcctttgccatttcctcttcttcctactctaccgcttcctcctcctcctgctccaccatctcccgaacttcctcctgctccattacaaccttcacagcttccttctccaccggtacaacctccacagtctctttctcttcctctgcagatttcgcagcctccttcttctacatcaccttcttgcactcttcgtgctttgttatgtccaccactttcaaacgttttgttggaacccaaaacggaagattgatcactactattaaaatatctcctcacgggtctatatcgcagcccgtggacagagcttgaactcaacaacaacacagcaccagaacctaacaagaacaccacaaagcttgacattttcaccaatatctctatcgagaattttctcaagtaaaagtcatctccattcccatcctttttataacccaaatcaagaccacaataattatagtgagcaaccaaaatgagcatgcattacccatatgaaacctaccattttttttgtgggaactaaagaatacaaaaaagatatgacttcagaaatattgcgtcacacccaaggtccttgttctagccttctcatattctctgattgttagaaatttttgtaaacataatcttctttgcaatactaaattatgcgtacttgtatttattttaaacatacgtgcattcttgcttcacactttctgtgatgttatcaaacttatgatttttcgtatttgagatttggtggaaactttaagacaaaactgaattgtcttcacatatatcaaaatgaatcagagttggtaaaagccctcccacagagtacaataaaaacaggtaacaaaactggatatagagaagaaaacaacaacataaacagttcttccttcaagctattctccatcctcctgcattatgattcaattcaatatccaacagttagttacacaccaaattatcgtataaaacaatctcagcattctaagtagttgagaaaaggttcgtgtaacttacatatcttgttgaaggcaacaatgtcacaactctggacatattcattgatcggttcaacagtgagttgctcttcgatcatggtgtcgatagatacaaggtcatcaacaatggtgcacatgatgtgcaacttcttgataccgtaaccaacgggtacaagctttgatgctccccaaaacaatccttccatctgaatggatcttacagcttcctctagcttcttcatgtccgtctcatcatcccacggcttgatatccatcaaaactgatgactttccggctgattaagaaaagaaagaaaccagatgagaaatccaagacatcattatatcgtaaactacaggtgtaaaggcaaaaacacaaacttacattctttcttctttgtagatgccttcacagaagctgctctctcttcagcagctttcttttcctcttcggtctcctccccgaaaaggtcaacatcatcatcatcttcttcttcagcagcagtatccttagaatcagctgcagggggagtagcaacagcctcttctgtgataggtgatgacccttcaacaatgacaccacttccttcagcagagacaccactgtaaatagagagacaggttataagaaaacaacactagacaaaaactttaattggtaaaaaacagaaggcaatggagcttacgagatcctcaagagggcatcgatgtggttgaaccaacgagatacattgacaaactctgaagttgggggctttgaaagagctgtaaacacagtgatatcatcctttgaagcttggtacctataaacatacatacatagagagacagaagaaagtaatggttactactattgtttcaaaacaagatagataattgagacagcccttagaaaacagattctaacccagtgatgtaactgcgagtgagaagatgctcatcgagcttcttcaatccggagccagagttgaggttggggaaagccgccattgtttctaaagctcgaaactttttcactgatataaagcagagagatcagatcagatcagatcagatcaagtaaggaaaaacccaccaacgattcatcaaaaacgaaactttctatttcataaaaccagatcatgacaacagaagatctaaaagacgaaccattgggttaaaacgtatgaacaacaataagaatgctaatcaactagatttagattcacaaacaccgaaatttaaattctaatcacataatcccaaagttgcataatttgaggtcgaaacaaaccctaattggaggcgaaagaagaattgaatcgaagaagcaacaaacctgtagcaataaaggagccgacttgaagagggagagcaagagagagagacgtagtggaggaattagcgtcgagaaggtgatgtatttaaccctctgagatttttgtgtaatgggccgaatttgggcctaacatttacattttagcggattaattctctatccattctgatttttgccatttgttttttgtatggatgacaccgaattagaaatatgcaaaaatgtacatgttacatattaagaacctattttacctattttcaaatataataactaaaataattatcaaattttttataacacttaaaataaactaaaatatttttttccaattttgttggcttatgaattaatcaagttcgattgtttaagatgattttttttttttttttgaattctcaaaaaacagtaaccacacaatcacacatgtacgtttcttgcatattattattctagcaagcgaaacagtataaaattttagttttcacatgtacgtctgtgaatttgggtgatataaaaattgatagatagggccaatgttatcaacatgtacatcatcatctactatcgccgtacagagagaaaactaggaaaaagccaaagtataaaggcgacgacgtaaaactaactacaaaaatatgttgaaagttcaataagacaacaagggactaaaagctcgtttattatgtcaacatgtatagtatgtttgtttgtttttggtcaacatagtttctccgatggttttttcgggtaaaaaattagaacatgtagggtttcaaaatgagggaagttttcatgtaaacaattgtgggaatgtggaagtgtataatatatacgcacatgaggagaaaatgagagaagaagggcaatgatgtttcgttttacctgattcagcagtcatgagggttaatctagtctatgaaactgggtgaaaatgggatatggtcctagtaataaatgttgggtttagttagagagtgtttcgaaaaacagggtaagaattgtcgagttcgagtctttccaggatttgttgagttttccataggtaagatgagtgaccttccaccatatccgttacatctacctacaaatgtgatgatgattactctgattgtttctatcattttcacttcctacgaattgaagatgagagtaaatgagatgacttacatcttcaatccccggtatacagaccggttggattccagctaatccttgggacaacagactgcagaatttaataaggaaaaaagagtttggatttgcaggtgaaaggggggatcgaagaacacaattcaacataccttgcacgaaatgcaactccgagggtccagtcatttgtggcgtaaacattaatgaatcttccagccaccatctggtaacccataaaaaaactcgtataagatgatacagaacaccaaaagacggatctgtttcctagactgtgacaccaactcttgttaatggtagggaactctcatcaagaaggtttattacctttcttacgtctcgccaattctcattcttgattgaaattggtgctccaagaagaacaactctttccacaatttcagctaccgtgaaaaatgtgttaaagacaagaatcaattgtcaattctaaagcaaagataaatattgagtggagaaataccattcttttcagtctctgccagagtctggaggcacttaaagacaacacgtgcaccaagcgaaaaaccaaccagagtcacaggtctgaatttctcacaagttttccaatgtaagagaatcaacatgctgatgtaaaatactaattgcacaactttctatcataaagatatatgatggaatttatccaataattat

SEQ ID NO: 245 - DNA, 92861 bp, Arabidopsis thaliana
aagcttatgaaaataagcacttgttaaattaggaaataacgatattgtcctctttttcaatcaatgttattggcattcatcgtcttcatcgttgagacttttccaacgacacaactctcacctttcactgttgtgcttgcttctccgttaacaacatctccatcaactcaatcaacgtcactttcagcagcatcaacatcgtttcttttgctggaatttacaaaaaaattttgtcatcatcaccgtgaacccaatagatctaattaaaagagtttaatgaaagaaatataaaccctaagcggatagtatataggaaacccaagggtacaatcttaaatgcggattgaacaagtttaatcaccaactcaaattctaaaacaaaatcaaaatcaaattacatgtttaatattggttagtgtaggatatataataaactgaaatttgcagatcgagacgaagatcactaatttccgttgaacaccaacaacatagttatcaaattcgatgccaaaaattgcagacctagatcgaaaaaaaaatatgataactgggtttaattgaagaagaacagctccttcgcatatctcacattcccaccatttctcttgttcactttcagcagcatcaacaacgtcactttcagcagcatcagcatcaacgtcactttctgaactcgtttctcttgttcgctgcgtcaattgcagaggcaaagcagacagcgttaaaaggcgagaaaagcagcgaatcaaatatcatatcctaaacagtcaaataattcagcttaagcatagatgttcctaaattcacaaaggcatagagttttttgtgccaatcccataattgatccccaaaacaagtccaaatattttcaagaactttatcaccatgccacacaaaaatcatagatgtgttcttggctcttacacaaacaaaataaggaaaaaaaacgagtcccaacattttcaagaactttatcaccatgccacacaaaaattcgtaccaacaattagtttggccaattttaatggcctccgttacattttgaattgcgtccatcacttcatcccacttacaatactttgtccccttaaatcattacaatatttttgtaaccaaataactaaatctttaaccggactgccaagtgccaagtgatctcaaaatcaacaaaaatttgcattttcttactttttttttttttgaacgacattgtattttcttacttaatctgaagttatagataactaataaagtgtatatcaaagtttttttcaatgtttaaaaagacgcgaacacatctaactggaagtgtgcctcttgtcttacggatgtccttctagtagaacatctataaaaatctgaaaatctttcggaaaaacaaaaaaaaaaacttacaaattgttttccatctaatcacgaacttgatcatcagttctcgtgatgttggaaacaaaaactcaaaatatcatcacttcatgtgcatttgtactaacacatgcatatcagtgattcgttgggttcttcaattttagtaaaaaagttttttttttatcaaaaccatttctaaaaaaattcaattagaaattacgataattttgacaaaataagggctactttcattatttattatttatgaattttgaaaaaatcctaatgtgttgacattgttcaaataaagaactaataaagttttagatggaaaaaaaaaagaactacgtgtttttttggtgaaacttttgaataaagtaataagacctacccatatgatgatctaacctacccaagttatcacttgtatcggaaagtccccaaacttatctttctggttgtgtcggccaaatgtatcccaactaatacacacaatttcactttgaatttctctttctcttcttccagaagatttctccttctatcgttgacctaaatgattgatctgtcttggttattttgtcacacgatgtgtatgccaatcagctttggactacaatgcatgttaaggttcgtactaaaaaaaactcagcatgaagaatgttggttcgaggacttaaattctgatctgacgtagctagtctatcgattatctgcctttaaaccaaagctttttggattaaagataggtaatccgtgcgttgaaggtatatcattttcttacccaacaaattcatttaacctcatagtataaatttcgtttggttttgatttttgatagcgacaatatatgccttttcaattaaaagtgaaaagaaaaaaacgcatgccatttacttgtttgagtaagttactcattatggtatatgctcttcaagaaaacaaatcaaatactactttttcgtcacgtatctttctttttcagctcaccaaaatataactttcaaggaatcatatcaaaactttactatttacatggattttgtgcatttgcataatttacgtatacaaatcccaaaggttagcgtttttgccaactatatatatagatactagctagatgattatccagatttacttcttcttttttaataatatatatatcgtatatccattaaatgtgtaaacctttacttctaacagatttagagatctataaaacgtatacactaagaattatttagaaaaactagaagtttgaaataagttattgtctctctaatacaccaatattgcttcttatgttcattacaattttacaaatgtatgcttaccagattacaaaagcatgttgaaaattcgaagttatgataccaatttattagtagcgaatgtaaaaaagactaaacataaattggacgtagtccaccaagatatataatgttataattagcggggtaaaatattgatttaatactggaggcgtaataacatcttgtttcagaattccaacaacgtacgagtaagaaaaacaaaaatacagttctcaacagactaattggacgtaaaactctaggccagccaaactgacaaagcatatgacaaaaatataaatgatagaattggcaatttcagaattttccatcgatcatgctaaaatgaacattagttggaacccaaaaacatttttgtttatcttgcacatacaaacagagctataggttacgttatgacttatgatgttctgatttattgatcaaatcacacatcagttttttcccaacagatatcaatttcattatgtaatgatacatatagtctgatagtattattcgtctgttgagaacaacggctttttgttggatacaagtttttttgtttcgtcaaaacaagtttaattttggacttcatcacttcaataagaaaaagaaaccaactgaaaataaatgcaccgtataaatttagttcaccaaattatataaatgtggaaaagaatctttaaaggttacgccactattgaacatagatcaggaaaatgccgaaagtgaagaagatggcgacttttaacttacaatattagcaatatttttggtcatatcgtattaaaattgatgacctaccatttaaaaatggtggatataacttcttctagcatatgttactataatgaatgatcaattctgaattctcatacatatgacttcacaacggaaactttttgctttagagtttcataaatagtttacgacatacaatttttcatgcattccactcacgagaacaactttatacgtaacatgcaattgcaaaactacaataatcgggtttacatgtaacatagcatctaataaaaatcttcacttcctttattaaaaaataataaaaattgaaaacaagaagaccaagttcaagttcaacgaaggtcgtcacaaattatttgaagaccgtgtgcgaaaccattttttaaactcattgtaaccttttaattattattttaacttacgtatgtattggttaaaacttaaaacacttgcctgattacactactttttttttttgttggaaatcttttcaatttattttgctcgatatacttctcaggttgtatacgtctaaatcttgaggaaaattcatatcttgcagaaatataattctcgtaccagaatacgtgggcacccacaaacactgtggaacaacagtagaagtttttgatcgtcattgttccactatggatgcaagtggtggacatatatagttatgtgtatatatatactagtaaatgcacacaatcgatataacaagttattctaaaatttaacccaaaaaaaaaaaaagagaagaaaaagactcaacatggttcatgctgatggtcataattttcccggttcggatccaaaccctcatatgaacaagttcgctttcgggtgtgccattgttgcttccatcatttctatcatctttggatatggtaacatactaacattctctacatatcaaacaaaagttttctacatatatcatataaagatatattcaatggaattatattaatgattttatattaacgaatatttttttttttgtaatggtgtgttgtccttagatacgggagttatgagcggagctcagatatttataagagatgatctaaaaataaacgacactcagattgaagttttggccggaatcttgaatctttgtgcactcgtcggatcactaacggcggggaaaacgtctgacgtcatcggccgacgttacaccatagctctctccgccgtgatattcttagtgggctcagttcttatgggttacggcccaaactatcctgttttgatggtcggacgatgtattgccggagttggtgtagggtttgctctcatgatagctccggtttactctgccgagatatcctctgcgtcacatagaggctttctcacttctctacctgagctttgtattagtcttgggattttactaggctatgtctcgaattactgttttgggaaactgacgttgaaacttggatggagattgatgcttggaatcgcagcgttcccgtctttgatattggcttttgggattacaagaatgcccgagtcgccgaggtggcttgtgatgcaaggtaggttagaagaagccaagaaaataatggttttggtatccaatacggaagaagaagctgaagaacggttcagagacatcttaaccgctgcggaagtagatgtgacagagataaaagaagttggtggcggcgttaagaagaagaatcacggtaaaagtgtttggagggagttggtgataaaaccgcgacctgcggtgcgtttgatcttgatagcggccgttgggatacactttttcgagcatgcgacggggattgaggccgtcgtgttgtacagcccgagaattttcaagaaagccggagttgtttcgaaagacaagctcttactagccacggtcggtgtaggtttaactaaggcctttttcataataatagccactttcttgctcgacaaggtaggtcgtagaaagctcctgttgaccagtacgggtgggatggtcttcgcattgaccagtttagcggttagtctcacgatggttcagcgatttgggcggttagcgtgggcattgagtttaagcatcgtctctacgtatgcatttgtagcttttttctccatagggcttggacctatcacatgggtgtacagctccgagatattcccgttgagacttagggctcagggagcgagtataggtgttgcggttaataggatcatgaacgcgacggtctcaatgagttttctgtcgatgacgaaggcgatcacgacagggggcgtgttcttcgtattcgccggaatagcggtggcggcatggtggttcttcttctttatgttgccggagacgaaaggattgccattggaggagatggagaagctttttggtggtgggggtcctcgtggtgatcgtgacggacttgagattcaaactaaaaccatctctattgggggtttctcataagagtttctcacaattaaaaaaataaaaataataaaaatgaaggagagagagtgtagaaagattctcagaaactttgagatactctctacaacccatcatgacaattcgcttctcactattggttcaactttttaacaaaaatatttttttaatcaaaaattcaaattataatataatattaatttttttttgtttgagaaactttgtgggtttctcatggatggagatgcccttagagagtcaataattaggttagattatcatggctatgtagaataatttttaaatccaacatgatttggcatatctattataaggtgtgattttttgtaaaggacaaagtatgatttttatattcatccctttttactgtagctaatgagaatctacaacctaataaaaaacaataacaattatttaattataaaatctaatagttcaccaaaacaaaatcatatatcggtttggatttataagagagggttaaagtttaaattttatgattaaacgaagttaaataccagtttaggtttataaacgattttagattttagaatcaaacgaggttaaatgtcggtttagagttataaacgggtttggattttacaattagatgaggttaaatgtcggtttgagttttagaaagaacgatttaagtttagattttacaattaatcgagtttaaatgtcggtttggatttacaaaatagaattagagtttaaattttgtaattaaacaaaattatatatcggtttgagtttatgaaatagtggttaagattatagattttataattaaatgagtttatttatttattaggtgacatattctaattggctgaaagaggtgaatgaaaaggtgaaccaagaattgttcgatttttaactacacatctaattctagactctagagtatgcatattaatgtttccagagatcagaaagtgcttaaacaaaacatattgatcacttcatggtttttaagtcttagtttaattgatggaaaggagaggattaccaatactgaagtagagtcatagttgatatttgaggggtgagaaccctgagattcgtaaagaaatcgatgaacttgtgcgtgaagaaattagtttgatcatgctcaaaggtctaaataataaaaaaccttgacatttgttcccaattgaagtcctttaattgtgagaaaaattatgttgctctagagcaatattgaagaaaaaggagacatatcacatatgggaagacctgaggagcaatgatttgatttgacggaccaaaataaaccagagattttcctgacaaattaaggtaataatgcatgaggttacgtggaaatgaatcaacaatcgttagctcctaatatcacggagccaaaaagagaaaaattagaccggagattattacaattagtaactaacacaaaactgttattaagacagaaagagagagaagaggcatgtttctcggaatgaagacagagcaaatctcaatcttcctttttcaccttattcctattatcattttctgatcaaatgttcaaaaactctctccccttaatctcttcctctaaggtacacactttcatgctaatctcttaactaattttgtattaatctcttatatttagcattacctgttttgttaacgatctaacgaacataataagacaagaacttgttccaacgttaacaccattttgattatgatctgttttttctacgtgttgttgttgttgttctcagaataattgagtggttaagggagagaggagacggagagtttttattttcgttaccggaaaattttgatctccgatggcttcttctcctgaatctgctcctccaacaaactccacctcttctccatctccaccgtctaataccaattcaaccacctcttctccgccggctccgtctcctccttctcctacacctcctcaaggagactcatcatcatcgccacctcctgattccacatctccaccagctccacaagctcctaaccctcctaattcctctaataactctccttcccctccgtcacagggcggtggaggagaaagaggaaatggaggaaacaatggtggcaatgatactccaccgtcacgcggctctcctccttctcctccttctaggagtaatggagataatggtggtagcagatcatcgccaccaggagacactggaggctctcgctcagacaaccctccttctagcggaggaagcagtggaggaggtggaggtggaagaagtaatacgaatacagcgatcatagttggtgtattagtcggagctggacttttgatgatcgttcttattattgtgtgtcttagacgcaaaaagaagagaaaagactccttctaccctgaacccatgaaaggtaaaaacatatacacactcttatgtttcaacaaataagaagcttagattctttcataaaatttcaggaaaccaatatcaatactatggaaacaacaacaacaacaatgcttcacagaattatccgaattggcacctaaattcacaaggccaaaaccaacaatctactggtggttggggaggcggtggaccatcaccgcctcctcctccgcggatgcctacaagcggagaagattcttccatgtactcaggcccatcacgcccagttttacctcctccttcgcctgctctagccctcggattcaacaagagcacttttacttaccaagagcttgcggctgcaacaggagggtttacggatgctaaccttttgggacagggaggatttgggtatgtccataaaggagtcttgcctagcgggaaagaagtagcagttaagagtttaaaagcgggtagcggacaaggagagagggagtttcaagctgaggtcgatatcattagccgtgtgcatcatcggtatcttgtttctttggttggatattgcatagctgatggacagaggatgttggtttatgagtttgttcctaacaaaactttggaatatcatcttcatggttagaccacttaaaaactttgagtactaagtttattttctctaatctatatattcaagaaagttgtaaccttaatttgttgttgtagggaaaaatcttccggtaatggagttctccactaggttgcgtatcgccttaggtgctgcgaaaggactcgcttaccttcacgaagactgtaagttttaacattcaccattctcattttcttaaccaagttgcataaaacagagaaagctctgtctctgactagtgttatctttttggctgagaaaatggtgcaggccatcctcggatcattcaccgcgacatcaagtctgcaaatattctcttggacttcaactttgatgctatggtgataaactagtagcttgcattcatctacggttttttgttaagactacattgatgacattttgcatttgtttattcaggtggctgattttggattagctaagttaacatctgataacaacactcatgtatctactcgtgtgatgggaactttcgggtaagcgttttaccgtatgataagattgttcgtgacactcaagaaacataacctttgtagactaatctactttgcttctttccacaaacatgtgtagatatctagctccagaatatgcttcaagcggtaaattaaccgagaaatccgatgttttctcttacggagttatgttattggaacttataactggaaaacgaccggttgataatagcatcaccatggacgacaccttagtagattgggtattcatgcatgtaacatatgtatcgtgtatatatgtttttcgcctttttcgcgtactaatgatcatgaatacaggctcggcctcttatggctcgcgcgctagaagatggaaactttaatgagctcgcagatgcgaggcttgaaggcaactacaacccgcaagaaatggctcgaatggtgacttgtgccgctgctagcattcgtcattcggggcgtaaacgtccaaagatgagccaggtgaatcaaaattataactaaaagtctatttttgtcagagaataacaaacaaatgttgtggttttcagatagtaagagcgttagaaggagaagtgtccttagatgctttaaacgaaggtgtgaagccaggacacagtaacgtttacgggtcattgggagcaagctcggattatagtcagacatcttacaatgcagacatgaagaaattcagacagatagctttgtcgagccaagaattcccagtcagtgactgtgaaggaacatctagtaatgattctagagatatgggaactaagagccctactcctccaaaatgagatcgaatcaatgattctgtaaagaagagattttggggctctgagagtagagcaatgtaagctttaagcaaaagcattgtcattgcttgattggttggttttttttttcatatatttttcgactaaattgtgttatgtttagatcgttacgtatgtgtatgattcttgagatttgattcgattctcaaacatgaaattaaaattgtttgattttgaattgtatctactacatgtctacattcataatcaaagtgacaagctttttcaactttggctttatgctgttctttacatgctctgtttttcatctgttttcgtaatctaccaaaaattaaacctaaacaaaccgaactcaaaccagattgtttaacgaatcacaattaaaccggtccggttagaaaaccctcgcgtgtgacgcctacctttcctcttctccgtcgtctctcccatttcttcctcaaatctctcttttcacgccaaatgaaagtttaaaacctttgaattgtttattgaaagtttacatttttctgttgaatccaactatgtttagattgagaagtctcttgtcgctgaagagttcttcgattgtagaattgtcatcacaaaacgtcacagaagcaattcgtttcgctccatttcattcgacaagtgttctgtctgaaaaatcgaggagtagatttggttctgtaagatcattctctataaagatttgcttccttattgaatctatgtacactgtaattagacgtattgatgctcttagattaatcttggtttcaggctagagattccgaaggcgaacgatcttcaaaggtaaattttttatgatcctatggttaatgcattgatcgtattggaatcaggaatatgaattgttacatgggtttgtacaaaattagataggattgattgttggtagaaatgctatccgcattgatgagttcatgttaaaacctgtgtttgtattgtcatgaatttgattttttttttgtgtgtgtgtggtcctttgttgatgtatatattgaaaaattgtattcataagagagttagttctcctctgaagctgaaaatgttgattccagaactcctccataagatttacatgtaccgtaaaggagaagggtcgtaccagtgctaagaagactgtggataaactccttttccacaggggaattaatgatccgcttcaggtgaattcttcatgccattgttgtcacatagaattctggttttgttaggatgtgtttgctcaagttttcatatgtactgtatacgtagaatgagtggcatttcgggccaagtccgcttatccgggataggcatatgaagaaaaaatctccgcctggcaggggaaagaagcctcgagataagaaaacaaaacgtgagtggctttcttttctttttttcttagtaccatacaacccttggctcttttctgctgtatgtattcttatgtttgtttggtatactaggatggcacagagaaggtaatccggacgatgattttggcactgatgctaataatacattcgagaacaaatggagagaacgctggacagctcaatctcagaaggcttcatattcgaaagactcgacagcgggatttgaatggagagaaggctggagctggaccactcaatctcagaggagcaaaagttggaataaagagtcttttgatgaacctttgaacgttgagtttaggtctgagaggattgttctaggattgcctcttgatggtcccatcaaggttgatgatgttaagaatgcgtaagtcttcaaattgcttccattgctcccgagaaaccgaaaaagagtgttcattgaaggtttcttgttttgcagcttccgatcttctgcgttgaagtggcatccagataagcaccaggggccttctcaggtatggttttttaaacaaatattggattgtttcagtttttttatttgaagttcatgtgttgataaattgttttcggtaatgctgtggaactcgcaggtggcagcgcaagagaaattcaaactctgtgttgatgcatacaagtccctctgttctgcactcgcttgacgttacacataggcattgatgcaccattttagcattagttgataaggctgcttctgaaacgttttcgagagatacaccggtttttagatgatgggtttgatttggttcatgagaatccaccagctacaagattgcacacggcacaccaatgtgtctctcgtccttttccaacatttgataacaaaaacatgtatgtgaaagatttatgctagtgcccaacttttagctgactgcttctttttttaaaacacactgatgtgaaagacaataacttgagaatacatcgtgtatacaaaacactattaaagcaatttattttgtacaaaaaaaaaaaaaaaaaaaaagagaacatcttttatgtattttgtctatgtccaagctaaaactagacttagacaaacatctccaaactctaaaattccaaaactttccaacattcttgtataagcaaaggttgatgtcagttagccagagagctccaattcagatttgatcgttggatcaaaactatgattcatcgacttcacacaggtggcatggcaaaggttccaactactgacctgtgaatagtctctgagtccagagttgttagcatatgtggaatcgacataccacccgagatgacgatttctgttgaaaaaagcaaaaatagagcaatgagatggatttgttaaggcaccaggggcgttttaagagttgctagatcaagtcacaagttacctatgccttcccggactgagagattaggtcttatgatgtcctttgagctaatgaggaaaatgtctccaaggtaaagatggttggtgggaacatagacacaacatagttcttctccaccagcacggcctcgaagaatcacagtcgatgtaatgaaaccaaaagcgtattctcccatatgaggatgtctgataattgctacctccttgaatgcacctgagctttgatctgatgaaaaaaggtaataaggttagtcttatgactcttattagtacttgttggtaagtaaggttggtaaaattatacctggtgagattgctccactaatttgtttagaagctgagtagatgtagcttacgagaggcatcttcttgataaaccattctccgatactgagaactgaagctccaagccatgaagacatgaacacaccaaccataaatatgaatgtgatggatgttacaaagccaagacctgcaaatattcttcaattagactgaagaaacaagtgtgtttaatctcaatgcagctagagtgatgaacgaaactaaccgaacatattgattccgagatgagtatagatcggggagaagaatccatcaacgaaatgtataaaccaccacgtgaagtagaatgtgacagcgattggtagcagaatgacactgtaacaagagatcaagcacaagattaaagcgttttcgaaaatctttgagaataattaacctagaaacagagaaatttctgaatctagttagcaacaaacccagaaacagagaaattttaacgagaaacttagagattaccatccggtcatgaactttttggaggcccagcttctaatgactttgtaaatcgcctgtttgtacatgaaacattgaataacttaacatacaagtaacttcaaactataggtcaaacttgcagaacatttcacaatgttgatcaaattgtgtgatccaaatgtgggaaattagcgaataagagaaatcctctgtaatagttgttactatcgcgagagagattaggaaatgaaaaagagagagagagagagatatacctctttgccggcgacgtggatcggagaagcgagaggagacggcggaacagacaaaacgacgtcgcgaggagaagctccggatttatgcatcgggatcaatcgttctagatctctctccctcgtttccatttacccaaatctcaacaccgatctctccagactctctcagaaagtaacactacagaagaaaattgctatctctctctctctctgaatcgatttgtcgatctccgatgtgtcttctccggcgtgacgtgagtgagcaacgaacctacctgaagttaagagtgtcatgcatttctgctgctaatgcataccgaagtatttcactgctgcaacattatgggctttataaaccccatttacttataaatgggcctcgtacgaatcatccgatgtggcgtttcgttgaccgttgaaatttttacacacttcgttacccggtgtaggggcaaatttggaatttcatgaacattttcaaattctttataccaaattggcacgttgagagacttctcgtaaaccaggtctagtggcaatttcgaaattttgcagctacattttcaaaatcttaaagccaatttatataaaacgactcttcttccatttttgggttaacaagttcgtggtgagtagtggacggagagatgtggcggtgccttcgagttgcgtcgtcgtcgaggagatcggaatctaatggcgctttcatcacttctcaactctccagattcttctcagctcctccttcggtacgagacattgtttgaatcatcgatctcgtttagtctttggggtttctcatcatttcattggttgactaatttctagctttgtttcgattagaacacaatttttggtatgattttgcgtagttggtttggttttgatttgttgtgttctttgttggaaaaaggcaggggataaatcatcgtatacgatcgtagatcatacatatgatgcggttgttgtaggagctggtggtgctgggctaagagcagcaataggattatcagagcatggttttaacacggcttgtatcactaagctttttccaactcgttcccatactgttgcagctcaggtgccaacatttgcttactcttgtttttagccttataattaagcttgcttttgtttttgattgagttatgaaatttgttgtgaagggaggtataaatgctgcgttgggtaatatgagtgtagatgactggagatggcatatgtatgatactgtcaaaggaagtgattggttaggtacgctgatgatctacttatgtatacacagataaaacttgcttctttgttactctacaagttacttatttcggcaagtttctatatttatatggaacttgtgttttttggttctgtaggtgatcaagatgcaattcagtatatgtgcagggaagcaccaaaagctgtgatagagcttgagaattacggattgccattttctagaacagaagatggaaaaatatatcaacgagctttcggtggccagagtctcgagtttggaataggttttaattgttgacttattgaatctcatgtatctgtttaatgtggaagattacttgcttaaccttctcatagttatttctttatctctgtgtttttttcaggtggtcaagcatatcgttgcgcatgtgctgctgaccgcactgggcatgctctgttacatactctgtatggccaagcaatgaaacacaacactcaattctttgttgaatactttgccttggatttgataatgaacagtgatggtaaggtctaagaaggtttattaagagtatactatatattatccatcatgttgcaaaatcaatattgttgaatgcttttggtgtatatgaatatatgatgagcaggaacctgtcaaggagtcattgcactgaacatggaagatggaactttacatcgtttccatgcgggttccacgatattggctaccggggtaaagagaacttgttgtggctcataatgtatcttgttttgaattggtgaaccacacagtaatgaatcatgatccataaaatgacttcagggctatggaagagcttatttctctgcaacttcagcacatacatgcacaggagatggaaatgctatggttgcacgagccgggctaccgcttcaagatttggagtttgttcagtttcatcctactggtatatatggagctggatgtctcatcactgaaggtatttgcttcttcctgcattaatcaaatcattgaggatttagacagacatatattggttcttgactttatcaaatttgaacatataggagctagaggtgaaggaggaattctcagaaacagtgaaggtgagaaattcatggatcgatatgctcccacggctagagatctggcttcaagagatgttgtttcaagatcaatgactatggaaatccgacaaggacgtggtgcaggtaagatcatgactcctttgagactcatgtataagaaattagtttgagtatatgcaacattgttctttaacaggaccaatgaaggattatctatacctttacttaaaccatctaccaccagaagtgcttaaagagaggctacccggtatatctgagaccgcagctatattcgctggtgtcgatgttacaagagagccaattcctgtattgcctactgtgcattataatatgggtggtattcccacaaactaccatggagaggtaaactaaacgattttaattagtgtaagaagaaatggatatgttcagtttttaaaagtgttttggtgcatctatgtgagtctcaggtgattactcttagaggtgatgatccagatgctgtagttcctggactaatggctgcaggagaagcagcttgcgcatcggttcatggcgctaatagacttggtgcaaattcacttcttgacattgttgtttttggaagagcttgtgcaaacagagttgcagagattcaaaaacctggtaagcaatatctctatctgactaactatgcttcttctatgcttcttgatgcaagaatatctgaaagatctctgctttttggtgtatataggtgagaaactgaaacctctagagaaggatgcgggtgagaagagtatcgaatggttggaccgaataagaaactcaaacgggtcacttccaacttctaaaatccgcttaaacatgcaaagagtaatgcaaaacaatgctgctgttttccgtacacaagaaacactagaggaaggtaaccaacactgaaactctaccgtatgataagaactcaagaagttttaaagtgaatttattggtaaaaggttatgattataggttgtgatttgattgataagacgtgggacagttttggtgatgtcaaagtgactgatcggagtatgatatggtgagactttactttaaaacgttgaaaagctagtctttaggctaattactaaagtttatgtaattggaaactttgcattttaggaactcggatttgatagaaactatggagctagagaatcttttggttaatgcatgcataacaatgcattctgctgaggctaggaaggagagtcgaggagcacatgctcgtgaggatttcacggttagttctattttccttaagacaacaaaaattgtcttagtcgaaatgtggataacgaaaagagactttggtatggttgttatgcagaaacgggacgatgcaaattggatgaagcacacattggggtaaatataggccatcatagattaatcatagatatttcatagttaaaactgaaaagtaaaattgttagtaaatgctttagcaatcgagaaatgtaactaatggtcctgtttttttttttccatatatgtgttgaaaggtattgggaagaagggaatgtgaaattggagtatagaccagtccacatgaagaccttggatgatgaggttgacacttttcctcctaaacctcgtgtttattgacatttcttcaactttttagttcaagaaggccacaatgttacccagcccaataaacatctgtatcccacaaagcccaagaagcaacctgcaaaacaattacgcaggaaaattatgtgacaaatcaccttttctaatttctttcctatttttccgtaaagcaaaccgcctagctttaaatgaataattgacccgaaacgcacgcaatgtcccacgcggtcgaatccgaaccgttgagatcttatctaaccgtttaatcgagaccgtccatctcttgtaaccctctatatataagagataaatcctgctagggttatctcatcaccgcctccatattctttcgcgtcttttgcttcctccctctttttcgccaatgttttctttagatctagctaatatggcgacgattttgttctttctcgcttctaatcaccgtagagatcctcccgatctgcaaatccgatccgaattctcaacgaatttgtagatctgatctgtgattccatcgttgacgacggatcttcgcttacatcgtttgatctgtcgcagatctgccgttttctataggtaaaatctttcctccttgtaccgtgagcttttcttatggtcgttttccataaccttgttatgtaatcgcgaatattgttcttgattatcagatctagatctggatcgtccttcgcggcttcttcacatgcaagattctgtgaattgttcaagttgaggcatcatttctggattactaggagacgaatctgttgcagacggatgtgtgtgtgttggattgaattgagattagggtgtagaagatgttttgtggatagctaatagcttcctgattgcatctctgtcatccgacctttgccatgtcaggtgcgcttgcatggcaggtcaaaaaactgatcctcaataaaaaaaagattttgtgggttttggagaggaggtcgcacgggttattattttttcccgggatctcttctcctctgtgtgtgtcgtcttgcctctgctctatctctctccctgctctttcacatttcatatctttcttaaatgctcatatacactcaaaaaccgatcataagcagagtttgtaaccaatatggagcagtgggcgattacaaatcttcttgcccaacaacctcgagagttaaatcaggtactcatatccatattaaatcgaattcttaattagcataataaggtaaacataatctgcaagaggaattctggatttaaataaaccataatccggttgccctaattgttaacttgtatcaacgcttatgcgaatcatgaaattttaattttattggttttgttatttatcttattgatcaattattgttttacaagttgtcatttaatctattgaaaatgatggtattaagaattgctgttaaacaattttgcgggttctttgtatgtatcattggtattgttttattagttctatccgtttagaagctttttagaatatggtaaagaacatttttatttgctcgtagtttgtatatgtctgtaaccaccagttcctgtagtaactatgaagctggtagacgacggaattgaagctatgcaaagctgacgttggttttttctgaagttgatttgttcttgaaaggtatcttgatcaaaagatagtatctggttatgtgctaagtcaaaaattcctgatatttatagttcattacattttattttcttagtttattgtggcctgttgtggaagagaacaatcattataacattttatataatgagaaaagcttattgcaattttcctatctagtctcttgttctcgtgaaattgtgtcttgaaaacagtttagcatcaccgttcatgtttagtcaagttcatcttttggtcttcaattagaagttgtttaaatattgaattctctaaaaacagaaatatttttaatatgtgattaaaatagagttaaagagtcaagtgttggtcctattggctgtgggccgtagtggtagggtattcgtgatatagatctgtaagctcaaattggtagagcgctcgttttcttctagtggacgagaggttggtggttcgaatccacccagttctggttattcgtcatttttaaaataaactaagttattcaacttttgaaatgatgattatatttaatttattttctcttacccttcgactgatagttctcctattattacgtgaatttattaattttcaaagaacagaaacattttcttcttccatttgtttcaatatcctccctcctgcttgaaacaaccttttttattgctctttgtgatcaacaggattgtcccacactgaactctggaagatgtactatttgcttaacgtgactagtgttgtgttgcttttgaattgcggattgtgcaagcgacggggaatttaggaaagagaagatgggagtttatgatacatggggtttgattgtttcgacggtatcttgcttttttgtccggtttgatcttgaatatgttacattacactgcagtatactgttgaagatatgattgatgcttcttttgttgaagctcatgttatatagaatatagaataatagttgaacgattaattatgcggtgaatttatttgcctcgaagagtcaagactcaagactattattaactttatagaggttatacctttctaggaatcttgtacaaaaatgtaataaaaatcgtactgttacttctatatataatacattcaacccggaaacattaattaaacgtaatttcatatactatctttcataattttattggtattgttggtaacgttacatattcaatcgctctcagttttacgtcatagttcattaagtcccctccaattctgttgttaccatatttaaacccattgcctaacttccatgagtaaaaaaagaaaactcttttacttctctcttcattctttattttatatgcaagtacgatgcctatttagtgaattgtataatgaaaaacaataccttttcagacctaatgttaaccaggaaccaaaccaacaagtacaaattggataaacactaaaacaaagatcgaagagttgcacatgacgtataacattctctttcttttgctttttaataattcccaagaaaataaccacaattactctcataaaagtaaagtattataaacgaaatcaaatcaaacagcgacagagtttttaaggacactttctgcgtcctccgtgggtggttaggctaccatagcacggacatttgtcgtagtttccggatgtgcccggtgccacgcagttgcacctagcgcagcaagtcccgcacgctctgtgacaaagatttggcctactcgaaagactgcaccgctcttggcacctgctgttgcaatctacaaatacatacaatttccaaccaaaacttcaattaaacacacgtatatagaaattcaacgtacgtgtttatatgatagagatattaccgattttaggggcgtcattcgacgtctgcatgaatattttgaaaaaaattccattagaacgtagacaaaagttgtgaaaaaataaaatcaaataagaaaatatatttggttgttaaaattgtaccaccatatcggcatggacgaagtcgaggacaagaagagatatgagaagagaagcaagcaagactctgaatacagccatactagtgatcagagaaaacaaaagaggagacaaaatgacaaatgaatgtttttggttgttgctaattataaaggcgtagaagatggggcttctatttatacattaggtttaatgtaatattattagtcactaacaaatgacaattaaagaatattaaaactataagaactttggtcaaaatggttttattgtttcttatcacattttatttgttttggtcaacacattaagatgtatgtaaccaatatttctttatccttttgtgaaatcaaaacaatttaaaggatttaacattcatttcctaaattaaatatataatatgcctttacaagatcattttcaaataaatttcagtctactttcttttgttggtcaatgcagatgtatatacaccaacttaagatttgtttcggtttttagaatttatctttttactaattcaatctgtccattttagttttttttttggtcttatccttcttcctcagttacccattggcaactccaaccagagcaccaaagttggtgttgaaatcacacaaaatttggtgttatagtgtcccatttttttttctcatctccaaccacaacactaaatttacaataaatactattcttatctataattatattattaaatataaaattcttttattttttaatatatttcataaatactattatattatgttttcagtgttatttgaacctttagtttttaatctcaattagtttcatatttatttagatatcttgtacaaattaatattttatattaaaagtgaattcatacaaaaatattaatggtatatttgtctttagttggtaaataacaattaaattatcttacttaaaacaaaatacaaattagataaaataaaaatttggtgttttatgaacagtcctattggagcaagactaacaccaaaatggtgttttggtgtcaagttggagaagcccttaggtgtgcccaagataaagttttatacatatatgttgtatccaaaaataaaactgagcaagctctttcttcatactataattactatttgatagatatgtgttgatgatcattatgcagcaacaaacacaacaaacaactcaagaataatagaagatgagatcattactgtaacaattataactgtaatacacatctaataaccaatcaaatcttctatttagtgtacaaagttggatactaagatcccaactattgccaaaaccaaaactggagctattctctggtcttacaagtgtaaattaagaaccttaaatgtccaaatcatcatcaggatcttcatcagaatcaggatgctcatcgtctgaatctctgaaatatataatctcaccacccttacccgacgaaaccacatcggtctgcaactccattgacgacaatggtgttgtctcaatcttgccatccacaagagatctcctcccatcatagatctcgttcgattttccatcatctgaagaacagagaagtatcaacaacatgttttatccacaatctcaaaaggcttcacagtatctacactcaccttggtgctcaaaaggaagcacaactttttctttctcgacccgttctttctcagacaactggagattgaattgaacctgaaccaaaagaaacaatgatcttatgccatacaacttacgaacaagagatcacattatagcaagagacacagaccaagtaattaaaaagcagatctaggtaacttgccttaggcaaaaggcttttagtggctgcaataacagtatccacagaggaaatgggtgaaaagtttatccccgattgatcaacatgatattcttcagactgtaggtaaagagttacaagagtgttaactaaacgagaatgatagggcatagagagcagagcaagagaaaacttaccattactctcacacgtccttttctaagcttaaaccggacatgaaaccgtcctttaccgaaatcctgatgaaccgaaaagaggttttctaaagcattcctttgcccatctgaagatggacacaaaggttctaagttcgctttcattgtggatatatattcaagcgcatttgtgaccttctcttggtgaaggtcagtgttcaatgaccaaaagacactggaaatttgcgctgcaccgaaaaaaatcaacctttgtagttaaacctaacaaggaataaaactaataaactagtgctcaggtttatgtagcaaagtaccatggcttcgaagatctgttaaaagaccagaaactaatggcatcgctgaatgtcttagcaactcatttacctgattcaaagtttagatatataatcacttctcttttctatagatgatgtctaaacaattagagcttaactcaccgaatcaatggcaacgcagaaacgtgtcttcccagttccaaccaactctgcaccaaagcaatcacttttaatctcatataatcctttagataaagatctaactgaaaaaggattcaatgtaaaagaagtacacctcttcctgcttcaatgattgaagaaaaaagctttttcaagtcactcacacacttatgtaacttaatcaaacttgaaccttcactaaaactagttgaagattgatcaatccatcccaatggatcagtgtaacaatccaaaatacgaatccttcaaatcaaaaccaattgttatcaaacaagtatcacagtgattcgagcaatcaaactactccacaagctaggataatatttagaaaacctaataactcaccatttagaagatgaagagacaacgattcctttttgcttcaacaattgcaaatagaacgaagggctccgcgagaatgtgatcaacacaagacccctgaatcgcaaagtgggaaaaacgaagactttagcagtaatgaagcaattggagatcgaatatagaagaattagggtttaagagtatactgcgacgaggattttccagctaaaattgaagaagatagatttgtgagaagatagccggagacatcgagtccgaaaggggaagctacagtttcttctatagtgagagctggtgcgagttcgccttcttcgccaccatctctgagctttctgaaaatcgattccgccattgttgagagattctagagctctccggtcaaaagagcggcgaggaaacaaaacatcgaaaagttaaaaagggcttttgggctttatgatgtagcccactgggctttgttcaaagaaacactcgttggaggaataaacatcgtgccgtttttttaacatggataaaacgtcaaccactttgtatgcttctcaaagaaacgaaattaagagaaggagaaggttttacgccggagttggagactgatctagatccgccggcgaaaaagcagagccgtcacattcatcgtcggaaatcaagaaaggtattaactgttccttataatcgatctctcactcactatcttcttcttcttccctttccgctattttgatgaatcacttagaaatagtatcgaacatttttgttttctttctcattttggcgatgttcatagtccagaagtcaccatgttcttgtaaatgaggttatctggagtttttatttccgtttatattgttcttgaaatagtgcacggaaagtgttcgacgtatttactgtgttagctcatcgctcgtttctacgtctctgagatacaaagtaatgaaaaaaatggcaatttttcgtagcatggttggtcaattttcatatttacttgtgtgatttgagtggctagagagacaaaatctactgccttcagattttgattgagcatcgttttatgataatggtgaactctattggtttccaagttcttaatttgaagaagctgagaaattttcctctttggcagggtaattctctgtaggatagagagacatggaagccaagtttttccggttcttgaagattgttggagttggatacaaagctagagctgaggaagcagggcgtttcttatacctcaaattgggttacagtcacgaagtcgaacttgcggttcctccagcggttcgagtcttttgtttcaagaacaatgtggtttgctgcactggaatcgacaagcaaagagtgcatcagtttgctgcaacggtaaggagttgcaaaccccctgaaccttataagggcaaaggcataatgtacactgatgaagtcgtcaagaagaaacaaggaaagaagtccaaatgatctctctttgtatgcttcttcttccttcttactctgcagagacaactttcatctatctgtggtagattatggttggatttttatcaataagttttatttggttgtatgagacatcattttgttgttaagtctctttcaatgaaacaaaatgagaagagttcgtcttggaaatatttatgttttgtctaatcatcgttacaatagaactgaaggaaaaacttagagccaatacaaagtcactgcatatagttgagtataacaagccattgattgtgcaatgcagtagtcgattagtcaagcatgtaaatcctggaggcaatgtcttgaaccaaccaatcgaatccttccaacaaaccttcacccgtgtatgcgctgcaacccactatcttccagtgccggcttttatccatggactctaagtttagcaccttcataagcaagaagatgaaactcagtttaacacacaatatacaactcaaaacatatcttacttaacccactaatcttcactgaagttgagaaacccgaccgagagacaaaatgattcaacccgataacccctatgtccaaatcgacttatgagtttcaaaacccttaccttgccaatttcatcaggtgttagtgcaccttgaatatcctgcttatttgctagtatcagcaaagatgaaccagctagcctctgccattaaaaccaagatttgaatatgaatcatcttcaccaaaaacagcaacccaagcttcagcttacaaaagcttttgattgaatagatattgatacttttatgaatatacctcttctttcaagagattgtcaagttccatcttgcaatcatctaacctcctaagatcagaactatcaaccacccaaaccaaaccatcagtctgctcaaagtaattcctccaatacgatcttatagtcttttgcccaccaacatcccatatatttagcgtatacctacacacacattattcaccacaaactcatcattgcctataacatgttcgatgaaattcctaaaccaactctgaagaacacgaaactacaagagcagagaaatagagctttacttttggtagataatggttttgatgttgaatccaagagttggactaatcacacttgtgtcttctccgtttattttcagaacaatcgtcgtcttcccagaattatcaagtccactgccaaaaaaacattccaaaatcagcacaacatgataatgtacgattagatcggagaagattaacgatttaagaatatgacatacaccataagaatacgcatctccttctctttcttcttgatcttccggattatgcttaacagtcccattttttcatacaagagagcttctaagagatacttctaagattgaacatctgatttaggaaacggttttacgcggtggttttcgtcaccgacgacgacggcgatggatgcgatttcgaacggagaagacaatctacggcgacaatgggccaaacattttaacagaaaattgtaacgaaccacatgatgggctttttatatataataaacagttaaaagcccatgtgcgataagtatgggccttgttcttatggtttagtggctacgtcttcacctgggcaaataaaccgaactgaatgtaccgaaccgaaaccaaaataataaaataccaaatttgtaccgaaccgaaatagaaaataataaaatactcaaaaataagcaaaaattatccgaaaatatccaataatatcccaaaataacaaaatatccaaaaatattcaaaacaaaataactaaatggtaactaaattttaaaactgaaagaaccggaaccgaaccgaaaccgaaccaaattttcaaaataatcaaatggatattaaactttagaacgaaaatatatttgttctttgataattttcaaaataacctaaaggagtagctacgccaattgcgcagaaaatatgtttgttctttgataattggggtatatgttagactaatctcaaaagtatttgaatttcttttatttaaggcatctacaatatagttaaaagaatcacagtcatttttggtagaatctgatctttggtctaaaactcaaaaaaatatatatacagtacattaaacacactacatattcgtaattagagatgattgttttggtagaaatttgtaaatttcttttaagccagaaaccagaataggtataaagtagagacccttcccaagctatccgtaaccaggagacaaaagtttctcaatctaccaaaatgatttctcaagctatccgtatataattaatcacttggttacatagtgtttaattatatacaaatttcatagatggtaaaattctttctctgcctttgaatctcgtagagtacttttatacattaaaaactgttaaaatataacactcatcgttgcagattatatatagattcgatccctctacggttgaatcactttgtggattagaggttggttttctcttgtgtacttaaggttaaatcatctataaacatataggtttagaaaacgagaagtagaacatacacctgaagaggataagtggaccatacgtcatctagaaagtgaaacggtcaaactcgagaatgaaacgttattaagaaacaaagaaaaagaaacacgtaccaatccgatcttgatccttttgagggaatgttttgttctttttcttttttgttgttttgctgtcattctctttgttttattcttcttcttcttcttgtttgagtgttggagacggaccgtatcataaagtacggatccaagatgcgagttaatcatcagtaatttgacaaacaaaaaacataattaatggttagatcatatttaatctcttattctttttgcatgcatgcatctttgatatatacgtacaaaataaagtacatattattttattttttgagttcattgtttgtttgtgtttatgtttgaatttaatatgtatattttaactaaattcacaattttaatatgcttataaaaatttatttattgattgttaatgcaactaaatgaaagtttgacattttcaatttttattttgcaaacatgttttgtaagaatgaaagtgaagaaatattaagtataatgtttaaattctttttttaacaagtaaattcaaatacaaaattaacgtttgtaaattccgatcccagacccagatgattagtgtgtaagacatcaaatgcattttaatcacatttgtgcataaaaattgtatatttgaatattagatgattcaaaaaatatttatctcgttctttaacaaaaaaacaatataattatgtgatttataaacggcgttattgccaaagccgaatacttaatgtcttggggtaatcgttatttaggtttcttgtttcatgaaacaaagtgcatgtgttctttaattaaaagcggtagtcctcctagttaaacaaaagagatcaccaatagcaactccgatttgattctctatgttcgcttaaagcctgactcttcctctctttaggtcgatctgttgaatcttttaacattctttgaatcttgtttgatcatattatttcctgactaaagtataatttcatttcatatttggagtgtgccacaagaaaataagaaatggacaaagtaaaggtattcttcatatttacggcaaaatatacggtgaccacctataattgtaattataactcgaattttggtctctaactttagaacgagtcctttaatcattggtccttcaaccaaaaatgcatatatatttcattagaaaaactatttgaagagatcaccttacgtttaagccaacttgctttcgtgttaagcttatcaaagacttgatatttagttatttactaatattcttgtcttggcgaaaacatcatctactttaagagaggaacgaactaagtatataacccaaaattgggaaaaggaagaagaaaaaaagaaaaagaagtagcaattgagtgtttggtgtaatatatccagttgagtttattcgcttttgtactttttttgctttaaaaatattttgagttggagtttgcttctttgactgatcaattgaatctctcgctccccaagccaaagaaagaacacaagatgttgcttttgatcattgccaagaatctcacttcgtaattctctttaactttaccctttttattttcgttcttagcttaaacagtactatttcaccttagtttctatcatctttaaaaaataataataataattctactatcttaagttcttaacatatatattttcatatatacatttttatgtctaagaagcttcaatattagatctactgttttcaattccctggtccaatagtagtgatgactgacattgttctaaaacgacaaataactaaagacttctctaaatttggtttttgaaagtatatatgtatatatgcatggtagttccacattatcttctctacccgaaattcagatttgacaacaaatatacatagttcaatatttttgttatggtgatcgatatcaaaatagaaaatgaatgtttagacgagggatgagtgaaaggagcttggtaatctaagagagacaagatccttagaaaaccgtgacattgtcactcacgtgggcctcttttgaccaaccccgtccgacactaaaactgcagatacacaacacttatcattattactttattgtatcggcactaagagcatctccattggtgataaatggagatgtcttcccagttttttaatatttaattaaagacacaaatgaagaaagagaaacaaaaatgtctttaaccagacactgaagacatctttgaagaccctcttgaactatgtgtaatattctgattggttttgattttcttagtttaatatttagatggtctcagatgaagttgtccaatgaagatggtctaaaagatattatttcataagatcttttaagttcatcaaaatatataaatgccaaatctactgtatttttcttactaatgttaaactacctttactagtgtgcttgtattcacttttatttgaaacaaacatcaaaaggagactactcatttcatgtattgtttacatggaaaacttgttttgaagatatccaataaaaatgaaacgagtcggagataaactacgttttctaaggcgaggaataggattagtaaaaatatcatgaatttaaatttggatgtaaacaactgaaataaatatactcttggttgatgtcagtgtggaattcttgcgacttgcgagcacacataactcgccgacgaagtcttattgcttactgtatcaaatcggcgtcgaaaatagaattgtcgaataatttgtcttccataccaagaaactccgacaaaaataatattcaatgatttaaagccctagagaatattcattttcattgtagaattgttgctttctttagataaagtaacaaataatgtaatctgcactacattaatagattcgatcacatttagctaccacagaccaaattcccttttgtcgttacttaagtttccaactgtctatatatatgtaccatgtctcagtttgtaacttgtaacttaaatcacaaagccaccaaaacaacacgcatatctctatccattttttttctctctatctgtagtcttcaatttcatgatgggataccaaacaaactctaatttctccatgtttttttcctcggaaaatgacgaccaaaaccaccacaactacgatccttataataatttctcttcatcaacttctgttgattgcactctctcacttggaacaccctctactcgtctcgacgaccaccatagattttcttctgctaattctaacaacatctccggcgacttttatattcacggaggaaacgctaagacttcttcgtacaagaagggtggtgttgctcatagcctacctcgccgttgtgctagctgcgacaccacttcaactcctctatggagaaacggaccaaaaggacctaaggtaattaattaatagatcatgtacgatcagataatgtgataagtgtcaatgccgagatgaccataggtccatagataaatatgcctaatgaaaatagtacatggattgttgaaaaagtatttagattgtaatgaaagtaaaaaagtatgattttggcaattcaaaacttcaaaaaactcaaactgttatataccatgcggaactattctatgaaaaattactattatttttctaatcaaattttgtaacatcatatactttcttggttgttttatattttttttttccataaatacattaccctaaactatttttatttttatttttttgttaataaactttaccctaaaccataaaacaaaataagtgatttctttttaaatctttttaattcaagttgtataaagtctataaagttgttccctaatatttattatacaatctccatataatcacatgtctataataactacattttcaaagatattttggatgtaacatatacaatgttaacttggtgcagtcgttatgtaacgcgtgtggaatccgattcaagaaagaggagaggcgtgcgacggccagaaacttaacgatctccggtggaggttcatcagcggcagaagtcccagtagagaattcgtacaacggaggtggaaactattacagtcatcatcatcatcactatgcctcgtcgtcgccgtcgtgggctcatcagaacacacaaagagttccatatttctcaccggttccggagatggaatatccctacgtggataacgtcacggcttcttcttttatgtcttggaattgagtgtcacgtgagcaagtccgacttcgatcgccttctttaccattttgacgagatgaagaagaaacgttaattatataaatcatgatgatgatgatgaaaagttaattatcatagattctatcacacaaagtaaaaccagtcttggtcaaattcattattgttatagttttttttttcgactctagctacttgtgttttcttttcacgacttttttgaaagctatattggtgttaatgataaatacgtagtttataacccttttcatgatgtttccacttactttgaccgtatatgatacatatatttcaactttacttcatatcgtctttttaagtctttaacatttttcgatgcaacgttaagtgatctagttttgcttctttttagcaaatacaaataccgtcctcgcattttatttcatatcatatgaatgcaaaattagccaaaagggtattgttacttaaatttggcggattttctagctcttttcttggttcctacacaaaaaaaaaagtatttaaaagacaagtttgagaattgagatcacttataagggagacaaatctgagtgaaacaattagtgaggggtcatgaggcaaagtaatgtaagtggaaattacttgctaaaaatctgttccgggaagagtgaatttcaaactcctaatgaaatgtttttctatctacaatcttggatactataattgttgaaagagcttgtagtaatggtaattatgtctttggtgagtataaaataaagtcaactgcttcagaacattaacatgttcttgacaaataacataaaaatatgcttcccacctcagcaaatatttacccaaaatctcttgcaagtcgttctgtttttgggttttaaaaagattaaagaaaataacacggcgaagcttagaaaatgattgtgaatttcgtattactaaaagctgagttcgaaaatgattgtgaattttaccacgaatctattttatttgttaaagaaattttaccacgaatctaggccactcgaagtgacaaagagcagaccattgacaaatcgcctttcatattgagaaccgaataattgatacagtttatttttagtttgtgattcaacatagagccctcgtaaaatattcaacatcaagaaacgctgtgttttcatgactcatcagttcacaacactgtaatatccaaaccaccggggtaaatgattgcattgcatgcacaaatgcacacaaagacaactacacaatacacatgtacatgtacatacatgaagaaactaaatgaaccttacaacatgtgtacattcgcctacatatattatacggcgcctttattgatataaattgcgtacttaattaggacaagatggaccattgatcaatgttgagaatttctcaaccaacactgcaaaaacaaaatcaacaatgtattatttatttcagcttttataaagtttagaatttaaattaaacagacaaaattcaaaaatgttaaatattataagtgcataagagatacaaattatatcaaaattgagtaaaagcatattgttctaaacaaagttatggtaaacaaagtaaactatcatttgtttaatctattcttatactacctagagttagtatttttttttaaatagataaatcaggaaattagtcataacaacagataaaagtttcaaatataattatattcgttaacattatgttcaccttaagttcttcactataaagatagtatctcaaactttaatgcttgttagtttctatataaagttgaactaaaacacaagacactagacaactaaaacaatcagacacgatcatatcattcaaaacgtacgtagtgcagtcgacagtaggagaagcatcaacgggcaagctcgcaccacaattgctagcaagggcttgagccaattcaggcttcacggtaacactattagccactgacttgatgcattgacaagctgccttcttatcggcagatgtggtggttgccgccgctaaactcttaactccgtcgcaacaagtctccggagggtttccacttccgctggtcaagtagctcacacatggctgcaaatcctgtaacacaacactgcaagatatagcggattcagaataacgaggtatgaagaatattccgagaacggaaatgatcgctagacatttcaatacattcatcgttgaagaaattgagaaaaaaataaataaaaatcttaggggtttctttgttgttgctaaatatgtagagtggagacgaagcgtttatatatatggcggactaggaaatttatattaaaataagagaattagtagatgttagtttgggttgatggagtgaaatgaaaatataagtttcaacattttggtatgatatacttaaaaataaatattatttgatctaggtagttaggttatagagatttcttgtcagtttgggtttgtccatattcaatcaacttataatcgttttaggtacaattggtgactacatctacaacactcaaagatgacgtgtttaattacttaagtgttggaggttagtctagaaatggttcattaatattaatcacagaggagtagattagataaattatatagtacgtaaattagatgtgcgtaattgtctaattgcgtatagctcaataattataataaaatattttcagaaaaccaattgagaatataaaaatcataggaggtatgggacgtgggctttctttgcagtagtaagaaagggaccaataacatccggaacaaaacgaagatgaataatgtagatgatatatgtctttcagatatttattcaatattacaatgatgtaaataattattttacaaaagagtaataaagcatttataatttattttattttttatatgttatacacacttttcatagaaaacaaaataaacaaaaatgaagagaataagcacattatttacgatttagccacaacctttttgtgaattttaacaaaaacattttttgactatctagtaattaaccccaaaaagaacaataatttttgtttacagcataccgatacaagtaggaagtgcagatttccaattctgactagattcagagattacatgcaaagcaagttattaagaactccatcatctctaatttttccttatttaatttaaaatgaggcaagatttcccttgataattaatactttaatagtttattagttttggttggtaactttagaaaaaggtgaaatcttcaaacaaaatttgtatatacaggtgtaatagaatgatagtattattacaattacaaaacttattcttatacttcgaaaacttaaatatttacataaaagactgaagaaaaacagtttttgttttggtctcttttgttattaaaatgttctagttactagtgagtttattatgctatttggcaagttgtcacttatcattcaaaacgtcaaacaagatatgtatataaaatgtgtaaaacaataaatgcttggttgaatataaacaagaacccaacaccagatacattataattaatcccaactcaagaagctttaaaatcttcaccttccatttgctattgatcatcttcttacatctctctccctctaaatatatccaaacaagaacgaaaggaaaaagagtacatacaatggtgaactttgtggatttacaaaaaccattgttgtaccgcctcatgaaattggccggtgtcattccttacaccgtagagcttgaaccagggacaaagatgaacttctggatcccaaaagaaaccctaaaaaaaaccaaaaaatctgacaaaaactttgccgtggaaccccaaaaacctacgaaaccagtcctattgttcatccatggctttgcagccgaagggatcgtgacgtggcagttccaggtcggatcattagccaagaagtactcagtctatataccagacctcctcttctttggtgggtcctactccgacaacgcggatcgatcaccagcgtttcaagcccactgtttagtcaagtctcttcgtatcctcggtatcgaaaagtttactcttgtagggtttagttacggtggcatggttgctttcaagatcgccgaggagtaccctgagatggttcaagccatggtggtttcaggtgattactatattttggatgactcaatattttgcgagtggttaaaacatgctacaatgttttgcgagttttggtgtgtcggttttcctaaaaccatggtcttggaaattactcccataccgcgagttcaagatcacatttaacactcctcttttcgtatatcaataatagtaattacaagataccgtaaattattctaaaagtctattttttttttatatttatacattgtaatttcattattaaaacttacatacactaagaacaattttttctttatcaggttcgatactcgcgatgactgatacgatcagtgagtctaatttgaaccagttaggatttaagtcgtcggcggatcttttgttaccaacttcggttaaagggctcaagactctcttcacccttgctgttcataaacccatgtggttcccgaaacggctcttcaaggatttcattgaggtatatacctactcaaactctgccactggctctctatagtataatttttcttaaaaacatatttagcaactttattaagtatccatatggtcaaatatggacacgaaattgatcccggagctcgataaagagcttgtcataactagattacaaattccagtaataataatttaaaaataaatagtaaatatggaatcagactatagtatagctgtaagtactagtagctatcttgtcgttttagctttgttttacaaactctaacgacaaaagatagacaagttagtcatatatatatgtttgtaaaagaaaaaagaaaaattggtatgtggttttatatttaactttatacctaccgagaccttttatttattaattttgcaaaaacttatatttatgaactcctaatcattagttaagaatcagtttggtcaggcctgggcataatacccgaacccgaagaaccgatccgaacccgacccgaaaaacctgatgcgaacctagacccgaacttttaaaatagtctaacgggtctaaacttcaaaacccgaaaaacccgaatccgaactcgaataagtacctaaacatatctcaaatataagtatatattaattatatttatacttatatatagaaaatattaggatttttttggatattttagttattttgtgtatttttaaatatattcaagcaaaattacaggtgttgttttagaaatttttgaaattttcaagtaatttaatagatttacatacaaaattttaatatttcaatatataaataaacccgaacccgaacccgaacccgacccaaaatcttaaattacccgaacggatcttaaatttttaaacataaaatacccgacccgaatatccgaacgcccggggctaagtttggacgtgctgtcgtaatatacattcttttgcaaaatgtgaaggtgatgattaccaataggaaggaaagagcagaattgttagaagctttggtcatcagcaacaaagatgtgacaatccctcgttttcaacaggtatggtcatatataaaataatatttctccatactataagaatgctatatatatttatacaacttaaatctaaaatataattaaaatttactacttaacgcatcaattgatattattattcttttttggtttggcagaaaatacatcttctgtggggcgaaagtgatcaaatttttaaccttgaatttgccaagagcatgaaagagtaagtttcaatacagtacttttttcttctttaattacataaatttagtctcgtttatattttgttttaaaggcaactaggcgaaaatgcaacaatggagagtataaaaaaagcaggtcacttggcacatttggagagaccttgtgtctataacagacgtctcaaaaagtttcttgcttcagtttactccgaaaactaatttggatgtaatcgattctcacatcaacaccgaatgaatttatttatcttatttctttggtttcagttcttctttcaaaataatgtaacctgatatattatatttcataaaataatctatggttcaattctatgtcactagtattttgattttctatgaatcagagaatgaggatcttctagttatagggcctaatatctatacggcccaattacaaaagtgtcaatgggtccgaagacatattgaatccactaaaatgttttttttttttttttctatcatcaagaatttaagtataagtaaggaaagtttctcaaaaaaaaatatattaatattttaattaagacatatataataattgttatttaatagttgaactaatagtacgatgacaactttccaaattggatgacaatagattctcaaagtttctcctacgagaaactcaactctcattctctcttacttttttttccttctctcttactttttattttttagttatatttttttgtcaggtatctcattgagagactactggtggagatactctaaatatatctgaatacttgccttattttcaactactataagcatacgaaataaccctttcgttttttttcttctcattactctcacatctttgttcttcttcttgaggagaagaaccactgcatattcttcttaaaatctaatgaacataaaatcaaatttcccttaaatcacttggcttggctccaccagattgtcattgagcttcaagaactcaaagtgagcaagttggtgcgtttcttttttagtctcgtttagctttcatttttggagttcttttacttttcgtttatctaggtattaggtatatagtttttgtttaaagtttttttgtttttgttttttttgtttttgggttcatttcagcctttcaagtatgctagtggaaaataaaaattaaaataaatactgtaacatcagttatgaataaattattgacaaaaacgagagagtaatgatattgtgtgactttcatttctaaactctcatcaatttctcagttttagagaccaaacacacaattttttttaatcaagttttcttcattcttctctacacttaataattttaagaaatgtcttagaagtaaatagatcttttgttgcatttatctattttaagggtgagcttaatgtaacacaaaaataatactcctagtatttttaataagcatgattactttactgatttacctgctgtcgtccaactactagtaattagagtgtcatcaaccatagtaaaagcaattaacactcgccactcggtcaaagagtgcaagaaaaaaggctggggaactgccacgtgcatgcccagtgcattacacgaattttaccatacaaacatttttattttatactctaaaataaatataattatagcagatacacaatagtatacaattattttaatatttctcttatctgattgctcggaaattgatccataactagttgtcattgccgacatgtttaagaaaagtaaaggttagagaaatattttaacacaatagcaatttaaattcatgtagaaaatattctgttaccagacagagaatccagatgcattacccctggtcatgtagatatatatttttaatgtatttttacgccagttctgtttatctatataaattatggtgttggtatataaaataaaacataacgaacaatttaatcaacattatgttagaattttttggaaattttaaagtcataatataaaattttgtataccatttttggcatggttttcttatatacgttagagcttaatcgatcacatataagttacaatcagttatttatttttcactatatcataaaaattaattaaataatttttaaccaacatagtaacatcatgaatttttatttttgtgcattatgtgttttacatctgtaatgagttataatcacaaggattaatcaaggagaaaaactttcaagatggaactttccactcattttgattagcatatgactttttgcttttaaagatttttttttaatagattcttgtgctttgtattcactattcaacatagtttcttcttaaatgtcatgtcatccaaaaataaaagaattagcactttaattgtttaatcaatttgttattttagttcttacttaaattgaaataatatcattaattgtaaaaataatatcattaatataacatattattttatgtttaagtaaaaatctagcactttaattgtttaatcaacaaactattagctagttttttaaaatttataagtctatttttagatataaatttcttgttgtaatatattgctataatctaaaaaggaaattggcctctatatgatgagctatgattagaaaataacatgttatttatttattttgtatgaaacattttgaacaaaaagatttttaatcattttttgaatgacagaagtcattcctattattttcttcaaaatttatgttcctccttactgtatttttttggtatttttttgtctggtccaatgttcctccttactatttttttttataaaaagaatcactaaattactcgaccaaatcataaaatgttattaaatgaaacataaaaaaatatgttatatcaataaaaataataatttctactaattgtaaaatagattatcattacatatatataaatatataatcatattaaatagatatcagtaatatacttcaaaacaattatacttaagtttcaaatgaggctttgtttcctttataatcctcccttttcaatttattaagattttgtgtctgtttttttcacatttaaaaaatgaaagaagcctaagttttatttatttttcataggatgttatgaatttttttgtataatgataaatgttatatttaaaaaagtacaatgatagaatgatatatactagtttcttagatgatagttgtaaactttagaatattattattttcctctctcctaaactttgatttttttttcttctaaaaaaggcattattagaaattaagaatctcaaaatgttagtaattctttttcttcacgaagtactagtattgtttattgtaaaaaaaatcaagttagatttccccgaacgtgtggccgcgaggaacagcatatgggatgagatatgtcgcacatgagaaatgcatatagttacatgtatctagactgaccattcaatttaaatataattgttcaactaactaaacaaatgataataatcctgtatgtcatcaacgaatcataatcattatccagcactaaaatcctttttttgttcttctatcatggtctactgatcttttggctccattttggagaaatcaaccgtaactaaaagtatatatatatatatatatatatatatatatatatatatatatatcttggtttgaagatttagttttagttttatatgtcaagtagaacatcattcgtccactttctgttctttttttttgttttgattttatatttattcttctaaaccataattctcatccattagatacttattttgaatatcttaacaataaatattgttattttaatgtaacttacactaaaatgaaaaatttaatattaaatataaattgacaagtggaagaaaagcctattaagaatttttttcataagtttttatatattaaaagtccggtaaaagctctccagtttttcccaaaaaaataaaatgaaataaagctctccaatgagaattgtgtaaggattgcattatgaaacacaaatccggtcaaaacactgtcgattactccattttttttatttattgtatgttttcataactttaaacattaagggtgtgtacggaaaaaaacattaagaatgtgattggttactctaattagcgcaaaataaaagagttgagaaaaaattctgcccaaatcatcttattttggttgtctgaattttaaaaatcagatcaaagtagataagagaccataccatatattacaaatatttcgaccaattcgattttcgcttattttacaaacaatattttggttatcttatttattttacaaagtaaatgttcataaggtattcaatctttcattttattttacaaacaatatttaatgcatgcaccataatatgttgcactgatcgtactaaacctacttacatcgctaattttacgctaagccacagacactaatctcatcaactatactaattgttgacattcgacttaattaacacaagataattttatcattactcaacattaaaaaccaataaaagaaagatgtattgcgaccaatgtgcggacactgtatgatagagaaacaacgtggcactgtctgctacaagtccacatcttactttctctctccatctcttgtttcttagtggactgtgttattattattattggcacagaccaaacccacttggctccttcattagattttttttctctctcggaaattgatgggcaataggaaacacgattctctaattctctctctagaaggaccaatagtgtcttcttctctcctcttttctctttctccattagtaacgacctaaactttattttcttttcttgatctcttcttaaatggggttagataagttttcccctttaatttagttgcttgtagacttgagattagtctagtaggttttggtgggctatcactaatacaaaagtcaaagtcaaaatttttaaaaaggtttcaactttggaagagatatttatcatcttcattttctctataggtttatgagaagctaaagctatgatgatttctttaatcaaaatagcttagggttttggagagagattactaagaaagttttaatgtttgtttaagagaaaagttatatattagggttttctttattcagaagcttcaagatcagaaaagatggaagttagagagaagaaagatgagaaaatggagatgacaagaagaaaatcatcagctctagatcatcatcgtcttcctccgtacacttactcccaaaccgccaacaaagagaaacccaccaccaaaagaaacgggtcggacccggatccggatccggatcttgatactaacccaatttctatatctcatgctccaagatcatacgctaggcctcaaactacttctccggggaaggcaaggtatagagaatgccaaaagaatcacgcggcgagctccggtggacacgttgtcgacggttgcggcgagtttatgtcttccggggaagaaggcacggtggagtctcttctttgtgcagcttgtgattgccaccggagcttccatagaaaagagatcgatggtttgtttgttgtcaatttcaatagctttggccattcacagagaccactcggaagccgccacgtgtctccgataatgatgagttttggtggtggtggtggttgtgcggcggagtcatcgacggaggatctaaacaagtttcatcaatcttttagtggttatggagtggatcagtttcatcattatcaacccaagaaacggtttaggacaaagtttaatgaagaacagaaggagaagatgatggagtttgctgagaagattggttggagaatgacaaaactagaagatgatgaagtgaatcggttttgtcgtgagattaaagttaaaagacaagtgtttaaagtttggatgcacaacaataaacaagcagcaaagaagaaggatttgtaagagatttctatatatatatatatactatttttacttctctttgttcaacattgctttaacttaaagactttgtgtttattgtataacaaattgattttagagctcagcataacggtctcttatttctcccgcaacttgagaagcctttttctttgcggtttcataagcatattttgtggattctttggctacaccgtacttttcgccgactttttccatggcttcttcaaatcctctagttgctccatctttggcattgtgtgatttgtctttcatgtagtcaatagaatcatccattgcttctcctgccgtgtctttggcactctttgacttttctttggctccttcataggcttcaccgctcttatccgttgccatcctaatcacatcaccggccttgtcgtatccgtaacccgccttgtcatatgcaaagtcttttgcatcttgggccttttcgtaagctatgtcttttgcattgccagccttcttgtaggcgtagtctttggcctcaccagctttctcataaccagaatcctttgccttctgcgcactgccataagcagatcccaccttatcataggccatgtccttggcattgcccgccttatcataggccatatccttggcaatgccagccttctcataagccacgtcctttgcatcccccgctttatcatatgccatgtcttttactatgcctgccttctcataggccatgtccttggcatcaccggccttatcataaccagagtccatcatactctgtgcacttccgtaagcagatcccactttatcatatgtgaaatcctttatgtgttccgccttctcgtaggccatgtccttcgcatttcccgccttctcatatgccatatcctttgcattgcctgccttatcataggcaacatccttcgcgtagcctcccttatcataggcgaaatcctttgcatatcccgctgtctcgtaggccatgtccttagcattgcctgccttatcataggcgaaatctttggcatggcccgctttctcataagccatgtcctttgcatcaccagccttgtcatatgcaaaatccttagcatagcccgcattttcgtatgccatgttctttgcatcaccagccttgtcataagcgaaatcctttgcgtactctgccttgttctcagcaaaatccttggcgtaacctgcattgtcgtaagcagagtccttgacgtaatttgccttgtcataagcatagttttccgcggcttgagccgcttttcttgcttcatctttagatttttgataaattcctgtttcttctttcttagtaccaaatccactgggaaaagaagtaaaacgttacctctcaatcactcacttaactacggccaaatacatgcgtaaatatccaatgtagtgaacgaatctaaagattccaataaaaaacgcaataagacattactaatctcactaaacacgtacttaacatccaaatgagagaaagtatagactgaattggatcaacgtgatggttacgtaaaggacagattcaaccacaggtgtgtttcagtttcggatattagatatcacttacgtggtgattttgtcggagacccaaccagcccatgaaccggtcttttccttcgccgtcgactctaaccatttccccaatacaccctcttgccacgtcaacaccaccactaccacaaacaataccaatgccgttcttcttctctccatcatctctttaaccagtgattccgaatcaaacttctttgaatttgctatgaccaatttagttttgtccctttttaaaaagttttgatcctagttccaatgtcctcggaagttatagttatagagagacgttcgaatccaaagaccagaggtctttccgagaagcggttactgttcgccacgtgtttgcacgaggttacgtggcaaccaaggatgcggtttggttgtggagctttctctgagtattcaccacgtgtcctattatacggctggccgtgttcccctcagagaccacactttgaaacttgaaagcaataagattagagaggtcacatcacatgtgtctgaagcggtttgtataaccgggaaacctacgataaaaattggaccaaattccagctaaccgaaattgaaccggttactcaaacaatgttactatttcagtttaatagaatcgaaacaacggagtgattcggtgatacaaaaagatctacggaaacgattggccaccttcagtcgcaagtctgattctctggtgatgttcttcgatcttataatccacaatttcttcaaaaagttgggaatccaagacacaatcctgtcgtccatataccgcagcttgaacaccggcgacaagcttagcgatttcacgaccagaaaagccttctgtcttttttgcagcttctttaatcacttggtcggttaggtctccttcaatggttatcttctgtgacttcttcttcttgaacaagttgctccatttaaggtttgagtctttctcacctttcttgtcgtcacccattaggtacttgttgagatagagcttgaggagcttgaagcgttcttcttcaccagggagaggaaactcgataacttcgtcgatcctgtcagtgactgcactgtcgagatctccaggtctgtttgtagccaggacaaggactatgtcccgcgattgatcaccggttcgaaagagcaacgcgttcagagcgctgcgctgagcctcactcatgtaagtgctgttacgtctgtgataaaagatcaagaatttgataactattaagacaagagaactctggagatacagtagaagtaacaatgcgcaagaacaatccactgatcctactgcgactatactacattgtggaattgtgtttgcaatcagaatacaagaaatttttgttcaactatattctatattttagaggtctagtagatgagaatcagtaatataactgaaggcttgaggtaaaaggtgaaagcatcttactcgcataggaaagcatcagcttcatcgatgaaaagcagtaaccctttgtttgatttcttagcccaatcaaatatttcatggatctttgtaacagcctgtgcaccaagaggagcaacatctcctcctgtcatcatagcataatcaagaccctgcagaacgaaataatcaaacagatgtaaataagtgaggcatgtaatggttcaatctattgtagattcctgaacttggctcaggttctctgttgcataaagaaaacaaactcaccgacttccgagcaatctccctcgccaccatagtttttccggtacctggaggcccataaaacatcatgtttcggaatggtgctttatgtgacttggtatttgctgtggctcttgcaagacgctcaattctcgtcttcaaagaacgatggagaattacattttcaagaggcttttctccttctgcagatgctgctgcccctgcagctgtgctaagtttgttcttaaactgagacactgagcctgcccatgggaatcggcccatggaagattctctgatcagtgatggctgcccaagaattctattgatataaccccaggtaaccctagcaccttctctgttgtcaagaaaagaacgattaggcttcttaaatcacagctgtataagttttaaaaatgcgataataatcaatttacttatgttaggcttcttaaatcatgttaagcaatgcataccgagttgtgtaaaccccagcggctaatgccgtaactcctccaacagtcataatcaatttacttcgatcagttaataaggtccttactcctcctgccaagatcatatagggaagtgaatatgaagccacatttccaaaatatcagaagcatataacttcctagagaagagaatcataattggccaggtgattgtcttctcaaatattcctcagaaggttgcttaatttcagaaaaatccaaggagaaccacagatataaaagaaactagaaactgagggaatctaagtataacaagatgtgtatatctaagggacaatgcttataagttccataccttcaatgtgactgaaagtcgtgttgattgctgcaagccatttctccctttcaccatttatcttatctagaagcattcttctattctgctcctcagtgagtttagcttcatgagctcggccttcagcctcagccatagctttcacgcgaattgtttctcgctcaagttccgctctctctttctcagtctcgcgctgctgtgcttgaatctgttcttccgtggcaattcttgctttctctttccgtatagaagatgcttcttgcatcgaaaccaattcagcattatgccgtctctgagcttcattatctgtctgcaaaatttccaagtcaaagacttcttctcagtaaagaaccctcacaagaccttaaaatgttacacataggttcacagtttctttctaaaaatgtacctgcattctcttcctggccaactcatcctcatatctaagattttgcgctttcgcttgggcctgttgctgcactaaatttctctgatcctctgccaatttccgctgtctttcctgctcattcaaagccccataaaacaatcatatttgtcgcttcccagacttaaaatgttacaacataataaatttcagattctgcaacgaatgttcagcaaaactttgaagcaggaaacaacaaagacaccgaaaagacagttgattccaacatcctaataagatttagagaatgtaacttgaaagacaatgcaatggaacatcatatcaaaacctccatgctcaaattttcaatatataacataaggaagagcaagttactaacaatgtccttgctagcttgaatagcttcattatgttctttctcagccgctaattcagctaatcgagtcttctcctgctttcgcattagatcaaacacctggtgaacacaataacatgtaagcaacgtctcaaaacacaagaatcaacgactctagagcttgttgatttctcgaaagagattcaattatcacctgtttggaatgaggagagctattgatttcacgaagagctttagcacctctttccaatgactcaggatcgaaaccagatcctttaggctcatcggagtcaggtttagtctccgatttagaattcgaagaagacttatgatcggttggagattcttctgccggaggtgaagaagagaagaaaggaaagcgaaatcgcgagtcagcgtaagcgcggttctgtgacatcgacattgaagtgaacgcagcagctatcgccgccgcggaacataatctagaagcagccattgaaatacgactaaaaagcagcctcctaaaccccaagcaagaaacaaaagtccttttacaattcaaacatttcggaatgagaaaatggtactctcaaggttaatagaaatgattgtgcacagtcgtcggaaatgtctctccggtaggcccgagcataaacccacggtggctaggttatgagttatgactgacttgtgagctatgtatgacacatcggttgtttggagactactcgaatccagatatgggccaaaaattaaatataggcccatattttagcccatttgtaaggccatttttcacatttgatcctttgacaggagaattgaatctttgatcgtttttttttcccctatacaaattgtgtttaataatatcgtttatattagttttacgtttaagcatattttcgtttttttgtccataaatttatttctatatagagaaatatataaatatttgagcttgtagtgtattagttaattttcaacaactgaaatattttaaaaataaatgtgtatattaagaaacaaaagagtgtaaaagttcccgcccaaaatttgcttacataacgtgtagttcacggtaacccgaaggatattagcagtcataattactccgttaccgaacttcgaaacattcatcttctcctctttcattgaacatcaataattttgtttcgtgaatccttcgatttcagtgtgaagattatgtttattgatctcatgctacgcattgatgttggtttatagtgcaaaaataagtcttgcttttctctatcaacttcgatttataatttatcataaataaataataatgacttcgacttatacgaagtttgatcgatcaaatctcgatgatttctgatttttcgtatgcttaatccataaaactgatagaatgttccgagactgttactatatgaacttaaattgattggattagaataggatggatattgagagagattattatatatctgaaaaccaaacagaaattaaaaaaaaaaacaaaaaaagaaagcaaatagaatataagaaatacatcgaaattcttagttctttatagattctctcaaatgtcctcttcttgatagaaaggcattttattaatggcttcaattagtgttacggtacctaggttgtggatagcgtcctgactcaatgtcattcacatccctaaggagcaattcatagtgtcgctttacttcttcagttgatttcccaccaactgcccttgcaattttttgccaacggtcaggagtgtccttgtcgaatttcgccaacgccatttcgaattgcttgtcctctctagctgtccatgatgaggtgctcattgaactagaagccattagctagtgaaaatgtggatgaaaagagaggaattgagaaggttggtttgtattgttgacggatagagatgacttgaattggtttagtttgagggagtgtggagctccttatatgtaggaggagaaaagcaatgtgtggggttataagccagttggaagaatatatactttgaaatgagagatttttagaatgaccattcttttagctaccacataaaattttagtgaagggacaaaagttttgatagaagctttgatatgataatgatcattagagtctagtcccttaaaggacataataaaggtttaatagttttagtggaatgagattctcttgaccattgctataaggaaattaggaggcttcctttttcttgctagtgtccgtaaagtttaccaataactattggaccctcccttacctctttcagcattttggatcttatcatcatcattagtgtcgaattaaccccctatcgtatccgatactattcataaagcatgtgattgttaagcttgtgtttaatattttttgcaatttttttttcttgtatgattgaaaataatataatctctatagagttcctctttgcattgttggattagcttagttaacttttatattgtttccattgtgggattgtgattttgccattcttggctccaaagatcgttaagcaatttacatgcttagaggtcgccggttcgagtgacgtttgagatgaaactaatattacatgatgtgatttcgggctttggagaattacgggtttcggcttaaaacctcatggtattcaataaataaaaaaagagcaacttcaggtaatcttatatttactgaaatttattgagtatctgttgtagtgttgtagttgtaggtgaattgttaagcttgtgtgtaatatttcttgcaatttttccatcttgtgtgatcgagaaaagtatatagttaagtacttctttgcagtgatagatgtcttttcgatctgattagctctgttgaagtctttaatcaccggagtgtgacaaaaagcgaatcatgccattattggcttcaagatcgttgagcaacttgggtaatctatacatttactggtttatattgagcatctatagaaaaggacgatgattttgctgaatattaaacactatttatgtctggtgcctttagctagtaggtgtacgtcagaacatgattccaattattagacaataagacaaatctcagacgacacacagtactaaaaaagatgtactttggcataatcagagattttagccctctaaaacatgttcattcgtgggtgccacggaataacattctttgacaatgatatgttcatttattaaaatgaaaaattaatcaagatgattcctcactaaccaaaccatttttttcttttcttttgtgcagcctcttgtaaactagttcatcttgtgtaaatctctttgatctcttgggatgattgagttcttgaatcgaagttactggctggcctagagatgtgaaaagaagtacatttatcaaagaatattcaggtgttcttgtcttctttttaattttcacctttgaacatggttagagaatcggactagttctccaaatcttgggatcttatcttcgagagatcttctgcgcctttcttacgcttgttgtgcttctttgtttaaaacatttatcaatcctcagattcttcgactacagagaaggtgagaagttatggaactttcgtacctaaagttttactttttagtaaatgtgtttaagcctctaactttgcgtggtagctccacttgcatgtagcagtttttttttttttttttttggcaaacttagcagtgttttatttgtgaccattttccaaccatgttgttttttttttttgacagctatatgttggttattacttatatatgaaaaataattgagtaaatgacattaagaaaacaaacatatatggagttatggactctatttttctctgaatattttgctttgtactcttttttttttgataaataaaaatgcaagagatattaattgttgaattgaatatctaaatatatatttatttaaattacaacataataaataaaagatttactagtatcacgggttcttttctagtttcaataatacaagtgtacatttggggaaactaagaccatgtacatgagtgatatttctatagtatcacaagtccaaaaattatttttatattaataaaataattaaaatgaacttgatcagctcaatgatgtttttgataccagtatcatgtgacgtgatatcctctgattggtcgcatttaccaaaaaggaaaaaaaaaaaatctattaaacaaatattataaataatattaaattatttttaatgatattttataattatcacttataaccatgttctaagcattgtaatatcatatttctgtatgagtttgacacataatcgattgaaaacatataacgacaaaaaaacacgaaaacaaatactaattattttgagaaaccgtgtccatgtgaaatctcacattgtcattaagactcgcaatgttcggatactcagatctccttgccacctctgaggtcatgtcttgctcgcttatgattcaaaatcattgtcgtcgataatgaccatcattcattggttttggttcatgcattcgcagaccatataacctcatactttaagtatgttatttcacgtacacatgtagcggtataggaaacttaccttgcgatcctcgacttgaacaggcgcttatggccttgtcctttgaacggatgtttaacacatttgattcaacaaatcaaacggaagagtgtatattaataacgattctttcaatgattttattcttcaatcaactgttatcacttatcatatgagtgattttctccgttatatgttaactagattttaacccgcggtataccgcagaacgatttattttttaaaggtaatatattaaaacttgcaagttttatttttataaaatatttatattttacagtttataattgttattaagtaacgctataccacgaatccatgagacaattgttaaaaagctgaagttttaacccttattaaaacagcatattaataatactttaaaattttataaatattgattcaaatacatctaccatataacccaattccaaaataaaactcgttctgtaatttctttacccgtcccgtatttttttataaagtagtaatttttaaaatttaagaattatttattatatataaaagctttacaaattgtatcattatctaatacatttatattttatagtttaattttatatatagtaacattatacatatcagtatactacataacatttttggttttatataatcttttctaaattaggatgatttgatatgtttcatattactggtcttaaaaaataataaattaaagatttaacccgtattgaaacggtggagtaattatattttatttttttattaatgttgattcaaaaacccgtccctccaaatccgtcttgccaaaaagccatttattttattaatattaattttatttatgatatgactatatttataatctaaacattttagctaataacataggagtgcaccatatttatttaatagaagaatgtaccatatgacccgaatacacttatacccaattccaccaaaaagtcttgcaaaaatactatagagataagaaacgatagtcggttttgataggtataagattagcaaatatattagttagcttaaattacttaagtttatcatgattaagtgctttctgggtcgtctcataccttataaattcgtccttaatctcaacatgtaaaggggcttgaatcggtattttgtttagggagaaaccctactaaggaaaggatgtccgacacctctttcttcatttatcatcagaatggaatggaatgaaagccaagcatctactagctgcctagccagtaagggggaacgctcctgcttagtacaaccagaaagaaagaatgcagagtaaggccgggaataggcttcgtaagaggactgtttgaggtactttggaaggacagttacacccatgccagcggaagacttaggataagcggtcactaccatcttattactatgggctaagcagatactatcaccttaatagcagcaaagagccataattgaatcacgaggctttagctccgaggaagtttagaacaaattgaattagaattgacgtagcgaaccaagcctctgccatttcagaatctccttgtagaaattgtaatatagtataaaaacttatataacacagagatttgataattttttaattgttgaatactttttttgtgctaatttttatgtgattaagatttaattaattttatatattaaatattaaattgttttacgaacttatttgtttataatttggtaacagatatatatttgaatattcggtatattttgcttcagtttaggaaatctttgatgacccgtctttagatccaataaactttataattaagaaatgaatattatagttaaatgattttggtaatcttaatgacgtcattaaaggattttgtttttgattaaatttttctaatggcattgtcatgtaattaattacaaaaattaaggttatatttaaaatgtacttcccagtggacatctattttatgggatggagctatagaatctagagttctttttttttgctgtagacattcatttgtaaaagtaaacgtacatgcatataacaacaaatatatgcgtctaataaatgaaataaaggtccacatgacataataacatgctacaaaataaagttcacatctctcataacatttaaatgaaagataaaattaaaactaacaaaaaaaactacattactattttcttaattcaattgtgtcatctacctaattcactcattaaattttgttttgtgatcaacattttactatgatccacctcgtcatgtgctactcgtattgggtattcgttgttgttctatagcctatatggaccaaacttcgctgctaaagtaaggttttcttattttatttgatcagattccaactttacatgatccctttgaaaagttccacagtcgatgttgttaagatgctccctcgtactcacatgcccacgtaaattataaaacatttaattatatggaatcttgattttttttttttcaaatttaatattatttgtcagggttcgagttttcccaatttcaactatctatgaccatccgtaaacgttttcactgacctgaaatttttatagattttggaagattatatagtaagactttggatagtcctcggttaacaaaaataataaaaaaaaatgaatcttttaatttgaagataatgaaaattgtttagaaacagtggttactatgatttcaccttttaaagaaacgaaaaaaacgaattttattcactttttcataaaataagaattaaaattttaaaatatatataaagtaataactttgttaaaaacttcattttaattgtacaatttattgatcaaaacatttaaatctagtggttcagattggtatgttcattgtatcatcatccaaaattcaaacccgcataatgttatcttcatggttttttttgtttttagtagatagcatatatccaagagttttatgtagatttttggttatcgaattttcgacagcaaaatttaatatataatttttagttaaatttcatagagcattggcttagccatcatgagaaaacaatctgtaagataactatttgaacaatttagcctttttaatgtcgacttaaaaaccccttaggaatcaaacacatgcatgtttactggtggtggcgctatgaaactagttgtgggagtgtggcaacaataagttcttcaactttttcttgcaaaggaatttgcattagttatttaccatatctggtccagatcataattattctaagcttttgaatactttttattttaagatataaactaattcaatttgtctcgtaatcgaatcagaagcacaaggattcgtccggatagaagggtattttatttggtgcctatttttttgattaaaaataagtaaatgttgatattgaggtttgtagtatagtgtttatatatatttatagactatagtgtttcaattctatatatttattaatacaatttaattttttagtcctcgttgaagttgggaaattatgaatgaaagaaggattgtccaaataaataaaactggatttcgacttggtcacttggaatattggatatatgacatgcaatacaatgtcgtcatagaaggaacttgtgaccatttattattattttgttacatttgtttcacacgcactgttgattacactaggcttgacttcatatgtttgcattggatgtaaggcccaacatcgaagcttgtttgtagtcgacagttacttcctctactttgaaaattaatgtaagcgcaacattgacttcatatgtttgcattggatataaggcccaacattggatgctacactttgaggtattactatgagtactagaactttgaatctgttcatcatgccgattgctttcatttcaaaattcgaacatatcaccttgtctccaactcaagctcaaaagaaaataatacaagagttttcaaaatactacttatgaccaaaattaatattatattagtcttgtttaaaggacattgcaaaagaaaaggaaaaaaaaacgaatgaaagttgagctttttttattttctttctttctaattcaaagaagagttataagttattaataaattgtaactcttgttgtttcctttttgactaatagtgtagtgttagaccttgttgttaacttggttcgctttcacttcttctctttcctaattttgctcttcctcttccttgattttcactaaacttagcttggaacataagagctggagcacacaattgggcaagaaaatgttctaacttctccaagatccaattttttcaagcatatattctctccaatgatgtaagcatatttgtaggcttgagattcatctaactcaaaaaccacgaagactttcttctcttcatcaatgaagaaaccgcaagtctcttcataaaactgaaaatcaagaacagtgagtggttctatatcaacttttaagaagggggtccacaacaccacttagggctcaatcttagttataatccaaatctctatcacagggattgatataacaccgagagtttctcttctttaacgcaagatagagtttcattattgttatcatcctcatgatgctgaaatggcagaggaagaacctgtccaaatctctctgctgtaaaatcaaaacatattaagaaatatggggtttgaaatggatcacaccctttcattctttcttgagtccaatagtaagtatttccggttattaatacttaacccaaaccagagaagtgtttggattgtgggttaaccggtcgaactggagggtccgaattggacgtgaaaacactgaaaaaaaagtaatctatttgtgtatcagactgttacacataacaaaaaaacatataagcttttgttactggcatcgatattgttattacaacggttctgtttgatattatcagtaaacaaattagaaaactttttatcaaaaagaaacaacttaatattgttagacagatacatcttagatgtgagaaaccttaagaattatatcatgacttgtattttttaggaaaaaaatcattaatgcagccaatgttataaagttgattcaatttggtccaactatgtagattgaaagtaatgactttgtgctatattgctacatgtataatattaacataactagctaactttttcacaatggaaaacttataagaacttaaatccaaaaaaaaaaaaaaatcgctcgttttgcagttcttatgaatgtgattgaaatttggaagtgggtaaacttataactttaatagtattacaacagtgaatggagaaggacactattagggacaatgttccacatcggaagttaagtaggatcttaagtggtatatataagatagcggcctctccacctattgccaattggttttaggttggaagcccacactctaatatggtatcagagcccgatccgcacatactcaacccgatccacatcggtccggcccaatacttggcccgccgatccatgcccaaacatatcgagatcaatggctagaagagccatcatctcgagggggcgtattagggacaatgtcccacatcggaagttaagtaggatcttaagtggtatatataagatatgggtctctccacctattgccaattggttttaggttggaagcccacactctagtagacagaagaatatgatcaaacactctgatcaaaagcaatggtctcctaccttccaatcacttatcttcaaacccattgttttctttatatattttaaatatattttgatgtcgcttttaattattaacatgtcatgttatagattaatttctaaaatattcaatggttggtggtatactgttctttgttgtcttgctgtattatctatctactcatggattttcgtttgattcttttatggaaaacccaagatgacaagatcttttgcatgatcttgtcttgtgtctttatttcaaactaactgaatatagttagttatatattattgttatcaataagctggagtagctcagttggttagagcgtgtggctgttaaccacaaggtcagaggttcgacccctctctctagcgatgttttcttcttttcagttttttttttttttgtactgatacaattacaatttacaacacaaaatacaaactattagactacatgtcaataatgtcatgatgcaaattttgcggtcaaactttttttaatataagttttgttacatggattcaatgtagtttgtttgggttttactttgtaagtaagttttatagaaacaatcaattttctgaattttagtttggattgaattcaattaatttgactattccaaatgtcaatatatgttaaggtctcactcattgtttattttttccttgtaaagctcctctcataaacttgaaagggcaaaaaagaagaagaaaaaaaagaaaacataacacacacaaagaagggataaagaacctctaaatttagtgttcataaggacatgcccacatggtgtgggttatgtcacttagaccctacaccttctcctctcaccttctttgctcccaaccttttcttttatcaatttatgtccctctctctcttagataccgaatctttactactattttccgcaatttgttcttgagcctcttttttctcctagtcatagtcaagtgtctctaaacgatggacccgatttatccaccaacgctaacgtttaatctatctcactgtcatttgtgactatcacatagctacagtacgaccattttcgtaaacttatcataaaagatcggtctcaaatccgatacaaatgttatgttgaacatctacgtaaaatagaaaactattgttattgctatatattttttaagggatacgtataaaaaagttgtggcgtataaaaaacgtgtggtaccattttgaattggtaagagagtatttatttctagagaggtaagagataacaaataagtaaatgaaatttctacatttataaaggaaaataaaataaaaacataagaagtaggggaccttatgtgtgtgggtcaatgttgttttctatttaaagctaagaagaatgatttcaatggattagtttctcccaactctttcatcttttttaagcaaccacccaaaaacaatattacataacctaaatctctacttcttcatacatttatagcaaatcctcttttgctttaaacccaccaaataactcagagcttttttgcattttttcccattctctattttgttttgtacttttggtctcactttaaaagatcataagttgaaagatttctgcagagaacaatatgttggaaggtcttgtctctcaagaaagcttgtccttaaactctatggacatgtctgtacttgaaaggcttaaatgggtacaacagcaacaacagcaactgcaacaagttgtgtcccatagcagtaataattcacctgaacttcttcagatacttcagttccatggaagcaacaatgatgagttgttggagagtagtttcagccaatttcaaatgcttggatctggttttggaccaaactataacatgggttttggtcctccacatgaatccatttcaagaacaagtagctgccatatggaacctgtggatacaatggaggttttgttgaagaccggtgaagaaaccagagccgttgccttgaagaacaagagaaaaccagaggtttgtaagatcaaaattttggataaaaactttgttttgagacatggtttttgatattttttattaataatgtcttaggttaagacaagggaagagcaaaagacagagaagaagatcaaagtagaggctgagacagagtcaagcatgaaaggaaaatcaaacatgggaaacactgaagcatcttcagacacttcaaaggagacatcgaaaggagcttcagagaatcagaaattagattatatccacgtgagagctcgtcgaggccaagccactgacagacacagcttagcagaaagggtaataaaaataaataagtttcttgtgatacaagaatcatgatatatctagggtttctgaatggatttggatttgcaggcgagaagagaaaagatcagcaagaaaatgaaatatctgcaagatattgtgcctggatgcaataaggtcacaggaaaagctggtatgcttgatgagatcatcaattatgttcaatgtctccaaagacaagtcgaggtaagcaatgaaaccatgattctctgtaacttaacttcactattaaccaaagagaataagtctaattcttaaagagccatactttgcagttcctgtcgatgaaacttgctgtcttgaacccggaactagagcttgccgtggaagatgtatccgtaaaacaggtgaaaacacattgtctagaccctcaaagtcatattgatattgctcaacaaacttaagggttatgaaattttcagtttcaggcttactttacaaatgtagttgcttcaaagcaatcaataatggttgatgtgccattgtttccgttagaccagcaaggatctctagatttgtctgcgataaacccgaaccaaacgacatctatcgaagctgtaagtacagctttatatgaaactgaaaaacttgtcagagtttttgttccttgtcagtgaagtaacctgtctctgtatctctctatttcagccatctggaagctgggaaactcaatcacagagtctctacaacacatctagcctcggttttcattactaagcaagattcattgaaacaacatggttgacatcaatcaatcatcaaaatcagaagcaaattctattacatttgctcatcaaagtagtaatttcgaaatttggttaatgcattatcctttgatccttgttttctgatatttaaaccagaagaactggagatagcaatccaatgatcttgtcaccatcaatctttgtgtatagattatatagagagatagataaatatgttttagaggagttatagatatatatcatatttgtagaagaaagagagaaaactcttgtggtaattacaattcttgtttgtttttttggatatataaatatctaagaaaattataaatcgttttcctgttttttttttctgcaacgaatatctaagaaaactcttgtggtaattacaataaaatatctaagattctattgtcaacgaaatgtacccatcaatatgttcccattcgaagggtatgggtatagagttattaggtcgccatgattttttataaatcggtggaagaatacttttgatgatcaaagtaaacggtatctaggcagccaattaatcaatgtcgattttatcttcacataaaattttattcattgaatacaaattattttctagctatttaatttatgtaaaattaaatcgatcataagaaaaaaaactaatagcttaaacagatgttgtctttagttattttgatacaagattgcattgtattctttaaaaattcataaccaacatcatggcgttgaatttggatgttgaatccgaatgatgactctcaatgcacatttagatgaaaagaaaagaaaaaaatttcgtttggaaacagctcatcgactattcacagattcgggagaggttattcatttattcttctattttcttgctaaagattaaccatatattcgagtaggattcttgtaaaaagcaaacatcatcaaatgtgaagtatgtgtcaaataaaattttgtcaaataaaacatcatcgagtaggattcttctatttctattttttttttggatattagttagtgtcaaataaatttttgttaatttaaaaactacactagtaaacatttttataacaaataagaaaattggattctcgagtgatggcaaattcatgaattctttatgaaattggtgaacatatataaaatcggacgttgttttaaatttgtttcatttttaattcaaagaatgatattttagacgtttgatcattgttgtcttgttgatgctacgattgcattcaaactctagttttcattacattcaaaatatatctaattttgcattcggatgcacctacatatataattttacaaagccaacaacattcgtgcatctatatgaagaaaccaaagatcccttaagtttctagcttattattttcttttccaactttatcaatgcactacaaaatctactacactatgctactatagtgatatgtataatgttactgatgctgacacaagctctctatatatttatcacaatatgttttctaaaagtagctttcaagctaccaagtgggtcaatgttcttttctcatatcaatttttccaaccaatgatctattcatgaactgtctgattttgacaagatctatatgataagatattatccataaccaaaaatgaaattggaagtagttttttgaaggtaggagtagttaagagatttgagaggatcgaagaatgaagaatctgaaccacaaagagtgggcatcattgtggttgcagagatttttaaccaaagtggaccttcttttgttctttcggttccattgaattttatcttccttcatttttgaagtagttgaaaatctcttctatattattttcaaaaaaattcgaaaagaaacaaaattagagaggtgtcgttatcaaaaataatgaaagtctttgttatttctgaagttaaaccatatatacaaaaaacaaatatagttttaatatctaaatataaattcattcacttaattataatttttaatctcttttttttttgtctactcatattaattagaattcaaaagattcattcatgaaaaatattgtttacatatgtgatatgatgcggttcggtacaaacttttcgtgccattatcctataattattaactatatagtgtataattgtatatgtaatcttaaatttcttaaacacttacatgatacattatatttatgtcttttatatattaacaagagagttaaagagattttcaaataaattatatgtttaaaagttttagaagactcatggttgtaaaactcatggttgtttagtagttaaaagacttatccaagtattgctcaatttcaatagttagtcacgataaagctcttacggtttataaaaaaaaagtcgtatttagtctagatttatgtcggaacccgtagattgatttttcctttttatctggaaatataagagctaatttttttttgagattataacatattatttagtgatgtgtgttaatgtagtcgttatgtcactatccgaattcaattatgatatatgtatttgtgttagtgtagtcgttaactcgttatgtcactcgttaatttgattgtatgaaccttccaaaaaatcttagttaaatttatagtgatgttgaacatcacaatcttatcatggttttcatggaattgaatcgttaatgacttgtgtaggtgaaactattctaattccaagtgtttgtcacttttattcagaaagtaaagtaattgccgtttctgttttaacaaaacaagtatcaggccgttccaagcgttcactaacgacacgacgtttgtttatgaaccaaaaagacgaatttttcaaaacctcgtcggagaggtttaggcttaaagaaacaaattgttggaatctcaattctcgaatctgacatctcggagaagagatatggcgacagagtcatcggaatcggaagaagaaggaaagattagtggaggaaactataagctaatcatagacgacgatctaagagagatgggtaaaaacgcagcttggagcgttagctcttgtaagcccggcaatggcgtcaccactctccgcgacgacaatctcgagacttattggcagttgagaaaacgaaaaaaaaactaaagctcttatctttccctcattctttgtctctattcaattaaaggattcgacttttttttgtttctgaaattgtagatcagatgggttacaaccacatttgattaacattcaattccagaagaaagtgaaactgcaggtatgattctattttcatgagaaagttttcatctttctttttttgtggttaatgaattttggcttgttttgattttgaaagttagtggttttgtacgttgactttaagcttgatgagagctatacaccaagtaaaatctctattcgagctggtgatggttttcataacttaaaggtaatatctttttcctttgaagaagaagagaggattctcttagcttgtgaaggattgatatatcatgttgtgtctccttctcttttgattgttttaggagattaaaagtgtggagcttgttaaaccaactggttgggtttgcttatctttgtctggaaccgatccacggtatgtttgcttcttatcaagttgtggtttttgtggttgtttcttactagaatctacctagctgctgataagatgagcagatgtctttgctacaatgttagatatttgatcagattttgctactcttttttattgttagtacttcagagaaagtttgcaagattattagtattgcttagatatgtctgtagatagctaggtgattagttagttagtaaaggtctaaactaacttatgctgccaagaatgaattcgttctgtaggttactaagcattgagctgataaatttaaccattgtgtcctcttctcagggaaactttttgtcaagaatctaggtagctactgataagataagcatagtgtttgttacaatgctaatgtttttgatcagaacgctgcttctctttttttttgctagtacttcagagaaagtctgcattagttagtaatattgcttagacatgtctttagctagcaagttttcacaatgagataagttgggatttcaatattagctttcgaggtttcacataataaaggtttaaactaagttctgctgtcatgaatgattggtttctgttggttagtaagcatggatctggtaagtttaaccactgtgtcctcttttcagggaaacttttgtcaatacatttatgttacaaatagccattttgtcaaatcacctcaacgggagagatactcatatccgccagatcaaagtttacggccctagaccgtgcgtctccatctctccttcacttacctaaactgtgcacattatatgctatgattgcctttgcatgactcttgatttgattgcagaaatcctattccgcaccaaccttttcagtttacatcgatggagtttctcacttattcaacactgagatgagaaatttgagcaggagaagtttgaagaacatggactatgaaagatactgatgttgataccacatgaagagtctataatcagattagttattgttgttgtgcaatggcttttgtttatatattacattggatataacaatcataacttcagtaagcttatcaaccaagacctccataaaacatttgacacagtgattttggagatacggatttaaagcatagttcaaaagagctacaacaatctacatacaaagagcttttcgtggattgatacattgaaacctaaagataagaaaagccttctatgatgatttgcagagatggatttaactcggtgggttaaagtttacccttcacatgccggtttggtgtcaaagctgctaatgcatatagcaaaggcttgaaaagcagatagagggtagcgataatccatggtgaaaatatccttaccgattttgccaaactgtaagatcaccctctcatgttcttcaggcggcgcatccaaagaagcgtcaatctctgcaacaagctggaaattcttaactgaagccacagtcactcttcccttgaagttgaggcaccagcactgcaactgctcatgccatcttggggatttgtttttgagaactagcggttggtcccttaagcttggagaattatcaggaatctctttgtctgttgtgatggtttctccttttggtgaaggagaggaagagacttcctcttctatgccttgaactactgacggttcagcaataacagaagagaggggtatagaatccatagcgcagtgcattcttctaggtccccttgtgcgaagaacattgagctcgtaggttatgtttcctacggtagagctattcgtaggtagtttaggagccgcttgtttcgggtggagtcttcggttaggttgggcttgtgctgtggatgatgctgtttggttgtcatatattgtgaacttggttcccagaaaaccagacctatcccacaagataagtagagactgcttagacaaaagagcttttgatggttaagactttaactcgggacaattgcttaccttaatttgccaacataagtactgctgctccgtgagaagttctttgcagatagggagattataaagtctgtgcatgtcgctcttctaatccttcttgctgctaacaacagtttgtcgttctcagtctccgctgaaattcgaaacaaggatcatccttagaacaacagtttctacattgttgaaaactttagtcagggaataagggtcactcacaaggcatcaaaccataatagagaatgtatgtagctgttgctctgttcctcttaataaaacattgaattggagagtctcgaggccccggctgctcacaatcaaacaagaatattagatttccaacatgatgatgtgaacaaaagaaacagtaaactttctttacctgtttcaatgagattggaaaagtgagcttcccacactgctcagggatcctcacaatctccatagtgattcctctccatgatttacatactgaagcacaagagacaacggcagctcgagcgggccaagctgtctcactctcttcaaccctccagataatgtcatgaagcaactcaggcggcaaagaagcccatgggctctgtggtatgttatccagtggtggagttgtttgatcaggagcaatgtgagacgactttgaccagcttctcttggagatgcctccaagtccatccctcacttccttcagatcacgaaggatgcttttcaaagacatctcttttcagcataccacaaaactccccgatagctgcaatcactcaaagttcatcttcttataatctccttaaaggaaacaaaacaaagctcaacactttcacaagcaaaaacagaccccaaagataaaaacttgggatctacgcatctataccaaatgggtaaggagaaaatatgaactactaatagaaagagctcgaaatcttcaaaaatcacagattcacattgaaacgcatcaaaatccaatctttaaatccgacaagaaaactcaacagatccaaaaacagagggagaagaaagaagaatctttcttctggaaatgtgaaagaaaattgaaaaccaacctcaatgaattcgatgaaggatcaaaagacaaaagctttagaatctctggaaactggaagatgtgatcggcggcaacttcttcaccggatccgagagacaagatcggaaagagaaaacgcagaaacagagacaagcatagctgtctctaaacagattcttcgatgcttgtcgtctccggggaagaagaacgaattcgccagtgactatcttaacatgattccgtcggtcaccggcgttatcgccgtcgtctagactccgccgccgatctcaccgtaggtgaataaaggagtggtcaccaccaaaacgaacctgaacctctctctcttgttacaaattgagaaagaaaggatccgaagtcttcgctttttcttatagttttcaatgaaacgtttaaaggcagagagaaactctacaaattaaaaactttaacactaagaaaacaattttggtcggaaaatatttttaacttctaaattttttagttagttaaataattaagagcttctaatgatactacttggctttaatttgatcatgacttactgcatggctttaatttgatcatgacttactgcatgtggcaatgacatatttggtcggtaaattgatagtactatttatatatatatatatagaagattaaacgaaaactttagaattatccgacaaaataaatcttgaagaaacctataaacctttttatttcaatgaaactattaattgagaagaaatatattttacgtccaacaaagattattgtcgatgtttatagtgaacaggaaaataacatgtctaattttttatataagtaatacgtaatcttattatgttgtaaagttgtttattctagtttgtatgtgaatttctaatttattgcatgtgtgtaatatttttacattggaagtaaatgatacttgaaaagaaaattatattcattaccgaatttttaaaatttaatatgattgatccaacttgaaccaacatatcaatccaacctgaaattagtccaccctccatactaaaattgatcttataaacacactacttttaagttgggggtttgaaagcatataaaagtttaatctcaacattttaagtatttttttttctaattaatttttttgcatttattgtctttcaaaattttcattattcttcgattgtgaatgattttttttttctttcttttcgatgtagattataaaacttgcatctagcgtctttttaccagatgttttagagattttgtttttcttactttctttaatgaatttgtttccatttattttcataactataagaatatttttatatgaaaaattcgcaatcacaaggttaagtcaaaaatcaatctaactttcttcttcaggctgagtttaggataattcatatctataacatataattcgttaatatatacacttgttctcgtgctaagtataaacacaacggatcttgtcttcaacatatacgtatttacttcttctttttttgtttgaccttatccaacaatgtgaaatatttttaaaatgatatatacgcatcacacatgtatcatgtatgatgtatcaatttacataattaaaaattcaaaatctctgtcaagccacccattttgacaccatgcattaatacatataagaaagtctggcttaagatcaaactccaggaggtggtattataattttatggatttggcaaacaatatatgccacgtacctaattcaactttattttttcatacatttgttttgacgtcctattaaagttttaatgacttttgatatgtggtaccaacaaaacctaatgaatcgtatacggtaccacccaaaaaaatgtccttcttctccacccatttgattgattttcttggcaaattatgatagttatcttaaagtaatatttatcattttattttgtgtcattcatcttatcgaatttatatttatgtgaggttacacaatgcatgatatcactaacacacattactaggttacatatgataaaaacaaaattataaggatacgactttactaaatgcacaaaatcttcttcaggtaacaacgaatatatatagagttttacattatgactttaatggttacggttgccacatgaatagcatttgtagcattcatcgggaaaaaatgttattattcgtgcataaacttgttaatggatgtgattttttttttaagtgaaaaaacttgttaatgggtgtaaaaacaacaacaattggtaactctaaatacaactattaccttaaaaataatttaccaggatctatattttaatactcctgattgtaaatttcaatgattcaagttattagcttttaaaatgtaatgattctcatcttagaagttgctcatgtttggtatgtggaccacaatacaactatattgtatatatcctacataaatatttgtgtacacaaagtgagaagtagatattatgtaatgcacaaatgcatatgtaagttatgtgtaatgggtccataaataaagaagaaaagaagaaaaagcatgatggtattgattccaattttgtgtgtttgtccattgggattgacaaaattttgataagattgggaaccatatatttttgccagcttacacttgtcaattctctttaccattaccccatcaggccatcactctttttattcaatgttctcaaaatctgctagtcaaatgaacaagtgctaaaccttagtttagtgactagtattgctgttttgttgactaataggtagatgcaaaaagttaatgactaaatatagcaactgattaaccaatcatctaatctaaagatcaactaaatgattgttaactatataattaactcaaaatgacttaacacttcgtccatttccattttcatttgcttgtttgttttctattctttgtatcacatatttgtcaaatctcaccaaattttgtttggttcttgttgaatctctctaactagtcaattaattatgaaaacttttgtctcgattcagaatccttcagatatctactaatccaatagaaacattataacgtgtacttgttcctctcgtatatagacattaacatgatcaacacaaaagatctgtggacaaagattcatgaatacaaaacctgaagtttcattctgatacacaaatcatgaaaacatctaatgaaaataaaactagaacaatggcaaaagaacacaagaaagcaaccaaatctcaacgagaagcaagcattgagatgacacacacaagaagaataagaacacccaaaatcgaaacccaaagaacccaactcttagtcttcttcttcatctgattagcatagtacaaactattagtacctccactcacaaagctccctgcattagccacattagcttcaatgtcatcaatacgatctccttgagtctcaacaagaacagccatgtcaagaaacacttgatgaagcctattaagacttctcttgatatcattcactgcttcatgtctctctttagtcttcaaatccatctctggcttcacttcaaatgttttaaccaaatcagaacaagaccctgatccagagatcatcttctccatgtcttcattacttggttcttcaccagtcgctaaaaaatacttccttttgagatcttctctgtaatcagcaaagattctctccctcaatcgatgaaactcactcatcgtatctctaagtttctttctaactccattagtgatcgaagttcttgtcctgtccacgcaagatccttccttgaaactcgtacgattcgcaacgtttctcttctccagagtctcgattagggttttgactgtgttggccttacgagagatggtgacgatgtttgattccattctgtctcgcaacccacgtaagatcttggtgctgtgagttgatttggtctcttcgtttaggttttggagatcgagtaagagatgagtgatctcttcgattagggttttgatggtttcgatttcttgaaagaaaccagagaggttttcttcatctgcgggactgaaatcgaagttaaagtcttcacctttctccaaatctcgatcagattccatatctgtcctcgcttgtttcttcaattccacataacttaagaacgattttgtcatcagatcattcatcttgtaaaaccctataacaagaatcagaggacgaaaaagtaagaatcacgaaattgaattgaatattgaaacgaaagagaaggagataagaagaacagagcattacggtgttgggtttgtgaaacagagtaaagatcttcgttatctctgaaacgggatgtttcagttttccgggagaaagaactgcaaaagagagagagtataagcgagtcaacaatggatgaaattaagaaaccctagagatcaaagaggaagaagaagagatcattacccaagaaatgcttgttaaacaaggaaccgtttctctcacaacttcgcttctctctctctctgctctcgctctctgtgttttcagaagaatggttcaaaatttaaaagagaaggagagagatatggggaagttataaagaaggtctacaagaatccgattattcagtttcaaagattttgtttctcaaaatttgctcttttattaatcacaaaagagccgttgctttgataacgtttctgttccgattaggcctcatttctcctttgtatacaaacaaaaacgacatcgtttatgtcaaacgtatgcaaaagtctcgacctttattgtgcaaaaagtcttgacctttattgaccaaaagttgattttacaggactagttcatattccgagttaaagaatgcaaagcttggacctttattgatctattgcatccaatttacagcattttgagtatacaaaagagtattaaattacatgcaaagttgagagtttatatatgatgagttcatgatgctttttcttctgctggttgtttttgtttagacgctttctcagcctccatttttctcagagtacttgaacttatcttatttccactcgatccatcagaaactatttccacaacttcaatctgcacaagcatattccaagaaagattggttcaagtaatgattgaaggtcttaaaatggatcaggaggtcaataagataaggctggtggataaaaggacaaaccttaagctgtgaaagacctctttctgctctttttctgttaactgacaagccaccaggtaatgtctctttgctgcagatgatgattagttaaaatgtcttgaaacatggatgtgaatatatagaaggaacatgtgaaaaatattaatacatagatggtgaaaacctgacaacaatagcttccaaattttcatctacgatagaagggccatatggatctgtaatgggttcggcttgtacaaccagctcgggcttgatagactacacaagaacatggagaaaactcatacaacagaaactctacttcatcattctctttccctctcatttcacattaagaatgacaagtaattgccaatataagagattccacattctggagaaattaccttgacataggtctccacattacgcatcctttcttcaatgggttgaatcatgtcagagaactgtacacacaaaagagtgaggatgagaactgcaacaaagcaatagttttaaatcagagaaaaatgatgttcaaagggtgtttgttcttttgcctcttgatcataggaatatcattccaactcgaaatcaaccaaagtgactctacttacaaatcaatctcctgggactatcaaacagaaagatatggtactgaaaaatgaatgacatgagacttggaaagagctcatcaacaaagcataacagtttcagactttgagctttaaaccccacaaaacaacatcagaacaaagatgttcaaagggtcctcttttgcctcttgatcataagaacatcactccaaatcgtaatcaatcaaagtaactgaatttactagctaatataagaaatcaatctcctgggtctactaatctaagcaaaaagggaaacaaaagttaccaactttccctatattgctactaatctaaccaaaaagggaaacaaatctacaagagactgaaagtgtgatcactatcacttacttgctttttcgtcaacattgggccatcacagactcccactacgatccgatccctggccagctccgccgccgcctgatttttccatcccccaaaaaaatcgatagttgtacttcaattctcaagaaacccatacgtaagcagaaaccgaagagagagaagaaaaacccaattaccttgaggaacattcgatgcccatcgtgtaatcgatcaaacgtaccgccgagaacgacagctccaaacgaattcgccggagacatctttgaatcttccggagctgccatttagggctcgtctctgaattttctgatttggagactttagaaccaataaatcgagttcctttggtcactcgaatcgaatccgtagctacagacacacaagaaatcgattcccactcccaaaatcctcaactctcctctgaccatttctaaacccattctgctttaacatgtgtgtcgttttctttctctaatgtagtttttcaacaaacaaaacggcaaaatattcctacgactacattttaaggaaagttgatacgaccgttttaaggaaagctattacgatgtcgtgttatggtacggcaagacggcgccgtttaaagaatccaacacgacgtagtttaaggtaatataagacgagccgtttgaggaaggggtagaccacaccgttgaacaagggaatgaaataggtttacattttttctttgtccgagcatcggtcaagtttcacatatgaagccaaactagcaacaacaatctaagagtttcagaaactatctctgctcagtagctcgtcgacacagtttggagtttctgtctccttcggattatcttgttctatcatcaataataaacaacttttgaggagaaaacaaacaaacaaaccaaggctacaaatattctgcaaaaaaagatgttccaaagtcacagagcttgttgttttgttggtgtgaagcattcttgcaagaagttttgaagctgtgaggaatacaagtcaggaaagttccggtaatgatccacgtgaggagaggacttgaaattgaaagaatgtatctttcttccaatcttctgttgttctcggatgcggagctcaacggaatgagatggaacaactttgtccccggagctgtaaagatagagctgaggacatggaggatggttctcatatagtttttgaatgatttttgttagcctcctgcgatacaaacaataactcagattaatcaacctaatatacaaagaagaagcagatgggttgtctactgtgtggtgtgaagcttacgtattgacgtctgggtggtttaagaagatggggaagagtttctccagagatgatagcattatgttttcgattcctaaaggttccttcttttgtggtgttgaagcatcctcttcttttatgggactgtttggttctgtggttatggtggagctacgcttcttcagtatagccgcggtaaaccccgctgcccaaatctgcaaaagaacagaattcaattgttgatctataaaatctgcacaggtgtacgcattgctaatcttatgcaagatgaatgattatgatggcttattaggactacgcaatgattaagcaattttcaacaaaaggggcttcagaacaaactcaggcacatactatgaagctcattttatcttgttcacatgcctaagacatcatatcttgcaagagaacaagatcacattcacaagatatataggccgatgtactataaacctgtgagtgatggctacgtaaccaaaagaaatcagcggttttaactcatagctatatagtcttttctaagtactgagttatctatctacaaagctaattgcttagatatcaaaatcaaaagtcccctagccatggttctgcaaatgcttgtaatcgatacaaagttcttcaacatagaactcaaactagcaaagctttcacactagcataaaatgaatcattattgaaaaagaggacaacatagctcaaatagaatttttcacttcacaacaatattgacatttccacttccaatacaagatcttgaagcagtggagaaaccattgaatagcatttaaaactcttggttacatgaaagagagaacaaaccttagtatcaagaggatctgctcctcccgagtcaatgatacaacccttaatcctttctactaaatcttgtctaccaatgaagctctctagcaaggcaccatatctaccaaaagtaaaaaagcccaccatgcttaaaattcatcatctaattcaaatcaacactaaatcacaatcgcaatcacaatgtaggattttgaaggattttggtttcatcaacctacacaagccaaccagtgttactgaaactgtgaaacaccaagcatttctctctaccatcatcttctttctccgatacccaattaaccaattcattcccaaattcagctatccttcgttcaagccgccgaccaagatctaaccggagcaaatccctaacgtcaacagtgaaagtaacggcgttaattcccctggagttgtaccactcaacgtatctccttagatgtttagctttcgctcctagccaaccaaggagaaccaccgtcgtctctttcccctcgttcccgccgaatatcgccgcgtttccacctccgttcacgatccgtggagctctgttccagacggcgacgccgtcgttaggttcggatcggaatggattagcgtgaacggcggtgttctcgagacgaaacgttgacgttaggaagaagagtgatctgaagagattcgcattcgcagggagcgaagagcaccgtatacgagcggcggagatagaggattttcgggtaacggcattgtgtagtagctgatttgtggaattgatattacggggatctgattttagattgagcttactgagaagaagaagacgattgagagcagaagaagtactcaagattcttgtagttgcttccatggcggattttggatgattcgcagaaaccaaaaagctcttctcgtcaaatcgctgataagtgatgaataaatatctgaaaagaaaataaaaatagaatatttataggaaattaaacagtcttgctgaattagcgggtttcccttatgccttggagctgattcaatctctcttttcagactttgaaatgttccattttggtttacaccatctttttctcggatcaaagagtacaacatatctgaattggacaacagtctgcggttttacgcactgcacttcctcggaaactgtcttatagagtctctccagtaatctctcattgctatatccttcactatattttgttgttgttgcaaatgtaattgtgcataaaccctatgaatatttgccaaaccgatatctaaaccaatagaagtcaagagacataaatgcttgagaagtatactaacctaggaagtcaagtaagtacactcgagtccacacagttctccgagtatgatgaccaatctgtatctgtttctgcaaagagatttggaccagtgcttggtattggaggctgtcaacacagctttgtgtgattagttgtgtccagagtagtatccaagtcctggaactgtaaagaatactttttcctacttgtgattcccaaattcatttaaacgtataattgtaaaatacactgttacacattacaatgcaaaaaccggaaaatgcaggagattactcaaaactcagagagatttcttagttctgttaagcttcaagaactttgttttcctattccaccagcatggctatagtatattttactttgatatccttagtttgtatcctttcttgcttcgcctatcaccacgtcgagatcagtacctgatctactgttcgcatctaatcttgtttttcatttccctgagatgaattgctgctgctgggcctatcatctccaccatcacccttctgtcaaaaacatcagcacaatctatgttcagcactcttaactttctaaagcagagattcaagactatccaaaagaaatcgaatacaaatcaccccgttgcacgatttaccttgagtcttaaaaaggtcaggacactgtttacaagaaacttgagcagcttcacaggctttcttacatcgaaaggaaagtatctatacttgaacatgtgcacgattaagcgtttcatagttaaagaatacaaaaccaaccagtaacacaacaagatcggccagaacacaggcacatccaggaaagagaagaatgtcatcacaaatgcaacaacaaatgctttagtcgctgcatacctgaaaatcaaaattgacaaactttcatgagaattcaaaccctaaagcagaccattagacctaaatcagttctcatacgaattcactatcataacaatcatcaatcaaattgtctcaaaagaagaaatctaccagaactttaacaatgaatggtaaaaacacaaacttttcgacaaacctaaatcaaaatcatccatcatcaaaagtaaaagagaaattttaccagaacttgaactcaggaagacgacgaacaaagggcttatactcatcagactcatcaacaggtaaagaatcaggatccaaagcttcaagttcaggatcaactttaggggaaaggaaaccaatcaagagatttaagatataagtagctaagccataagagataacgaagtatccataaacagagtaaaccctatagatatagatcactgcagcgactaaagtcacaagccatcttcgaacaatgttaggagcagatctgtctaagtaattctgaaacgatttcgagaattcgattctccattttgcaagtggtgaagcaactatggtgtctgcttcattttcgcttcctggttcgtcttccatggaaattgaacacaaaatctgctttttcttcacctcaaaaactgggtctggttataaattctaatcacaatcactgaacttcgaatcaacttcaaaaatcgattcaaaacaatctactcgatttaggatgattttgaaccaattaaattgaaagtttctcagtttcgtctgaatttttcttagtcgtattaaagtcttggtttttctggaaagaagaggaagaaactgaatgacgtggggagaaggaacatgacacgtgtcgcaaagtaagatacttttgttaaacatgttgggcttcataaaatatttgtttaagcccagtagggaaaatatgttgaactttttttggtttttacatggaacgattcgatattctgtgaggcccaaccagaaagaatccaaaaccgaatcttttttgtttctctgggaccttaaaccgaattttaacgttttgcgtatgattctctagacttgtaattctagttgacagtcaccaaaaaaacactgctcgatggtcacatccatacgacacagtttttttggttgtggttaaccccacagctcaataatgatcattttttcccatttgacatattagatacttatgaaaaaagaaaaatatcaaaagtggtaatttgttattcaacttgtttttgtgacagaataatgaaaacaaaaaagaaaataataaatacacagaataatgagtgactgattttgagtgaaaacaaaaaagaaagaaagaagaatgagtgatataaattcatttctttatcctaagaaaataataaatttgtttgccaaaaacagacaaaataaaataaggaattcactgaaagaaattgcctaattttcaggacacgcgtcatataacaatttgttagtcggatacttttttggtacatcactgtcgtctctttttcttttcgttcaattaaaaggtacactaactatttttttaagaaagatattaaaatcttgaaaaaccatggccgtcagatccattaacctttcaaattcaacggacacgattcatcgtacgattgacgatgaacaataaccgaggaaaaagtgacgtcagcgtcttcttcctcctccaacgtcccataaagaagcgccacacacacagtcacacgaaaactctactgtaactgcaaaatcttgttgttttcttaaacgaagagagaagaaagaaagaaaaaaacgttacggattctctgcttcggtttcgcgattgaagcttgagatttcatctgtaagatcatcttcttcttcttctctcgtttctttttttccttcgaaatccgtcgattaggtcatttttagtttatcttctcctgttaatggtacttgttttgatcacttcttgttgaatcgaagcgatttcgtttgattttgctattttcttgttggtttcgtttcgttttgagcgccgagtacttggattggtcttcacagatgatcgattcgtcgattatctttcatttgtttggattagttctgtttttcgattctatttcagtttccaattgatgtagcttagactagttggtgatttgagtgttttgatgtgtatttacatgaaatcgatgatggatctatgttcttcgcatatctctgatactttagcctttcgcgttgttagatatttgcctaagatgatattgagttgcattagaacagtgaaccatcgtagaaatgtgtgcttcatttctctgctcggatttgaacagtcattttttatggtttataagattggattctgctggaatgttgaaggatttgtctggtggttattgtatgaaatggttaagtagtgagaataatttatatggcctgttttgagtttggtatatgattgaatgagactctccttttgtttgcatattatagtgaacatccgatatggctgaaatcaaggatgaaggaagcgccaagggctatgctttccctctcaggaaccctaatgttacgctgaatgagagaaactttgcagccttcactcacagatcagctgctgctcatccttggcatgacttggagattggtaagaatccttgtctttgttactttgaatagtcatgtgagtcaagtgttgattgtttgatgtaagtgttttgtttgttgaatctttcaggtccagaagctcctactgttttcaactgtgtaagttttatcttcttctacattgcggaagattagatcatattaagaaagttagtgctggtcttgtgattgttaaatgtgcttgaattctttgtcaggttgttgaaattagcaaaggtggaaaggttaagtacgagctagacaagaacagtggccttattaaggtacagtgttctttggcagtctctgcttgcatcatatatgctttgattgagtataacctgtcttctgatccctcaatatatagtctgattatgcggttatatgaggaattctttgttgctagatatatcataagtcacattttatgcattccaactaaatatccttcaccgtaagagtcgaaatgaagaaaaactctgatcactgaaagttttcctctctaggttgatcgcgttctctactcatccattgtgtacccccacaactacggtttcatccctcgaactatctgtgaagacagtgatccaatggatgtcctggtactgatgcaggtgctttctctcgcctcatcttagctttcatgttcatacaaacttgatgtaaacaggcagtgaaataacagacttgagataaaatactgtgcaggagcctgtgctaaccggatcattcctccgtgcccgtgctattggtctaatgcccatgattgatcaggtaacaaaaactcttaaacccaattctacctctatgtaatgtattaccttagtaagaaaccaggaatcaccttgttctgaaacttgcagggtgagaaagacgacaagatcattgcagtatgtgctgatgatcccgagttccgtcactacagagacatcaaagagcttccccctcaccgtctagctgaaatccgtcgcttctttgaggactgtatcctacagagacatgttgcatttaacgtataattttgttttcgcttatgatttgttttcagttttcacttaacaaacaatgtttttagacaagaagaacgagaacaagaaagtcgacgttgaagctttccttcccgctcaagctgccatagacgctatcaaggactccatgtaagtttgttttatcccaaacaccaaattatttacacgttgttttgttaataatgagcaatgtactgttttgaaacgcagggatctttacgcagcttacatcaaagctggcctgcaacgctaatgaagaaaccagtccttttccgttcctcccggtttgcttagacatcactgaagccgccttctatactacatgcatgttagataaaatttcaattggtgcatttaatttcgtaatgctcatcagaaaacattgttgaacttaaagctttctgatgatgatgaaaaatttccagtacaatcataaaatttgaaatattagcttttcttttccccaaaattttgtttaatgttgtttcgcaaacatccgaaaagtactctcatacaaatcgaagaagatacaaaaaaaacttaagaagctactcgggccttcttcttcttggtctttttgtaagccttatgccaggtcttataagtgcccttagtcttcttagatgtcttggtctcaggatctgcaatttcgtctactgcatcatcttcatctttgtctcctcctatatcaaacagatcctcttcctcttcatcagaactcaacacaaaatcctccacaacgtcatcttctcctaagccttgctcatcctgcttcttctctgttttactctttccacctctcttccttttcttctttttcgttttctcttcttccggctctttttctctgttaattacacatttgttgttttaggttatatcacaacggtcagataaaatatctacgttataggcgtaggagacaacccggttcccatcctatctatattcttaagttgataaagccacccataaatgtccaaagtactaagaaataaacagaaggccttaaaaccatagacccgaccaggcctaatctatattacttggtgatatttggggaagtaatttttaacctactcgcaccatacactaccgttggcggtgctataccatatgaaaccccgatatgtgtgcattttaagagaaagagagacatacttggagtcacttcccggtaaccaagaagaattgaaagctgcagcacccttttccatcctatcttcatcatcttcatcatcactgcttggtgcgtttttcccaaagacagctgagttctctcccacaattacactggagaaaccaaacggattattagtatccgtcaaagtcatacaacaaaaatatacaagtgatcaactttagaggaatgtaacgcactcagattccaccagcgattcgtttctttgctgggctctttggcggataatttccgcatattgcaatagaggggtttttcctgctttcttctcatcctgaacagagaagacccaaaaaataatttgaaaccatgtttgcaatcattttggagtaaacatgtgttctgtaatcataaacaacttgtggtatcccacaaaattttcgaagaatgcagcagtagtttcaaagacgggaagaaagaaacaaatataggttttgtattatcatcactaacaattgaaaaaatcaaatggatcaagagaaatgagttactaaacctcaaggaatgattcagcagcaagatcattgggtagaaacttaatcaaagctctctttttgttgacaaattctgagttagcttcaatctgaaaagcaaaagagagattgaaggagtcatcaacacacaagtcaataaagtcggttcttttattgcaagtacaagagacataaagtaaaaccgcatttctctttttttctctttattacctggctgatgagttgcttcatttctttcctaaacctctcagctttcgtggatttgcaaaagctacgcagccttatggtcgggataaatgatagttcaaagaaagcaacggaacaactccactgagacaaatgctccacaagctcctccactactgtataaacacatgcctcctgaaacgctcttgtcttcactgctggtttacttacctaaaaagagagccaatatccaaaatggttagtttgcaggataaagtttcattctatactctattagtaaagacccaaccacgcaagtttttaccttcagtagtgtgcgtaagtctacacctttgccaacacctccagtgggaggtctgttgagctccttcatctctaacatgtccacaagaagcattgagacaggtataaaggtgccagtcgcagcagcaagcctgtttagcatacgaacacatcttagtctaaggggagtgtagcgagccgtgggaaccagtcgcgctacaccagttattatttgggctagcggataagcaactggtctgagttcagactgagagctgtaggcacaaacagctccagtccaaagctcaaggcaatggatgaatttccattgatacacttttcgaaatgcttcctgtgaaaacaaccaaatgtaaataagagttaacagcaacttttctcaacacataattgttgtcagaagaactcaatttatgaagattattgagaaagtacttttgtttttgtgttaagcgcttcacgcagaatcattgccaattgtcttatgaagacaaatgcatgctgatatgctgcagagatatctgtgccgagaagctcaatgaagcagttaccaagaaacgaaatatgcttcaatttatcagcattcacaaactggcaattcaacacatacgctttgtacattcccttgaaacagtcatcaacacagtcagatccaaggcgtatgcacaaatctctcaggaacaacaaggaaacaacagggagcgcaccactaccagttccccagaaatgaagtgcaacctagatggcagaagagcaacaatgaagtgagcaaagaaaggaccataaagaagaaacatgaacagaatactatcttgctccaacacaccttaatatatttccttaggaggctaggaaaagcagctaaaaaaaccgatgagtgctttaggcggcgcagagtaaaggttatcatttctgtgtcggtcatctggttcagaacatgaagggaattcccaagatatgatttgactaaatgattatagtttttccaaggcctagtgtttgtgagctccaatatagtctcttttgttcctctagtatcttcaggaaaccttaacaacttacgaagaatcccgtccatttcactcagaacatatatcattatcttattaaacacctcacttgacataacactaaactttgtcgattgatcgtccccggtatcatcaccatagtgacaggcagttctataagctctcaagatagaacgcactccacctagcttcgcttcatcttcgattgatttactccatgcatcaaccatcgatgctgtaatcgttttctgcacgtgcactttctttgcaatttccatctttgttgcttcatcatcaccttccttttcagtgtcttccaggtcagtatcaggttcaacatcagcatcatcctacaaaatgtgaatccctaagacaaaaagcttccaacacaactggaagtcgagtcacaaactcaacatatacaaactaacaaaactcacctcaatttcagtagcatcaaactttagaagctctgcatcatgctctttcatatactgaaaaaaatcaggatcctgcggaacaaaaaaatccgtaaagttaaaaaaaaaactcaactttccactaatatatcattacaatatcgcaaccaaacatgtttcatagatgactcaccttttcttgaagcctcttaagctcttcttcatgctcctcagcttctgctttcttagatttcaccttcttcccacgcttcttatcgctcttctgctccattactatatcatgtgcatcgatttcttgaacattattgagctcttcctcagcttctagtttcttagatttcaacttcttcacacgctttttatcatctacatttgatttaaagtgtttatcaatctcgaatcccttaagctctaattacaatataaatccaaaaactggataaaaatcgaacctttggcacccatttgttagcacaacactctgataaatccacctgcaattaaaaccatcaatggtaacaagaacaaatcagtttaagagtcgagctaaaagacaatagtgtaagaattatcaattcatggagagaatcaatcacacaaacagtgaaaacaaggagaagaataaactatcgaaatcaaaatgaaagaaatcgcaccgggaacaacaagaaggaagacggagagaagaagaaattagggttttaggagagggtttttattacagtgttcctttgttttttctttcaatttatttaaccggacaaaacccggtttgacttcggtcgaaccgtaattcgaattgttctactttcccagaacagaacaaaaacagagttcccaaatttgagaaaccagaggggcacgttaacgagagattacctgcaattcccagaaaaaaactcgacgagaaaaaatgaagttgttgtcgtggtcgccgaggctgatgtctgaggaaaagtttattgttttagggtttatctttgtgagtttcgaaacgtcttagcgcaatggaaggtttaggtttgacacgtctaccaattggtttaaccaaaaatccaatttgcgagtgtttaaccgaattatttaggctttaaccggcatgtgttcttcaaaatctttattcatctatgtcatcaaaccccaaagtatcttatgcatgacatttcccaatcccttgtatatttcaagtttttttttgtttagttattttcattttaccacattttttatttacttaaaagatatcaaatattcattatttataaattaaagtatttttgaaaataacacatatattatcgaacaattcttgagttcatctttacgatgaattctttttttcacttccattctaaatactaaaagcatctacattgcataatcttttattaatgtctccaagaccaaccatggtaaaaatagactaaccatgattaaaattaaaaacattttattttttagatgtctaaaatatcttaaggaagatatttttgacatccaaaaggaaatgtctttaattttaactatggttagtctttaagacatacatgagaggttatgcaatgtgaatggtctaattgtttttcataaatcaaacatgatatatgatctcgtttgattacaaaatctaaactctaattctcttttttaaattcaaaccgatatttaaactcgtttaattataaaatttaaatctaaccgttttttctaaactcaaaccgatatttaatctcgtttaattataaaatctaaattcttttataaatcttaactgacatttaacctcatttacttgtaaaatataaactcgtttataaatccaaacagatagctaattttgtttaatcataaaatataatcattaatcctctctagtaaacccaaacggatatataatttcgttttgtgatagataaattttatagttaaatgaataattttttattaggtagcaacatccgattaggtgattatttacaggaagactgattatggtggtttcgtggttaaaagattcactatggtagttgaatgactaactttgagtcttactactaagatttcaatcatgttagccactgtgaacattttaaatggcaaaataaaaaactcaatgttcgcataatttataatattttagtgaacaaaaaaaaatattgtgttatttttcaaactttttcacataacttatattattttggtcagtaaatgttaacagctatttataaatttgtgtgtatcacgaatttcatatcctttaaattttatcggtcgaaagacaagtttctctagttagcgcttagcagcttccaagttccaacgattcgaaagcaactgatgctttgaccgatttgaaaatgcaaaagattggtctctgtgcatatactatcctttaaatttaaccaaattctttttgtgtaattcagaattttctttttacagttgtagctattcatgaattacaaatattttcaatcatttggttacgtgatggactaatatataaaccaatcaaccatgtgcttgtcgtcatttcttttgtttattaattgtgtttataaacacatatataataagtatgtgtttattctattgttaacacaacgtttatcatgcaatgcaagtcttagtctatgtttagtttattaacggaagataaaatatattattactaatagaaaagaggatacgaccgacgaagtttgaattttccaaaatggcaacctaacttaaataatgcaaaatcattaaacctacaattcttatattatcaataaaaccatataaagactctctatagaaaaaaactatataaagacaatcaaagactctctcgttacaataaccacaaacaacaatacacttctcttgacgcctatctctttctcaccaccaccattaccttcgtcacttctctcttccaagcaatttaaaccttcaactaatccagaaatgcaaatgctaagaaacttaagcacgaggacgaggagtcgtcgcggcggatatgagcgtgtaagcgatgattccaccttcagcctacttggagcaaagctaaggaggtcaacgagcgttccatactatgctccatcgataaggcttggtggagattttcctgtgattttggaaaagcttccacgccaaaaaccaactaaaacagtggtgacaagcaaattaagccatccaatcttcagtttatttgatggttatcgccgccataacaagaagaaagcgacggctaaaccggagttctctagataccatgaataccttaaagaaagtggaatgtgggatttgagatctaatagtccggtcatctactttaagtagatgtatataacaccatatatgttatgatttgtgttcatttattatattatttgtgacaattcttagtgatccgattgatcgatctataagagctattttctttttctcccccttgtaattttttaattgatctataaatttaaaatttcaaagaaaaataacattggttatagaactactttgtttataatgtatggaagtttgttttaaatttttagcacttacaactatttttagaaaagttcagtcgtcatttagtatttttacggagtattcattgaatgaaagaaattttggtccacatctatatatatttgggacaaagaagtccacatgatttcttttaaccaaatttttcgtgtcaaagttcatgttttgcttagagttgagttacaatcatatggttacgtgatacactaatatataaccacatcaaccatgtgcttttttggccatctttttgtttatcggttataacatacaggttatgtaacgtaataattagtcttttgttttttggtcaacagtcttgtgttattctattgttaacacaacgtttatcatgtactaatgcaagtcctagtctttgttaatttttttaaaacgggacgaaagtttgaatttttcatatcggcaacttaactaaataatgcaaagtcattatagtatattatatcaacaaaactacagtatattaagacaatcgaactctctctctacaataaccacaaacaacaacacttctcttggcgatatctttcgcatcaacatcattaattttcaactttgatcgccaccaaaaagaacaataacccaataatgcaattgctaagaaccctaaccacaagaacaaggagccgtcgcagtggatacgagtgtgtaaccaagcattccaactttagcttactcggagcaaagctaaggagctcacgaccgttccttactatgctccatatcgataggcttggtggagactttcctgcgattttggaaaagcttccacgccaaaaaccaaataagacagtggtgacaagcaaattgagccatccaatcttcactcatgttatttacatatatatgttatttataaaaatttacatcgattcagttagcctgataaagtaatcatttcactgtttttattttattttaatcattttgatgtatttttctaatttttgagtaaataattcatcttaagttttttaattattataaatagttatattatttaacgcttatttacgattacttattttataaagaaataaaaaataataattattttcttatttaaatagacagaaaactaatgtttatttggtactttatatagtcgttaaatgaactgtaaattcaactaatattcacgaaatctatatatatatattaatatatatatatatatatatataataagttataacatcatattatataatctttgtaatataaaaaaaattacttaagaaaataaataacataataacagattaacattagagtgtctttggccttaagtcagattaagtttctcattagtgacatatcaacgtaagagaacgtccttcatctattatatattggtgtatctagcaaaattcacaagtaagtcaattagtatatcaaccaaaaacattggagtgtcttttacttagtcgaattaagtttctcatccatggccttatttttcttaagttggtaaaaagctttggattgtttttttcttagttggattacaacttacaagcacacatgaaaaataaagggtgaagaataaagtttttcaggaggaatatttcttaaataataaaaataagggaacttaggaataaggaataatagaaatggagatgagacgagcgagtggtttcttaatcagggccatgcagcagaagcagaagcaggagcagcacatgctccatttctctaactcatccacctttatcaacattgattctctaagatcatccatcaatatagatatgtctttttcatgtttacaatatctgcgtgggaatatcgtgttctctcctgatattttttctagtccggatgatactgacacatgtgacatatctaaatatgctctttaaaaaaaaacttaaatctatggtttcgtttctatctaccgacgataaagattttcgagaatattatatcatcttagcatctatggactattgtccgtctagattaaatgggagctgtaattgtttattcttcaaatataaaaatatttcatgtatgctttttttcaaattaacatttagatttcatgatttttatataattaacttctactttaaacattccgcaattctcctagaaaaaagttacagcactaatctaagggaacataaatcagtacccttgatattcggtttaactgtgtatgttctactctgattctctattagatgttacatactctttaattaaacttcatagtagataatgatatacaaaaagtcttatggtctccttccactgggtataaaactatatatattctaaatcaacttattatattttcgtttggatctttaataaaatcttctctttatagcaatgtgcactggataatgcggttgcggccactttattggtgatgaccaattaagccataaaaccaggacaatttatattcttttgatttgattatatacatcatgcataaactatagtgccacatttctttagaaatgcatttaaaacatttgataccttcgcattatgtcaagactaagactaacgctttttaataaattataattacaagaagctt

SEQ ID NO: 246 - DNA, 82356 bp, Arabidopsis thaliana
gaattcgttccacaaattataattcatttctaccttacgcagatcttaataaaaaatctgtaaattagaaattgtttttttaccttacgcagattagcattcgccttatgcttaacgtaataattactaaaattttacatagatttttcttaactcttatatcttaatatatgttttctgtaaattagaacttgttttttactttaggcatattagtattcgtctttgtataagtgttatattgcgtattatttttgacttcataaaattaatttacatttcggaaatagatggtaaaatcgaaaaattaacgagttgaagggttttcttgcacaaaatccttgaataaaatatctaatctaataaaatcttaaatgttactgaaaataaaaattaaatgttacaaatgagtgtgctgaaaacctccatagtttgtagtttatggagggcttatgtgtatcaaaatcaatcgaaaacacattgatgaggctctaatgtataaatagtataacctctgatatggactagaaagaactaaggaccaagtttggttcaactcggttcaggtattccggttttccattatttcggttaagggctaaggtaacaaaattaaccaaactaaaattcgggtcggagaataagggactagtaactcccatcttgccgtgaaacaagtacagtatgattaatcaacgcatgtatggtttaaaacatattccgataacataaaaccgatatatgaccagattccacgaagagacttgcattcgttgactttgtttcataaaagaaagcatccaaaatgttactatttactataatataaaaaagacaggttcaacgttacgacactaattgttgaacgttaggacaccatgcgtcgagcacgttgatatccaatatcataaatctttaaatcctccactgaaacttgagaaacgattataaaaaataaaccacatgaaaacaaaaccagatgtgaaaagttgatgaaaactagggaggtcgtgtttctccgcttcatttgcaatgaagataccatcagcctcatgcaaaactccggtttgatttatcttttctcccggttcgaattggttttctttgtaaaccttttcttatatatatggttgtaaaagtcgataaacaaacaagtcttactcacttgttcagtatttacactatgactcaaaagcttatacgtggaaagtatcgttaaattcacttaatgtatatttttctcaatatggtattatgtactcatttgttttcgaaagtttttgtcttctgtaatgttgatttggtatgaatgaatttagaaggaaaaaaaaaaaactatgcactcgttggctcacttcactccacaccgaacttcaaagtaaacggcttggatccaaaccacgcttcaaataatttcagttttaaccgatcttaccaagaatgatatgatcccacgacgtgccctgccattgaccttttcctaaaaccccttaaaaaaaaacagaacacaaaaagttattacaaagaagaagaaacaaagatcaatcaatcacctatattgttgatcaaaatggaagctcaaaatatctttctctatcttttgatcgtctttctatctctacacttcgtgtttacaactctgaaaggacggctgagtcccgcgaatacacggcggcttatccgccttctccatatcccgatcaaatctccggtcgccgctgctattttcgctagaaaagacacccgtgagtttcttgattcatcaatcaaattagtaaacgaagaagacgatttcggtttcagtttcgatttcaaaccgtacatgatcagcaaagcagagacaataaacagagcattagatgaagcaattccacttattgagccactcaacatccacaaggcaatgcgttacgcgattctcgcaggcggaaaacgtgtcaggccaatactctgcctagccgcttgcgagctagtcggcggggaagagcgtttagcgattcaagcggcttgtgcagttgaaatgattcacacaatgtcactcatcaaagacgatcttccttgtatggacaacgacgatctccgacgagggaaaccaacaacacataaagtcttcggagaaagcgtagccatactctccggcggcgcacttttagctctagctttcgagcatttgacggaagctgacgtgtcatccaagaaaatggttcgagccgttaaagaattggctaagtctattggaacgaaaggactcgtagcgggacaggcgaaggatttaagcagtgaagggttggaacaaaacgatgtcggattagaggatcttgaatatattcacgttcataaaaccggttcgttgcttgaagcatctgcggttatcggagcggttataggcggtggaacagagaaagagatagagaaagtgagaaactttgcgaggtgtatcggattgttgtttcaggtggttgatgatatcttggatgagaccaagtcgtcggaggaattgggaaaaaccgccggaaaagataaggtcgccggaaagctgacgtatccaaaagtgattggtgttgagaaatctaaggagtttgtggagaagttgaagagagatgcgagagaacatcttcaagggtttgattctgacaaagtcaaacctttgatagctcttactaacttcattgccaacagaaaccactgaaaattgttgtttgctaaacaagttacgttaagatgtgataatgttgtcaaaatatatagtaacagtggaatatgaatgtgaccagcacaaactatagaagtttctttattgagagcttgtagtttccattgtgcttagtagccaaaatgatttcgtgtttgatatgtcctttatttttgttgaaggataccaactttgtaatgaaactatacggagtttctaatttcatctttcacactattaatacattgatggtcatggtctgttgttcccatctctttatatgcttcaagaattcaagtatcctcctgggttatgttggaatgtttagagaaagaagaaaaacagatcaagagacatttgtatcttctcttgtaaagaagacaagaacaaggataactctttattgaatctgaaatttgattatttactcgacgatactttacattaggaaaacacttgcacttatccaacaagacacaactcttactcacgccctttcttaacaagtcacgattaacacaaaccgattgactttacatacgaactaacataaagatatcataagatttaatcatggactcaaattctaacacaataattttaaaattgaaagagaacaaactttaaaactgaataataattttaactatgaaattctctaaagacttttgaccgaaaagataagtggactttgatgacataggtagctaaatcaattcatttaaacctttttacattcaacaccatattcttgaaacatgggttttatatcatgcttctgtcaaaatgggctttcatagaccacgtctgtcacgtaaaacatgtttccaaattaacgttaaagaacattaaaacattaaaacatcgcaaatgttgcttaagaagtagtattatgtccctattgtctatgagaaacatccctccctcgtctcatcaactaactcttcacgtcctatttttaaaattgattgattctttaaggatccagcttataatttctccaagccttgactaagcacatagacattcatttataaacatacaacactgattaaagaaagccaacaaaataaatgacatagaaaccttacaagtgtctctttaattaaatgtattaaacaaaggtttcctcagggcaactaataacattaggtaaagattatcctttagctgttcataatacttgtgctaaagatgacaaaccaacaattttccaaagccaaacacaaatctgaatccgaatccacattctcactacatcatctccgtcctgatatcaatcgaaaacacgaaaaaaaaactcaatccaaatcatctataaatcctagtgatgaatcatgttcacaagtttgttctctagaattctatagcaaaaacatgaagcataagtttactattcagagttagctttaggggcaaatgatttcttaccaaggagcttcatccttcggtgaaccagccgggtatcggattatcctctgcagaatcacggttctcgcctttgtcacatcgctacaatacttacccgcatgttccccaagttcttcaatggtttcagtaaacacatcgagcttcttcttgatctcatctatagcaagcctcacttctttctcctcagtaatagcaaactcagctttcttcaacaaagattcaatctctacttccactttacgcacaagaatacttatattatccatctccttaaccgagatataagtcccgattctaatcgatgtaataatctccttctgccctctaaccactttctcatacttcgtccacaaagtgttgcaccatttcccaacagaacctacaggaacagccaatgcaccagctatagccgccacaacaggcggtgcagccacagcggctgcaaccaccgagaagataagcacagagacaaacgcagtcacaaacaccatattcgacacccttctccatgttttgatattcctaagcctcttatcgagttttctctttaacttatgaagctcctcaagcatcataacctgttgcttgtaaaccaaatcaaaaagagcaaagaactctttcgtaaacggttcaccagctactttaaacctcttaagctcctcaagagtcttctcatactttctattctccttatcctcattctcttcctcaaactggttaacagcaaactgaataatcacttgactccgcctcgcgcggttaagacaattctcaagctcagaacagaaatccatagtctttgcagtactttcaaaatacaaattcacaagagagaacaaatcttgattgttccatatatcttctttatcctgcaatataactttgaccacatcttgattcatatctaaaagacattgtgtcacttccctaagtgaatcaaacgacaaagacttgatctcaactcctgaagcaagcttgttgatgactctgttagttctttcgtgaagcgcagagtcaaaagattcaagctttggatcttcactacaagctctttcgtatgagcttaaatgctctgtgtactctgagtttatcttgatttgaactggcgttgacggtgaaccaaattcaacattctttttgctcttgctagattttcctcccatcattctcttttctatctatctatgaaaaagcttaagcttgtaacctaatcaaagagcaagaacgacagattagaaaccaaacctatcttgagctttgcaatgagaaatgggacaaaatcgaaatgggtaattgatttatagcttaaagcaacaaactttatgccgaatcttacggagcaatctaaatttttgtaaccgacattgaaaagagaaaacttaaagcgcaagagtaacttactaaaaatattgcagagaattagtaaaaaaagtgaaacagagaattcaagattgatgttaattacctggaaattgaagatgatttttggctggtaatgaaaatgcgattgaagtctgtgaaagagacaggagctaaaaaaaggtggtgtttttatagaggtgaagagagttttggtttagggttttactttgagtttatggaagaagaagtagcttgtacgcttggagaagcttggaagagagagaaaatgcgggaaaatttaagggaaaaggtagagatctgaggaggaagaagatttctcacgcggttttagaaacagtgtgagaaaaaagtcttgcactactctcgatttggtcttgacggactcatcaatggcacaaggaagacatgaaagaacgaggaaggaaaacaaaaagaagaagaaactgaagaagagaaaagaaaaaagtttttatctttttcactttctttatttttgttgtctgaacaaagacaaaataatcactaatcagtcctcgaggcttgaaaattgaaggcccaagttttcttctagaatagagtagagttcaaagtagtaagaaaaaaaagattgaaaagacttctaaatttaaacatttcatattacattatcttaaagaacacataaatcaaagtagagttcaattatatgaattatattggctctaatgacattaaaaaaataattactgattagagggtagttttaaaagtacttttccgaaaaacagagaaatattccaacccacattttaaataatttataggagatcttgtattgattttttttaaagggtcgatgatttgttaaaattaggtagtgatttataaattattgaattctctcaatgattttgtatcatgtcaaatattcagtcctcacgttttcctctcttttttaaataaaaaaataacatataaaaacatcactatctaaaaatgaaaaatctattagtctattttttgaatactaaataccaacaactaccaatacgacatcaatgattcagatactattatgtgactttggagtttggaccaccacaaaaaagagatattcttaattaatcaaacaagatccaaaagtttcaatgttgaagaaattttagagcaatcccaatggtttagaactaattagttcttaattttggattttaactttattttaaattaaaatattgtttttattaagttaagaagaaacttaactaatttctactctaatggttaagaactattgagttcttaagaaacaaagattcaaattatttcaaaacaatgtgtatccactcaaatcacaacacatatactcttcttagttttaagaaaacatcttaactaagatgtttattaactaaggtttgttgatttcattaactttaatcacttttatagctaagatacatggttggagttgctcttaacaagtcacaacaacacaaatttgaaaatatcatccaagaacacaaaacataacaagtgacttcaatctttataaccagcaaaagccattgtcggagaataccatctaacagttgaactaattctgtcttttggcaatgtaattagccaaagctagtaaaggtttaactctactcgaatcaaacccatgaagctgttcgtgagcatcgctcaacaacttatctgcaaagtctttagatttctcaagacccattagtttcggatacgtcagcttatcggcaatcagatcttttccggcggtctttcccaattcctccgacgacttcgtcacgtccaaaatatcgtccaccacctgaaacaacaatccaatgcatctcgcgaatcttctcagcttctcaacttcttcatcagaaccaccaccaacgatggctcctaacaccgtagccgcctctaacaacacggcggttttatgaacgtggataaactcaagaacctctaagccgacgtcgttttggtccattcctccactggttagatccactacttgacccgccacgagcccttttgatccaatggctttcgctaactctccgattgctcgaacaactctagccggagaaacagccgttgacgttgctaagtgctcaaacgcgaacgatataagcgcgtctccggctaaaaccgcgacgtcttcaccgaaaactttgtggttcgttggttttccgcggcggagatcgtcgttatccatacatggaagatcgtcgtggatcaacgacattgtgtggatcatttccacggcgcacgccgccggtaacgccacggattcttcgccgcccactaactcacacgctgcgatacagagcacgggtctcactcgtttgcctctggcgagaagcgagtaacgtatcgcttcatggatcttgattggttctcggagcgagacggcggagtcgagagcttcattgacggcattagcttttccgatcatgtatgacgtgaaatcgaaatggttgtggatgataccttcgtctctggcggtgaccgataaaacggtagagagcttccgacggagaaggaaaggttggattttgatgaatccgggtatggatgcggagctggatattttaactgatggaaaaattgatagattgagtgtagtcatggtgatttctctaaactcaagtttttttctgtttactttgaatcttttttctttttttttcgccgtttactttgaatctggagtaacggataggtgggtttaaggacgatgataatatatatgaaagtggccaactctctccatatgattgacacatcatcactttaccatttgccatgtgtctattaaataattaatgtaagctcttcaacttttaatttataggttaatgatatatttattattttattttacatatttaattgtattattactaaatttattttaatattacatgatttttcaataaaccattttaatagttttctcatacccgaagattttttttcttgtaatccaaactcaaagtacgagtgtataatagttgtggattacttaatgatttgagtaagttactctcttaaattgatatttatattctcttaaattgatatttatattctcttaaattgatatttatataataaaccactgagggtgaagaatacgtaaaaagctccatcatcaaattcttaggtttttagaatccaacactaccatctgttaaattggtttaaaatcaacgttgtttctgaattatgtgtatgatgcattgttgagaatgttgttagaattttttttaattaaaattgaatcatcgaatacgttgttatattgcataaacgaatgcttttttcagttgatactttttttttttttttttttttgtcaaacaagccttgtatttcattcaatgcatctcctaaaggtaaagtttacaagatcttcaagcatacaaagggttaaaaaaactccaaataacgaaagctaacaacaaggaaaaaaagataggtttgataagccatagaggaacggagacagaagcaatcaagcaacaagccacatgcgacctcatggtgtgtcatagacacttccgcgaccacgtcggggagtttcggattactcatgatcgagaagacttgatcttttgactttaaaaaaatgtcctttgtcttatggctcgtcggcaagaaatgcattgtggacgttgggaccaatggtaagaactcatggaaggtaagagttttttcgggtatgagttggagctcaagctttagggttaacggatataaaatattgatgaagatttggtaaccaccactccatggagacgggatcataatgacattattcatcaaacttttactttcaagaatagtacccatgatgtagctaaatatatcaagtatgaaatcaataataaaatgaatcggagatgaaaacttgaagaaactacggtaatcactgctccttagagacgagatcatcatgccgatcttcttcaagcaattagcaacatgaatagtacacctatagattctaatggcaaggttctcaaaggatttttgtaccaacatagcagcaatgttcgattatgattcaattgatgtccattagcaattggtatcatgaatcgatgcaaatacaagctaagagaagacaaaaaggagtttgggtcaaacctatgattttgcggagaccgtttagaggggctgggccaatgcattagtggagatgggccattgttttgggggatgggcctaaatttggttaatgggctcgaagaacagtggcccattaagaggaaccctaacaaggcaacagtgtggcagaggatggtgatggtgcgacggatctgaggcggcagataagaactccgataaacgctaaatgatgctggtgggaataaggtcaacgtagatgagatacccacataaaacaggtcggaggtaaggatggtgttgcatgtagagatcatagcggttttagattggaaaaattggggctgttctgttggtggaaacttcaaaaagatggatgcggacaaaagctgaatagaaggaaagatcatcgagcatttcctctgccctctgtcgtcaatgaacggccgaggaagttaaacgattgaaggttgggttgggatgattgagataatagccagagaagaattaaaaatatgaagagataacgaaagaagtgaaacgaagaagagaaatcccgacgccggtgagcaaaagcatcaccggcgccggaaggcgaagctagggtagtctcctcgatgttagtgtctgggagagtccttaagtttatataatgtcgtcattctaagacttagattatctccaactccgctacaatattcatctccaaactccttcagttgatattttaatgttgcttattgcataagtgaatgattacataaataaaaattatatttaaattaaaaataaaaaaaatctgaaaaaaccgcggcataacgcgggatgatcacctaatgtttaataatttgattaaacaagaacaatttgctttcatttgtgattgtttatcttatcatatacacctcgtgagacatgacgacaccactaaaatattgaaaattcgttaataaatttgtttctctacggatctggatctttaggcacatggaaaaattaatagatttagagtagtcatggtgctttctcgaaaaagttttttttttttttgaactttgaagtggaatgtctagacccttgtgggtggtttagggatgatgatgttcaataatttgaaaaaacaaccttctaaatcgattatgagggttcaaaatctaatctaattttcgagaaagctaattaacgattttgaggtttttttttttgaaaatgatgtcttttagctaattatagaaactattaacggatacctaacattgtctgattagtccattaggtagttaataatatgttttagttggttttgtcaacgaaaattagtgatttaacttaaagttaacataaaatcaagtattttattcatcaaatttaaaattcatggtttaaatcaacgaaaatggataattgatgatttaaatggtatttttcccctcatcttcttctaccatgacttgaactcatgcggtggtgtttagccctcataccaaatgagctacaagaacaggctaaatggtatttttcttactgtaaatgatgtagagcgttgtattatgttttcaagtgagaatgaaaattgacagacaaaaaaagaaaaataccagaaaaaagatatgtgagtaaagcccaaaagtttagtttttctacaagttgcttttgaaacgatggatgggtatgtcagtaggcccatttagtttcgttaggcctaataaaatgagtttttccttttttttttttttaatatttttttgaataacagaaggttctgaggcgaaacccgtaatctttccaggcccgaaaccacagcacgtaatattagtttcggattttcattatatatatagtttgaagaagggttgtaattttttcagaatcagcttacggagaaagctacgttcgttcgttcctcgtcgaaccaaatcaatagtgaagacgaaaggttcgctcatctttgtattgatctaaagaatttgcaactcgtaagctctctccgatctcttcgttttcacttttcgtatcttagttttttttttgtttcttccttccgatttgataaaatctccgatcgtttggttatccgaagaagattcatgatttgtttcatagtcaatttttaactagtttcgatctctctgaatgaaatttcgttagggttttgagtgattgttctgttgtaattcatgaattttccaaagaaacttgtgtgaataattgtatgatgttgttgattgatttgtgagggtagaagaacgatgattgggttattcaaagtgaaagagaagcaaagagaagagtctcaaagtaacaacggaagaggagcttctactgtcaagaagcaatctgctggtgaacttcgtcttcacaaaggttctctttctcttccttctctctgttttttttttttgcttttgatcttattcactgtctaatgttgaccaatttgtaatttctctgtagatttctagggttttatgttgtcttctagttggtgtaactgtaaaatctctattgaatttggttcgttatgtgttagaactataagattgtagaggttttatgttgtcttctagttgatgtagttgatactctctcagtgtgttttgactttcttcatcaggttttgctgttgatcttattcagtttcgatgttgaacaaactgtagattttaggttcttttagagttatcactatcaagtatttttagggttctatgttgtcttccagtaggtgtaactgataaatcatctctgtttatttgtgcatagatatatcggagctgaacttaccaaagtcttgtaagatatcttttccgaatgggaagaatgacttgatgaattttgaagtaaccattaaacctgatgaaggatattacttgtaagtaaacaaaatctctatctttcatttttgtttttgggtccctgaatttgcgcaaaaacacactcattcgttcttgttatacctaaacaggagtggtaactttgtgttctcattccaagtctctaatatgtacccccacgaagctcctaaagtgaaatgcaagaccaaggttaggctttttttcctcagtctctgaagcgttttatgttgtctgatatgtttatacagaatgctaaagaatgtcaatgttgtaggtgtatcatccgaatatcgatctagaaggaaacgtctgtctgaacatcttgcgtgaagactggaaaccggttctcaacataaacacagttatctacggtcttttccatctcttcacggtaacaagttctccctgaccgatgatactccattgatgttattatcttgggccttctaatctgaagacttgttttgctttgtttgttcacataggaacccaattacgaggatcctctgaaccatgaagcagctgcagtgttgagggataacccgaagacgttcgagtataatgtcagaagggcaatgatgggtggccaagttggccaaacctcatttcctcgctgcatgtagtctgtctctggttcggtttcatagcccttttcttcttctaaaattttttgtcttgtctactcttgtacattgagaccaagagattttaggaattttctgaatgtttttaaatattaatttaactcctctaccgcacaattctttttcaattcactaccagattatagccagataataatacttgcttaacaacgagacgtctgccatatatgaattacacgttggtgattttgtgtatttcatcaatacataaaaacaattcatgaaaaaagtactagtataattttagaaaattttcttgtctcaataaagttttaatatatcgactatcacaaaaatatataaattcctaagagatgtattaattccaaaaaagggatttgaatatgtagattaattttttttatctcaaataagaaatatcagaactactaaaacaaaagcaattaggatgagtataacattaattctcatgccatctctacttcccttgaactagtagttctatcgatttttcgatctttccggaaaaggaaatgcaacggtgtgtaacaaagacaacacaatccaaacgggagagccatcatccacatgatccctttccccagtgcctcagcctcacgaccagagtcgttaacatgatcaattccttttgcgtcaaacccaaaaagtttttccgacatgatcccaaccaaaggcgcaccaaatgacgaaaaagtcacttcgagtgcacgatcaaatgcatagaccatggttcgatgcttagcaggaacaatctcagctaagattggagagttaatggctggtccacaccaagttatggtcagccccataagaaagagagtgaccaagaagatgtagaaactgttaacggactgtgggatcattcttaaaagaacaatggagaacatagctcccatgaaaacgctgaattgtgcgcaaatcaatctgcccgagtttggaaacacacgagacattttatccgcaattattcctccgaccaatgatcctattgcttgtccggtggcaaatattccattgaggagagccgcctgattatgatcaaaacctggaaaaaagaactttgagaattcagagatctttttggtttatttatctaagttaagaggatatatatgttgtatatagtaaatgtattttgaaaaataatcaaaaaatttaaagttgtactcataaattatattatattttgtttttagaatgtatccctagtaacaaagatttggttttgtttgatgtttaaggggttaaggatttaatgaaccattcatgttagatagaatatatggttggttcatgtttgatgtttgatataaaaaaaatatacgtttggtttggatgaataccaatgagttcgaaccacattgtccagaaaagcattgcattccacggcaccgaacccacgattccttgcaatacgatgatctgaaacgttcttaacttggttacatcttttatggccacccacgattccttccaaaccgaagagctcggactctccatcattgtaccaccattgttttcatctctacaaaaccacataactaactcaaaaccaataagcaaaaaacgctttattgtcatgttggtgctatatataaccaagaatgtagagatttatattaccgttcatgttgatcatcgtgatgaacaatgacgctgctagtcttcttttctctcgggtcactgacaaagaagaaaacgaggatcccgacaatcgtactcagcgtggcactcaatataaaggcgcatcgccatcctgatattccaaagaaatcatgaccagccatgaccgttggcacgacggttccgcctatacctccaaccgtaccaatcagattccataaaccaaaaccaaaacctctcgaactctccttaaagctatccgcgattatcgactgaagcaccggataaacaattgcatgtccaaccccattgaatgctacaccaagggtaacctagttcaaaaaaatgaagatcaaatcccaaccaaacatacatacatatattatataaccatttagccattctacatgttttcagggtcatatctaatcttttttaaaaattcatattttatgtcatatttataggaaaattaaatacaaaagtccttgtgagtgatttataaaaatttcatattttatatctaacagttttataatttttatgaaccaaaacgatagaacttccaaattatttatatcatagtcataacagtcactttgttgattttttttgtacttttatagaaaaagcaatttaattgctgacaaaaacatatgttgacatgtaaacaaaacaaatataagttgacacacaagtgttttatcttaaaagtatctttcttccttttaacttttaagttttcgtaacaactagttgtttagcaaaaaaaacaactaatgactaagttataatttcttttatataaaaagacacttttactagaacttaaaagtctcagtaattctaattctcgtttctgtgattttattatagttaatgatatattcttttgtctgaactttcatttaattttttatttgacacattgatatttttggttattgcttttgtcatatttgtaaaagaaaattaccaaacatataatgtttctaagatttatgaacttcggtgcaaaagtttaaattgtaagagaagaaaacttgaagttaatgttttgtggtaattaattagactgaaattaatggaaaaaaacctggatgaagtagcggctgactccagttgcaacagttgatgagacccaaaagaaacttccgaacgcaaaaactgtgggacgatcataactgatggcaaataaaccggctaaaggcgaggcaagtccttgaacaatatttcttataaacgaaaggagtccaatatcggacagctttgcatggaacgcttctttcaattctttggcagttgaaggaatgagtttttcatctgctcgttgcatcatagtcgctaagttgatgataatgagagaaatagagattccatatatggtccctgatctatgaacattcggccaaacatacaaaacaacaacatttgttagaaattgtaagaaacatatgtgaagaaatgagaaatatatggtttatctatttagtttttaattgaatttatttcatgtgtggtttaaaattgaaatatagagtccaagttgacaaaaaaaaaaaatcaatagaaaggtaattaaagatagaaatagggcctttcactaagagactggttctaatagaagaatagtatgaaggtgaagacgagaatgaagaggatttcactaagaaaagggtaaagttgtttacttcattttcatggttttagtatgaagatgactggttaagagaaatgaagaacaatatatttaaagtaacttctatataaaaaaaaatacaaaggggagtttacatgatttatagtctacttaagaaaatatacattgcaaaaaataaataggatcgtttacttttgtgtttactacttatatttgggttccgaataatataagaaaataatcacatttagataaaaatataaaaatagaggaagaagatctcaatttattaatggttttgtttttttcttaaaaagtcatatttctagattttattagattatattatttctatattagatgatgactcgcataatacaaatgtaagaaaatcgtaaaattactgatgttggatttttattggacgttcacaagattgtgaaaacattccgtgatttagtaagactcttactaccaaaaagtcaaaaatatttaatagttaaaatttgtatctaaatatctttttagtaattttaaaataagatattggtaaatctatataaatatagaagaagactattaacttttaacaaaaaactttacttctaaaccaaaaaaaaaaacatttccctttaaaataagaactttatgaaacttgaaatgattcaatttattaaaggttaaatggcttctggtgttgttttaacctttttacactgataattatgtcgaagagtgtgaaaaggtaagtgtataaaatgttttcatattagttttggctttcgactttatccttcatacaacattttattcacaaagtaattaaagactttttttccaccgcattgtagaaataatgtaatatagttacttatgtcataggtaaaattaaatcaaagaatatacttaatcggtgcacacacacaaaaaaaaaaagaatatacttaatcaatcagtcaattgtgatatttatacattatcttttgatacattgaattatttaattacatataatttgatatctttctctcatacatgccaataccttagcccaatagtcttagattctggaataaatattgacgttttgaatttattatcaacagaaggaaaatacacaaatattggccttaacactaagaaagtgtgtaaaacttgattcggacacaaagacggagaagatttcattagaaaaaaagatataagttactaacttgatgttcatggtggtacttaagcattgaagacgacgaccggtgataattcccttgacagtttcgtatccttcacaactaccaatgccaaattttataaccctctatttcacaactattaatagacaattactggtctttttaactataagatgccaattagctaactaataaaattaaattttatgaaacgttataatttcccgtagttgtcttatttgaaatctaatcttttgtaatggcccacctttgtgtatctaggcaattttcatgtttctagaattttgtttatatttttttaatagtaatatattatcttgtctctcactatatttattcacttttattttgattgtgatatagtgtttaatctttgacataacgattggttgttgtatctatgtgtgtttacattttaattttaaggaggagatacagtggaggatttattgatcaaatatatatatgtttactttcttatatatcttggtagaaaaaattaagactcttaaattttagaataaaactagcaatatagttattaaaatatcagaaccattaattatgtattaccatttttccaattaattatacaatgttaggaaattaagttcttaaatataataaccaatttaaattatttttaaaaataataatatttcattaacaagtaaaagatagctttaaatttaaattttaaaacttttgactcccacctttgaagtttcgaacaatcttttattagaaaaaattagatactttaatatttctaactaaaaaataaaatcgtaagtataaatattaaattattaaaatcatcaattttctagtactgttttcaataaactattgcacttataagcaataattaggtgataaaatcatagtagtttcttagtaataatttctgaattactttttgtatttgtaagcaattagattcataaacaaaactaaagtatagtaagaaaacctttatataagtcatattatttattaaattaaatcaaaattggagtatactaaaactgctttatatgattatatctataagttggaggtgtgaagattttggtgcttaacatggccaatcgaatgaagcatgtggatgcctcgtcaaaataatatgtgcttattccatgtgtttcaaactttaaagctcaccacttggtttggtagcatactaaaatcatctattttctaaacttctattctgaacatgagaacgagagtgattatggtttttgtaatcaaacagtggcgccgcatatattttgaaggtatcaaatttataatatttttagatgtgtatatcatttcattttgcatatacttttttgggtctcttaatttgaaatgaatacaaaataagtagaataacaaaactaaagatgacataaaaatatttttctagtttatcattcctttcacattttaagggtgtataatttttagctgaatcatgttttctttcatctattaaaaaggttcgtcaccaaatgtttttataaagttgtacacaatttgtaaaaaaaaaaatgtttctaaaaattagacacaaatgctattgtagatctagatagagcatttctgagagttgtaagttttttactatgatctttcagaccattcagaacagcctctcttgcaaattgtatcacaaagtaggcactcaacaagaaacaaattgcaagtgctgaaatcaatttcttttggtgatctcataagctttactcatgatttgtgatagtgtgaagtttgtgaagggttcataatatagaatacaaatgtttcaaggctgtgaggaaacagttgggattcatactaaggctggtcttattttagatgtgactactagatggaactccacatacttgatgttgtctaaagcaatccaatttaaagaagtgtcgcgtaatttatcagaactggaaccgagttataagagctttccttcaaagttagagtggtctagaggagagcttatatgcaagttcttgagaccatttgaggaaatgactaaactgatttctggttcatcatatcctactgctagtttatacttcatgcatgtttggaaaattgaaagttggctaagagctcatgagagaactgatgatgagattatctttgacatggtggaatccatgaaactaaaattcaaaagtattgggaagactattctatattcttgcaatagctgcagttttggatccgagattaaagtttgcattcttaagatactgctataaaagtttaaagccgtcaacttgtgagtctaagttggagcacatccgtaagaagatggaaaaattgtatagattttataagaagaatcctaagaactctgcttcaactttccaactcatggaggatagcctaccagctggatatggtgtaaggatcctaaaaacactacttcaacttctctttattaatttttgttttatttctggttttgttttgctttattgtaggggttttatgattctattttcagaatgtaagaactggaaattcagctttatatgaatatttagatgaaccaactttggatatggttgcttttcggagtttggatgtcttaaagtattggaaagacaatggttcacgttttaaggagttgtcccgtatggtatgtgatgttctatgtattcccattacaacaatgtcttctgagtcatcatttagtgtgggaagtaaagttcttaacaagtacaagagtcgtcttcttccatcaaatgtccaagctctgatttgtgcaagaaactggttgcacggctttaaagagataagtaagtttactaacttggtttgtttaagacatctcagtatttgttgataatctgtgaaatgattgtgataggtgaatccgagttttctgaggcaagagaagaagaggaggaaggagaagaaggtggaagatagaagatccaagttaagtgaaggtgtgtgactttcttaatacgactatagacttggttgttctaaatttatttaataggactcccactcctgcttgctcttggccttggctgctttaacaccaactattgcaattttgttaattagctgaatttaatagtctttgtattgacatcatagttatcagttagtctatgtgctttgtttggattgatttctagcctccttaactcttaatatgctttaccatatgctaactcttaatctgttgttattagcaactacaatttagctgaaagtgcatcttattatggaatgctttacctttgaagcgtgaaccaatcttcactgtgttttttttctgtacattcagcaatttgaacctttttacatgtctatgtgaatgtgatatttttgataggtatttgaagaagaagaagattcttaatatgttttcattttgagtttatgaagtattgaacgtataatacttgtttagtttatgaagtattgaacttataatacctgtcaactaagaaagaaagtcatgttttagttttagtttcttacatttctcaaactccctcttgttttcatatcacttctctgtttcgtttctatctatcagctaataagtaaacatttctccatgtatctttctaccctttttatttgctctcgtcacttggttcttgttatggttgaagtttcttctttttcgtccatgagatggtttaagactttaaatgcattgtttgtttctttcttctcctccacatgatcattaaaagataaaactatatatatacaccacaaattaaacttagatcgaattgcttcatccgcaagcgaaaaggtatcatataatatatgcatttttttacaaaacacaagttctattattaatttttattaaaatataaggatacctgattgaagtacatatcttgtatatatgcatagcaaaatttaacacaccttaatatatattcatatagaaaaagttgatatcttaaacagaaattgttgttcatgatgttattctcgaatcacggtacaagataacatcgttttgcccattcgaatagagaattataagatgacccgtctttactccaagctcgttcggagctaaccctcacctcctcagctttagccctaattttctgtccttcttcatcctcttccgccataatctttctcaccagagatgccacttcttcccttccgatgactctctccgacggtaactccgatgtacgaacggccacaccgatctcctcagtcaataacgtggcattcatccactgctccgcataaagaggccaagcgatgatcggaactcctttagtcaaactttccaaagccgaactccaaccgcagtgagacaagaacccaccgatcgatctatggctcaagatctcaacttgtggtgcccattgcgtaaccacaatccccacaccacgcgtgcggtccaagaaaccttcaggtagactggcacttacctgttcatcatcgctggagatcgccccgagatatgaagcgggcctacgtagaacccaaacgaacctttgaccacttaactctaaacccaaagcgagttccactgtttgctcaaacgtcaacgttccaccgctccctaaacacacaaacaccactgacctttcccgttgctcgtctagccactcgaatatactattgggtttgtctacatgctggttagtcctaacaattggcccaataggataaaccggtactttcatgacccggctcaattcttcgtcctctctaagcgcagcgagagtgtttccttgtaactcctcccaagtatttaccaaaacaccatcgctcataggtacctctaagccagctcgtacacactctttatattgctggcccgaccggtctaacatcgtttccatcagctccttcggtccgaccggtttacaacccggtatcttcaaaggctccttaatatcaacatactcaccttccactaccgtatctaacaccggcaagtacaccatgactgccaagaaccacgcatgagttggaacgtaaacgtatttagccgtcatgcctacgtcatcggctacggacatcagttccgtacccaaaaagtcaacaatcatgaccgttggttttcgtttcattaatttcacggcatctcgtaccgcgggcttcatggctcgcatcttcaccaccatcttagtgaaaattgtagcatctggctccacgaggttgtctacatccaccgagggaatttccgtaatttgacagattgttctagccgcggctgcatgtatggcttcggtttctgtcggtgaagaggagccggaggtgaccgcgagaatggtgacgtggatgtttaggacggaggagagacggttgccgagctccaggatagggatgaggtgacccaagccagggctagccactagaagcgcgtgaggctggtccatgatcgatggtcgaccacttacttttctttttagttgctagtttctgtgtagcaaaatcattgtggattggatttcggtataggccatttaacaagtgatatttattattattcggtatagaccaaacgttatattaatgagaccttaaaaacctaaattttgtactgacgcctaaatttgtagacaaggacaaaagacgaatctactcgtggcgatgtttcgcagataactccattgcatatactctgtcgtaacttccgttcacaagaacaatgaatgatgatgacatgtacatgtacatgtacaaatgtctttccatacatcggacacacttctccgggtgatcaccgtggcacacgaaataagaagttttaataagttatatagacaaatatatttaaggatttatcatatatatatatatatatatgtttttatgtggagctatatacttgtttttctcacccgaaaaaaatcctgaacaaaaaccacattaatattcaaatgacaaattcacgaatggttggttccatgagacgattgcatatcatcgtattgggatgttattgggctcgttcgtcaacttaattatttaggctttgttttatggtttaagctttgtataagtctttcactttccattgttaacattggatattatatttatattcaaatttgtggatttcctaattttcttgccatgaaaagtggttattaaagtgatcaacaagaaaaaataatgagaatcgaaatctataaatcgtggaattaatatatgacacagagaaaacattcactactagtgtttattagattattacccattaattttagtccgatatgtttcgatcgaacatcattctaacatttgaatttacacactacttgaatatgcgggccacataccatagtgtattagtgctgcatgatttgggataattaagttatacactggcccatataaattgcactgtgagtcgactttccaataagaagatgtagtgggggatgtaatgatcaaataaacactagtagtgatcaaatctttactttacaaaaagtaggaggaaaatgtttgggctagaatttttaaaaagtttcaactgctttttgtttgtcatttccacttttttactctttttctgggggtaatcccgtagatgcttctcgttagtaacacaacacatggaaagcgtacataaacacaatatcaaaatcttccaattaagacatactttatacaaattgtcaaaaaaaaacattttttatataataattgacaagggcagtctaaatggcatacacttcaattgcttttgatataagtaattatatatatgaaagttggacaactctctccatatgagtgacacatcatcattaaaaaataataaaacttagtgataaaaatttaaaagtttcacattgcattaaatcatccattaatcttactcttaacaaaatatcttcatttaaaaaaaaaaaatacaaaaaatcatgttaatgtattaaacactactttcattttacttttcttattttgctattttataatagtcattacttgataatgactaaaaattttcgtgtattacaacttaactgtttgctacttaacctttcttaatttagtaattttaacttagttttttctttttattacattaattgtttacatgatatggtctttttgtgtgttgatgataaattggtaacaataatagtgacatgcatattttttaagtactgatcttttgagacgttagatataccaaaaagtttattatacgacgctttctctaatatggatatatgcaaatgcacagagagaaacctaaaagtgttgactcaaaagactatttaatttatgtttttttttctctttcatgtgaaaacttttaaagcaaatgagtagtttatatatttgttattcaaattatgtcaatccaatatttagccatgagcctatcatgatgtgattgaaatattagattaggagagaatatatggaacaagaaattgtttgcttagaatcaagttaggcaactttcaaaccaaataagtagcattgtatcatattgttgatgtaagtatttaataatagttaaaaaattagaaacttgggtatatagataaaaagatttatacatgaaaaaaatataattgatatttgaatcaaaagtgaatctaactatacaaatataattacataaaatgaatataactttattaactacataataatatacacgaaataacataaattagcaataaaaatagttaaacataattatttttaaacaaatttcaaacaacccacgcgggtactcacctagttcatataaagtatgtctccaaataccctgtggcttaacacaatccattgattatctcattgtgtacataaagatgattaaactacatatgtatcttgtatgcatgcatagcaaattacaacatacattaatatttcatactagagaactttgatcttttaagcaaattgctggttagcaaaatatatgttatactagagagtttgatcttttaagcaaattgttggtcaggatattataaatgtattctcaaattaagatacaagcccacatcgttttgcccattcaaagagagaactatgagacgacccaccatgagtccaagctcgttcggagctaaccctcacctcttcagctttagtctttatctttcgtccttctttatcctcttccgctacaatcttcttcaccaaagacgccacttcttcccggctgatcactttcttcgacggtaactctgacgtacgaatagccataccaatctcctccgtcagcaacgtggcattcatccattgctccgcataaagaggccaagcgatgatcggaactcctttagttaaactctccaacaccgagctccaaccacaatgtgacaaaaacccaccgattgatctatggcttaagatctcaacttgcggtgcccattgcgttaccacaagccctacaccacgtgtgcggtccaagaaaccttctggtagaccgtcacttacttgatcatcatcttttgagcttgctccaaggtaagaaggaggcttacgtagaacccataagaaactttgacaacttaactctaacccccaagctagttccatcgtttgctcaaacgacaatgttccaccactccctaaacacacatatacaacagatctttcctcttgtttgtctagccactcgaatgtactgtttggtttttcaataagcacattagtcctaacaataggtccaataggataaaccggtacttttataacccggttcaaatctatgtcctctcttagcgcagctagagtcttcccttgtaactccccccaagtatttaccaaaactccatcgctcataggtatctccaacccaatctgtacacaatcacggtattgttggtcggaccggtctaacattgtgtccaaaagctcttttggtccgaccggtttacaacctggtattttcataggctccttaatatcaacatactcaccttccattaccttatccaataccggcaagtagacaattaatgccaagaaccacgcgtgagacggtatgtacacatacttactcgtcacacctacatcggttatggacaacaacgctgtaccaaaaaagtcaacaatcatgaccgtcggtttttgcttcattgatttcacggcatcacgaaccgtggacttcatttctcgcatcttgctcactatttagtgaccactgtcgcatctggctccactaggtggtctatatcgacagagggtaattcgataatttcacaggtccctctagccgcggctgtatgtatggtctcggtttctgtgagggaagaggagccggaggtgattgcaagaatggtgacgtggacgttgaggacgaaggagagacggtttccgagttcgagggcagggataaggtgccccaagccagggctagcgactaaaagcacgtgaggatgctccatgatcttatcacttacccgttcttgtctcacaagatgttttattgattgtcaatggcaatgccaatgtgtgatttgggataaaagaagagattacatatacactgacccataaagggatgaatagtaaacgttatagtcgctatattattatttttataaactttgttcttttctgtggaacaaaataatcttggattggatttcggatgaggcattgacaagtgacatgctattaattatttgttagcgagacctaacaaaaactaccatgcctacttttgtaacgccaaaatttgtagaaaaagaacagaaagagaatatatgagtcatgtttcttcaatatgtggatttagacatgtttcttcaaaaatcggactcgattctccaattaaactagcatgtttttttgaataaacttaaaaatgacaaatttaaaattttaattcctcaccttagaaaacaaaagcaattttttttgtcattctaaaaattatttacaaataagatactaatttcatttgttgcatttttactaaagatataattaacactgaaattttgatattctgatatcattatatgcactatcgtgtatcaaaataaatatgtcatatatatgacgtgcgtgggaaataaaaaattagtatgattcgattttataattttttttagaaatttatacgtgttcggtttgagaccgagttaagttcaattatggagaaaaccccataaaaaaagaaggaaaaccaataaaaattgccaaaatattaaatagtttataaatgtaaattacctaaaattacaacgattaagttcctgcatcaatatcatttaaagatccaccgccaaaaatgcatcaatggaataactcaaagtccaagagatattttttgtcaacagtttctgttcaattctttgttagtaaatcctaattactggtttggtataatttgactttgaattgaagctaatttaaacccgttttaatgtgaagactcaagactatgaaagatagtaactcaactatttatcgggctataagaaatgtggcccattaatgtattcatttatatgcatcctaagtttagtaaattatttgagcctataaagcccgtaaacataattataaatgtagtagtcggatgggaataattgtgcagtatgttttaccaaacacgtaattttttgctattgtaaataatttacataaattttttatgacggcttatagttttagacttttagtcattatgaaaacaaagacaacaagaaatgccatttcccatgttccaatctttcgttctctgattctctctttttcttttccctcgtcgcaatcattttttgttaattccatgttatggtaaattaaagttttcacccaattatataattatatgatattctacttattgagttattccataacgtgattaactatcttttaaaaaaatgattaactatttgaactagaagtctaatgtattatagcctattcaaataagcctaaaacattacaaaagttttcagtcctctaaccatacagactctaaagatacaagtaggcacatgaaaaattataaatcaattgttacaagaaaaagtctcaaatgttaatgaaaatacactccctattttatatggtcagaagtcaaattcgagagattggtcctaatgacactaccgcatttagtaataaatggcgagtcgagttaataggttcttgcgtatttattttacagctgatatagatcttactggttgtttcttgaaggaaaaaggttattatatacaatataatatgtgaaccaatcaaagttttgagctaaacaattatttcgatttgattaagaaaatattatattgacacaatgcttctatgttgtgccatgtataccttggaccaccacgaagttatacaagatcgccttaaaagctgcatgaacgaaaatagaaagaatatattaataatagtattaagtattaacatttaacaattgaaaaaaacaagattaattaactggctaaacagatctaggaccataacttaagagctatctagaaatccaccttctttttagctggtccttgttagaatcattacctacaacatgatatttgtaaacacatgtatggagacacgtgtcctcaacctatttatggaaatgtataatatagattaacatgttgctaaccatgtggttaaagcacctaatggtgatatcgaattcagacacaggttggagctcgaaagaggcaaagataaaggagagagagtatagaataatctttgtaaatgtatatttttggaaagcatatgacttaagtgccacgtgattaaggtttgaccgtacatgattattgattactcgagaagattgtatttgtttgtggtgattaatgtctttaaccaagtaaatttggaatctttaattgttgtataaaaagaactaaatatttaagcttcgctaatttgggtgagttcatgtttaagaaaaaaattgacaaacgacaaacaaacgaaaaataagaagaattgatgtaaattgagaatatgagacttttaatcgatcttacaattacaattcttaaaggcatattattgtggataagtaaagttaaatttttgaaatacatgttattttgggtaatactagtttttaattgttttttttttgcttaaaaaaaaaagcttttttattgtatttcaattttatacttattacaacattgatcgatcttatacttaccatttttcatcgatcttatgatcataaaaacaaaaaaaaacaattaattcttgtgttaaataccaaaatgatatttatatcaaaatataaagtaatatatgacacctaaattattacgtaatatgtttactagttcaagcttagagcctatattggtaatcgtgatacagtaatagatttttactaatacgtcaatcaatttcattatgtaggtctttaacgtttgtggccatttatatatagcatatattctatttctacctaaactctaaagatatggacctaataaaggactcgagatcggttcttatgatcatacatgtactagtctttctataacgttcgaattgtctgtttgttggttctagctagatattatatatgccatcacaatatacacgagtgactgattttttcaattaatagttactattattctatatgtagtattatgtcgtatttttgatggattatgttataattgaggttaattccgccaataatatttccgttattaaatggaatggggaagatgaattaaaacaaatttaaaaaaaataataagcaaaaatagttccaccaataatatttacaaaaatattgacaagaatagatagaatatgctccctgaattaatagaatagtctattttcaagaatatgttcccatatgtcaacaaagtttgaaaaacaaaaaccaagtaaggaaacaaaagcatgcaattgtcggcataatcttgacaatttccctaataaacaactactgtaggtttagtttaaatgtactcaaccaatacgttgtttaggtttttttttttatatctataaaggattataactattatttcatatacaactatagtctagtagtttattccatagtggtttatgctaatgcaatattttatattatcatccgaatttgaactgatatatagcagattattaatgaaaaaaatcaatcggcatgaagattatgctgaaacttgcctatcaatcacgctaatatgaattgtaacctttacctttgtttaagttaccatcctgaaaaaatgtgctactgatcaggctttacgggatgatttgtgaaaaatctattaaaattgtataaattttaaaatacattattgtgtttaagaccagtaattttatcaatcatattttaattttccttaactccgtcaaatttttaaatcactcacaagattccacaataacaatcctaaaccaatctcttatttagtgtgacttgcaatactatgattcaaaaatcgatttaaagaaaaatacatcaactaaacaaaaacataggaaaacaaattaaatcttataagttttaagtttttattggatcggttggatcttatataagcttgtatacatataaaattgaactaaaacatatatttaaattgtgttcaaagggttgttttgttttttctttttcttcgaatcattccaactgaacagaattaaggccaaacctgatggttaagcggtactaaattaatagtgaaatattactatcttttatgataaacatttaattatggcttaataactaaattttggtttacttgttgtaaacagtagccgattgtttatttgttttgtgtatatacatactatatacacatataggtttatcatggcttaacgagtaagaaaatgtctcgaaatagaagaggcgaaatcaaatgtgtctaaagaacaactaaagcgtgcaaaaagtaagaaccttttaatgtgttttaaaaaaaaacgaaaaagaaactaatcatggtttcattcatctttatttacttttaatttttaaaactttctgatttagcatttggctcttttgatttacgttcatacaagaaacattgtatattactaatactatacgttggttaacagcgtatttaattatttgaactcgtgtaaatttttgtatatattatagttttgttggattattctgatgtagacttgtaacaaattaaagtgcaaaccaaagtactagaaaactgagtttcctactcaaaggaacttttcatttctccatcaccttcaacgttatattttttttttctcaatgaacgtccatagagtttagtagtttacacatttcatcggacaaacaaatcattataaattttatttgtaaacggtattattttataaaagaaaaaaataatgaatagacttcggatatttgttcaaaattataatcgttttatattatttactttcacttaaagtgtatattcagtttataaatttaattttattacatttatgcatggttcaagtatcctgaaaggctaaaacaacaaatatcttcttatctattgtctttttcatttgtttttatttctgtgaacctcgctttcatcacttactgacatacaaaaatgtgggctatccatatgtcgtctgggtcattgacacgtgtccttatcggaataaccccaattaggacaaaatgttgaaagttaaaacttacatgcttttatcgttcgtctcctttctcatttagggaatctctaaagacatacgttaaccatttctttaaaattttcccgattcataagccaaccaaattcaattaatttggtaaagattctcatcacagacgcaatgtttttgttatattagttatatatacatgtatcttaataataataaataaataaaagtaacggttatttgttgataagtatttgcctatttgggataagatgattatttttttctctaatggataaataaaagtattttatttttctaggtgtaatagataaaattagccattcatgtataactaactaacacgtcatcttgcgtttaaatatttaagtcatgtaatcttcatgtctttttaacatttttcttctaaaccatttaaacagctaattatcataaaaatcagctacttaactagctagtaagtagtaactacgctctgctatttaactacattccgctagttttaatcctcagaatatagaagaatcttaaattttgagaagataaatgcttaaagaaacattaaacgatcgattttctgttaacaaattggtcaaaatagtgtgtacgtggttgtggcttgtggctggcttgtggctgaaccagtaaaaacatttcgaataaaacacatttcatcacaaaaattaatattttggcggctattgcttaccaaagtctgattggtcgaaagaaagtttggaaactgaagatcagaagacgtgtatgaatgtgagaggtggcctacctgcgaattggtagaatgttgacacgtgattagactccatgtgcttaccttatcacccgaaaagaagctctttcatagtttcattggcgtgaagcgatgaaagaaagtaaaaaatatcgattgatgtatgtacttttttgtgtattaaggtgtacgtacactgattttcgtggttttaagcatttttttttcttcgttttaaagcttaactttaactcatttgaatatataaattggttatgtaaaccaggaatcaaacgttagattatccatgattaaccgaatactctaattatacaaatagagtgtatcattgtaacggaatctttaagaggaataacagaataatttcatcttcttcgtttttttttcaaattctcgttcactaatatggtatcatagagttaagttttaaaatctcaaccgatttgacctaaatttcatggatctttgagattcttcttctgtagatctcactgaagtctcgttcactaacaattagccattttttccacaatatatatattttctatattaaaattatatattttattttaatatatctatatatatatatatatatatatatataacattaagtcatatatatatctaaattattcagaatgtaaaacaggaaaaacaattattcaaaatgggtaaagatataatctgggtatgtcaacatttgtaaaaacgttttctaagaaaacaaaacaaaatagttgttcaaaatgggtagagtagtttgaattttaaggtatatgtattaaacccaaattttgaaggttactttgttctttgaatataacttaccacggttttacatggattctatatgcagaatattgttatttatttatgaaatgttatttttacagtatgtacatatgcatacgtatgttcaaaatatatgttgatcattgctaaaaagaaaaacgattacctcgtatttattattttaaactctgaataacctaaaatgtgtttccattttggctatacaacaaaataaacgttaacattaacgtagaccatatatgtttcgagtttaaaaaccgattaaagaaaacatttgaaagagtgagtaaaattattagtatacgagagatgagagtaaaagtaaactaccttttgaaagacaagtcagttatgttttctcttttaggttgttgcttagacttatccatatgatggtgataacgacatcctctaatcctctcatcacacgtaaattaagctttatcgcattacatatttataaatgataattacatgtatttcctttagtttttcaaaggcgacctatatattgattattgctttggttttaaagactacgtacgtgttaatatccataccttaagaagcattttaaaaatggaatatgtttcataagactttttttgttttgataagaatttacatgaactaattaacttgtttatgcttcttaagataatcaagggtttgtatgtcaaaacacacactatttaggagctctagtaattaagtgagttttggttccaaattgccaacaaagtgtaagatctacaacaaagatcgaataaattaaactacggcggtttagttgaaaagttattgaactataggctgcatattttagaaaattcctacgtaaacaatatatccgcattataaattttcaattctagttaagatttctattttatatataaaaacataaaatgatccatttatcaattgttaccaaattataaaaacataaaatgattttatagtccaaataatattgggaggttgtttattcttttttttttttttggtctcttacttattgtcacatgaatttgacaaagaaaatgatattgtcaagttaaagtcatgtattttcaatatgaaacaatattaactattaagatattaacgaaagtgatgtacatatgtcatttgagatctactactagtcttgatttgctaagtggcaataatgttatttgaaagaatcataagcccaaatccggaaaaaagaaatatgtattagaaaaaaaaaaactctaatcaaaccatcccttgacacctactcctcctttataaatgataagtcctctgcttctcctaacacatcttctcttattgcagaaaaggtgagacaaaaaacatcaccaatcttttgaatctaagagagagaagaagaagaaggtctagagaacgaaaagaagaaacatgaataaccagaatgtagatgatcataatcttctactcatttctcaattgtaccctaatgtctatactccattagtaccacaacaaggtttgcacatcctaaagttccatttttttgttttcatatattaaaaaagacatccaaaattggttatagaaatatcttcaagtgggtcttctttatttttgttctggataatatgtttgtcttctgtagtcttttcattttcatatacgtacatgatactagagaagacttaaaagagctaaacatttaaagaatttatgttttgttgtaccattggttttgatgggtttctttgaccaggaggagaagcaaaaccaacacggcggaggaaaaggaagagcaagagtgttgtggtggcagaggagggtgaaaacgaaggcaatgggtggtttagaaagagaaaattgagtgatgagcaagtaagaatgttggagattagctttgaagacgatcataagcttgaatccgagaggaaagatcggcttgcttctgagttagggcttgatcctcgtcaagtcgccgtctggttccaaaaccgccgtgcacggtggaagaacaaacgagtcgaggatgaatacactaaactcaagaatgcatacgaaaccaccgtcgttgagaaatgtcgtcttgattctgaggtacgttctcacattttctaaaagataagtaaattatttggtattttggttaataatctttaaatataatatagttatagcttttatttaagttgatcaaagataaaagttacccgtttttctcttttaatcaagagttcctatttgtgaacataaaatattatagtgttttaccaaaaaatgttgttatttttttctataaggtataaagatattttctaaattatattgtttttacaagatgatggacaccaagtgaaaccatcacgtagtataattaagcaaatgagaaagaaaaatcaaaatgctgattgaattttaaagtttttttttttgttaccttctatagctaaaatagtaatatatgtaaactaataattgtagtgtaattatcttggttctataaaagaaaatcatacagcaaagtgaacagcaaaaaaacaaaagtgtcattatatgtaattatctttccgtacaaacaccctttgttttctagtggttactcgcttgtctaagtcattgactcattgggtctctcttatcaccagccccacaaaataaaactcatcaaatcaaactctaataataacatgattagctgttaatgggaaatgattatctctaaatcaaatcaaattataatttcaggttattcacctaaaggaacaactttacgaggctgaaagagagatccaacggcttgcaaaaagagttgaaggaactttaagtaacagtcctatctcatcctctgtgaccattgaagccaatcatacgacaccgttttttggagattacgacatcggatttgacggtgaggctgacgagaacttgctctactcgccagattacattgatggattagactggatgagccaatttatgtaaaaaactataagctaatctattttcagtcgtagtatagtatataaatatataggggttaattgtgacaattacattaatttatgattggtcgatatctacaatgaagcaggatgtagataaaattatgggcctattcgctagtgtaatattgtggatatctttctcgtagcatcgattatttaggtcgatggaggtcaagtttggacccaagaaaaaaagaatgtatatatctgtcaattataagtaaattgtatatttctattgatctagttatagaaatattaagcataaatattatcattcatgtgaatgtcaaagcatccaaattgtattcagtactacattcacatcgttaaacatatcttctaaaattaatacccggataaccaacaatctaactaacaagatacactttaaaaattggatatgttgaaaacaaaaatgctacaatcaatcaacaaaaccgtataaccagtttgagaatgtattacgaatttttctttttttataaagaagaattattttgttattcctatttatcatgtaaaaatataagttatttaaagaaattgagcttagtattaagaattgcgtatgtcaatattttgatattttttaagtcgcatattttacattatggggaagaatgttcttttatttgcagtgaacgtctccattagcaactttacgcatcatcaatacgtgatagtatgatacgtataagaatttgtacggtttagaatacggactattggtcattggaatctatagcctgatagaaactaaagcatgtcttcttgtcaggttgctaagtacgtgtttcaacatggacggtggacatatgttttttatttctttaaagaacgttatatgagctatataaactatgtggtgccttttaaggactttttatcatgcatatttaattgcatggtggaaaataaatggctaatggtatacaaacacaaacaaaacgacgataaaactttaaatgttgaaggataagatattgcctaaaatttaaaaagaaattcggataaaatgtagctcaatcgggtaacaaattaaatgggttcatctcatgtgacaacaaaattggagaggttatgactataggacagtccaatattgactctagataatgcctagatatacatgctttaccattatcgatttattatttaaatcacagattccgattgttagaaaaacaaaaaggattccgaatgtaagaaagataaaaaaaagattccgatagttaggatgcttttcaagtctaaaacaaaggtttattattataaaaatttatttttgctgattttttttttctttatagtactaatagctagaacattaaacttaagaatcaatgattttgcggggggctagtgagcctctcttctcaccaaatcctcattacatagtattagttgccgtttcttatggttaaaccactgattttttttagttcttaaaccaccagctataattaaaactaaactaattgtataacaattttaaaacaccatgcatctaaaagggctaatttgaaaatagaaaaactctttcagttttattgagcttaaatgagttcttgcaataaataaggtaaatttgtgtggatatttgcagaaacacaacaaacgttttccttgccgaaagttatagtgaacaacacagattgacaaaaatacttttaaactagtgatcaactgctataaaggtattctataaacatagtaatatgttgaatgttgaaaaaaaaaaatcgtagacaatatgggggattatttaagtggccatgactaaattattaattaggtaaatgataaagtggcaaaactgtaattaaggagtttcagatttttgtttttcacattttgggaaagtcattcggatttcgcatattaatgctattttatttaatagcaagttgttggataatattgcatgataattttctatagaagttttctatataacatactgatttttctaaattcgttacatgaacaaaatagcatgtcattttagttaagaacatgttattttctcaaaattagtgtgttatatactaaattggatagagtgtacttttcaaactaaaaagaaaaacattttaacttatatatctgatattaacagaagttcatggttatctagaatggttgtatgaatactctagaaaatattaattttattatttacttacaattttcatttgtggatatgcaacctaataaaaacggaacaccaaacatctataaattttttaattggttttggctaaaattaatgagaaggggatatgttgaggccatcaagtttatttgacagagaaaatgatttttaagagtttaatgtgtgtttagggaatggtattgggtgttaaaaccttgcagcggtggccggtggcaaagaagcaataactccaatctctttttaatttcaatatctaggaagctcacatgaaatatcagtttcacttcccaaccatcatttttcatggctcactttagttatttatcagaagaaatcggcctaactttatatccctagatagtaaatacactatagtttgtaagttaaaaacaaaactttcgatatactttgactgacccccacacctaatgtgctctcgttaagttcagattctgtcaaaccatgaactaactaagaaacattggtaacaacttactggaaacaaaaagcggaatcgataaaagataaaaaagagtgtgattggtgtaattttaagaaacatagattggatttgtacactttttatagttcaagcagattcaatcttagcattttagtatagaataatatgtgtcgagatatcatggttcatggattgatgctgttaaaaaggttggtcatatttttcttatgtataagagatagaaagtaatgtttaaccaaaagaacttgatttttagtagtgtttttacatttttttgggtttcttaatcattcgcaaacttagttgcacaagctgtggaatacaatttatgaattttatatggaaaaagaggaaaacttaatatatgtgaaaaaagaaagaaagagaaaaacgatcctatttgttgcgattatgtattatttaggcccatttatatcttagccaacggcccattgaaaaactgtctcatatattatttaataagagtatagagagccacattattttgggtcaaaattgagtaaatgactttgatgacctgataatattagaagctatttttccaaataacgactatgtattagagaaataacatagtgtataccgaataacgatcgaatttttatgcttaagtcatgctctacttgacttaaatcgaatttttatgcttaagtcatgattagtgttaattttaaagaaacatgattatctacatatacatttttgcagccattttgtgaaataaatcctggagttgtaacttatttacaatggctgccactagcttttaattattgattttcttttggcaataaattgattaacaaacaaaaaatatttcaaatatattctaatcccatatatcacgcaaatttctccaaaatttgaactagatttcggaaactatttaaaacaaaaaatatttgacaaaccaaaatacaattgcaatcccttaaaatgagcaaaacgcacctaaatacatttcttatcagttcactaaatcttatttctccaatatttgaattagatttcgacaactatttaaaacaaaaatttgtttgacaaactaaaatataattgcaatcccgtaaaatatttttttaaattagcggtgtactgcagatttttttaacgggacgggtttggtagaacgggtttggaaggatgttacttgtaaactataaaatataaatattttataaataaatataatttacagacttttatatatactaattttaaaaaaacaattatttctgcggtgtaccgcgggttataatctacttattattattctgttacattgaaagaacttaacaataaaaaaaattgttagagattgagcaaacattttggctagtaattattttcttctctttatttatagaagcaaaataaggaatgttctaaatccattaacaagcctcatgcaactactgaactacactttgttcacacgaggcctcggaagttcttgcttcggtatgtgggaaatggttcacaagtttaacataatgggctgggccctatattactttgaaatttgtctaatgattaccacacatcattagagatattgtcactaggatcaatagaaaatgcaaagcacaaacgattacgactatatccacttatttgacgatacgttagatgctttagttgatcatttaaacaaaaaaaaagaaagagatgcaatgtttttgttcccttcaaagattttaagattttttagttaccaatcaatcaaatacaattatctacttcgacgtaagttataatatttttcaacgattgacggcatttcacgaacattagattagtatcaagaaataattcaccacgtgtcaaagtaataatacacgtgttcacttatcacgacacgtgtctattcacggacccacctctcatcgttccattgatgttaataaaagagctaaagattctctcatttgagtaatgcaacaaacaatgtcgagatttaggatactaccactgtccattttcctctgttttgttagcttgttcttctgcacagagtcttttacgcaccaaaatggcgtcgttccgagctttgacccgtcgtattcgtctccacttctggtcaagaaggatcaacgcacgtcagtcgtcgcgacggagtttggaaatatatcagccgttcagatcggtgatggataccatattcagttcataacattggagccaaacgcacttttgcttccacttcttctccattccgacatggttttctttgttcacactggtacgtcaaaacactcatctacttttgtgttttctaaaaaattattgatcggaccaaagaatcttaagccgtaagtgaaccgaaattatttgacactgataggtcaaattattttggtgaacaaagtaaattgaagtttatcaaaacatgatattagaactttggtttatactttggttttctcgtctaaaacattgaattaagcttaatattttttttttcttttcattggagccttcggtttttataagagcatggttagggtttattacaaaaagtagtattgtgattgcaattgggattgtgtatagggactgggattctgaattggatcgatgaggagagcgagaggaagttagaattaagacggggagatgttttcaggctacgttccggtacagtcttctatgtacatagcaacgagaaacttagggtttacgcaatctttaatgtggggaagtgtttaaacgatccatgtcttggagcctactcgagtgttagagaccttttattgggtttcgacgatagaactctccggtcagcttttgcggtacgttctgtttctttaagattcataaatgtacatgattctatttctagttgttgtttcactaattacattgtgttgtttttacgatatggaaggttcctgaggatattttgaggaagataagagacgcaacaaaacctccgttgattgtaaatgctctaccgagaaacagaacacaaggcttggaggaggataagtggcaatcacggcttgttaggctctttgtcagtgttgaagacgtgactgatcacctggctatgaaaccaatcgttgatactaataaaaagaaatcaagaacgttcaatgtttttgaggaagacccggactttgagaacaacaacgggcggagcatagtggtagacgagaaggatttggatgctttaaagggttcaagatttggggtttttatggttaatctaactaaggttaaggcacttgaaactaacaaaatatatatccttggttcttgatctcttgtcttgtcttcatgtgtcttaaaaaatggtgtatcccattttgtagggatcgatgataggaccacattggaaccctagtgcttgcgagatatcgattgtgttagaaggggaaggcatggttcgggtggttaaccaacagtcgttgtcttcttgcaaaaacgataggaagagcgagagcttcatggttgaggaaggagatgtttttgttgtgccgaagtttcatccgatggctcaaatgtctttcgaaaacagttcatttgtatttatggggtttagcacatcggcgaagacaaaccaccctcagttcttagtagggcaaagctcagttttaaaagtattggaccgggacgtagttgctgtgtctttcaacttgagtaatgagactatcaagggactcttgaaagctcagaaagaaagtgtgatatttgagtgtgcgtcatgtgcggagggggagctttcaaagcttatgagggagattgaagagaggaagagacgtgaggaggaagaaattgagcgaagacggaaagaagaggaggaagcaaggaaaagagaagaagctaagagacgagaggaagaggaagctaagagacgtgaagaggaagaaactgagcgtaaaaagagagaagaagaggaagcaagaaagagagaagaagaaaggaaaagagaggaggaagaagctaagagacgagaggaggaacgaaagaaacgtgaggaggaagccgaacaggcaagaaagagagaagaagaaagggagaaggaagaggaaatggcgaagaaacgagaagaagagaggcagaggaaagaaagagaggaagtggagaggaagagacgtgaggaacaagagaggaagagacgtgaagaagaagcaaggaagagagaagaagagagaaagagagaagaagagatggcaaagagacgagagcaagagaggcagaggaaagaaagagaggaagtggagaggaagatacgcgaggaacaagaaagaaagagagaagaagagatggcaaagagacgagagcaagagaggcagaagaaagaaagagaggaaatggaaaggaagaaacgcgaggaagaagctaggaagagagaagaagagatggcgaagatacgggaggaagagaggcagaggaaagagagagaagatgtggagaggaagagacgtgaagaggaagctatgaggagagaagaggagagaaagagagaagaagaagcggctaaaagagcagaggaggaacgaaggaaaaaagaggaagaagaagagaagcggagatggccgccgcagccaaaaccacccgaggaaatatagcggtcgagtcttaaaagcacataactttctcgttttaatattttcgtgagtgttcgttttgttctttagcttttgtaaattgagcatctagctatgtaaagtttgatgtttttgacatatggtcaaatatgagattgtgacatagcataatggatgaggtagctgaggtgtgttgagagatcaagtgaaggcgagaagtaagacgaaagagcaaaaagagaatcaagataattaagttgaatagtgaagtagctgcaaccgaaagtcggattacagtgaaactcagcaaatataataatttttttttttttatgtactatcaagtaggagacaaaatttatagattgagtttgaaaataatcattttactattcagaatagttatttttactgttttatttgtacacttaaattagtacaacacttttaatgtccagatatatgtaatctaacactaaaaatgttatacagatctaagtgtatcaatcaaacagcgaaaagtaactattttacaaattgtgaatagtaaaataactatttttttaattatatttaaaaaaataactatttttctatagttcaatgttttaaagatgtatatttgctttttatagactgtcagataaatttggtgcttgaataaaggacaagagaaagataatttggtgctagaagtcggcatcatagctgcaaaagaggagttcttgttagctgtggtgttagtagattagggttcgtgtttccggtcaccgtcaagatgcagatctcttttctggtgactctgttttttgggcttcgtgttttgtaaccgtgttttcaattagcctaatacccagtttggaaagattaatatttaaaacaaaaattattgctaaaaaaggaaaaaaaaaacatcatgggaaggctaagagattttcagaaatgttactttcagagtttgcatggttcactgaaagactttctttgttgtaaatcatatctatttattttacacacttatatgtgatactttgagaatatatgatacgacaaataataataataaaaaaaatcagcttcgatatataaaaactgcaaaataaattgtgatcatttagttcatcaatataaccttcgacgttaatctatattaacatttttatagtacattttaaagattttaatagggtctatttttatttgattttgatccaaattgagttagttagatcttacctaatttctacaaaaacataaaatacttatcataaattaatgatattcaaaaatagctcaaagtataatattaatttgtgtttcactaagttttaattagttagattgaaaattttaaattgactcgaattacacaacaaattttcattttctaaaaatcaaaattaaataaaatatttaacctgcgatgtaccatattactaattggaagctggatgtttgctatttttttttcttttttgagacttaattttcagattgtcataaaaaagaaaaataacaagatacaaaaaagtgtgaaaactaacatggatatcttccggatcttctttaggatattcttcatctcgatcaatggcttcttcttcctcaaatgttgcttcagcttatagatttgcttcatattctacctccacatctcctatttcatcataaaagtcatcttcttcctcctcttcgtcaatccatttaaggaacccatgtttgagcaaacaatcaacacaccacctcttagcagggtctctctccaaacactttgtgagaaatcctttgccttatcagacaaataatcagggatattgggaaaaataccactttcaccaatgagagttttccaaccttcccaatcaagcttaccaaactcactccaaactcgttctcctgtcaacatctcaagcacggtacagccaaaagcccacacatcagcaccataatccaaaaccatgcccatcataacctctggcgacaaaagtcatgtcgtacctctcatgtgacctaatccttcaccatactcaactgaccatttctttatctcttttccaaaaccagcgatcttagcagaaaacccaccaacactaccaaatcggttattctcatacacaagtgagatattctttggtttgatgtcacaatgaatgatcttctcttcatgaatatacttgagaccaagcaatatctcattagcgaaactcctcacatcatctttcggtaattttcctccgtttctttcaatgtgtttcgctaggtttcttcctgaacagtactcttgtaacgtgttgtaatacatcttcccgagtaatggatttttctcgtccttctctatgtggtaccttgtggccgtagagagacacaacaaaaggggttttaagacgggatagaaactttccctcgttcataagacgtgacgcttgtgagatctcaatagatttaatggtcatctcgtcaggaagatagtttgcgtatttttatcttaactattagtaacataagtttttaactttaaataatttgaaaaatactttttacggttatgtctttttagaaagttgcatatggtcatttagaattgtgtcttttcttcttatcttttcatcacatagacacaattgtttgttatagacatgaacgtttaaatagaggtaaaaagacataaacatctatatatagaattaaaaagacatgaacgtttaaatagacacaattatttgtaaaagacataactatggatccctatatctaatctcttcgatttatgttctatagttgtaaaagatgttaataggataactatgtagggtttataaaaatttgacaaaactaagcatagaataagcaaagtctaagcaaaatataaacaaaaataacaaataaaaaggcagttaaaaattctattttcaaatttaagtcatttgttaactttagtcataagtattcgcgaatatatttcacaaatcattgaatcagaaaacataaaagtaaagatgaccctagaagaatacaatgtttcgtaaggtataacatatataatataaatataactattcataatattcgaaaattctatagaactttctacatgagttctctgatttggaagggagagataatgtcagtgtggaagctaagtctcaatgttactctactaaacttggggtaatttaaatgagtattacatcacaggatggttgggaaagattaagggtctcgtcccgtgtacttgagcatgtttactccgctcaaaatagttattacgccatcattagctcagtagcattgtctgaagaactatatgtagagagttaagagcatccccagcggtatatcttagccaaatcttagcaaacatcttagcattaaaagcaattataattaatcaaaccaactaagatatgtatcttaactaagatgtttttcttaaggtaagaagggcacatgtgtcgatatgtgaatgagagaaagaaaaaacaaaaccaaaacaatgttttgcaacaatttgattttttttcttcttaagaactcattgattcttaatcatttgagagcatcattattggttgtctcttagattagttcttaggataagaacatctcattttaactcttatataagagacgaaatgataacatgtctcttatataagagttaaaatgagatgtttttagtaatcaatgacaaaaaaaaatcttaagaactaatctaaaaaacaaccaataatgatgttctgagtagtaatttgttaagatcttctctaacttttcttagctccaaaacagtgaaattttaatttaaaataaggctaagattcaagattaagaaccaattggttcttaaccattgaagatgctctaatatgaataattttttttatcatcataataatatatttctttctaatatatgaactataataataatactctataaaataagttgacttgttttatttctttgaaatcacgattgttggtgctgcgatcattatcgttagaatctccatcgtactttggggaaagatgggagacggagaacaaatgtctcaagtggattcaatggaggatggggattctatggagtttgaagcattatatatttatttttctcattgaatttggtcttatccaagttgagttatggagtagtttaagtgagtattgtacttctaacataaagtttaggtcctaacactgtactcaagatttggagatgttaagtaatatgtataacaaacaacaatcaaattggagacggttggccagaacaacccctaatgcttgctactgttcatgtctcaagttgttcccggtgacaagaatctatgcaagtgattatcacgaagtagagggatggggactagatgatggagaaatgttaagctatgaacatgtgttgtaggcagtacaaaaaaaatgcagaaaaacaaatcaatggaggggaggtggtgttgtaattctcaccacaaagtatctgtttttctcacgacctctgtttttgttcttgttaaaacagaaaatacaataacacttttttcactttgaaagactacattgataataaacttggataccttacacaacacaaagacacacattacatatactaatttcactacttgacactattgcccacttgcacttagactaatcataactcttacttagaccatactcctatgttttaggcactctttcacaagcctcctacttgtgttggaatttctaataagataaatctaaatttttgggttcgggttcgggtcaaaattttcggattatcatgtattacagaaacattttcaaaagtaagaaaatagaaaactgccaagaattattataagaactgggtttttggctcttatataagagttgattcttagaatttaaactaattatttatttaatttttgtaaaacttaatgctaagaacttcttaagaactcaccaataatgatggtctaacaacacttgcaactattctaacgtagacttaactacctgaaacaacactttactcatttgggtctaacataacaattaggccaagtacttattaaaaaacaacaagcccaacatcccaatttcagatttaatatatctctataaagttacttacgattacctagggccattttttagacattgttgggttaagcccaaatagaaccagacccaaattagacaaaactcaaaaagaaccataataaattgggcaattcatggatccaaataatacatgatgtcatgaacacatttattcaaaactccatacttaagttttaagtgtttcacacaatgatataatttcaatatttcataaactaaatataagttcaataattcagtttaatattaaaaaccatgggctgcccgtatccatttagttatggtcagtttttggacaaatccaaaataaacccttcagttttttgggcttgtctaaaaactgatcataattaaatggatatgagcagcccatggttttaagacccaaatgacaactatacgattacctatggccaaaacacaattagcgtttatttttcagtcacgtttagaggtgtcagacgggccggcccgcacccatctagcccgccccgcagtgggctttcttttttcgggccgcggcgggttggcttgtttaggaccgcggacaaaattatcagtgtccaagctcggcccgcaaagcccagcggatatacgggtcggcccgcgggcatttttctgctacgcatcaaggattcttgagctgtgacattgtctgtacaaggcaatatctcgtccagagtcgtattgcttgatggtctctcaacccattcgctcattgccacacatgtgtctgcagtacaaatcgaagaaactgcaggaaaagaaatgataacaagatcactaaggtcaatacattagttgatagttgagtaacatgtagtcaccacaagcatgacgattgaaactacgataagcgccactctcctgcgagtacagaaatgactattatacatttgtttattaaaatccaaagattctacaatcaatctaaagatagttttgaataagaatgtatgggttacgcaaattacatgggttacgcaaattacatgggttacatgattcatcatcatcatcttcgtcttcatcactaatctcaaaaacttttttcggtttttaaggtgctttagcttcagacttttttcttctctctgttttagaggcagaagcttcatcacccttgcttcttctttgggtttttgatgcttctggttcacacacttttttcctctgcgtcataggtgttcctgtttcatctctcagttttcttttcagctttttagatcctcctgcttaatcattagcttgttgttgttcatatctaacttgttccaactcaatgactctccgagattccacgtctaatgatctcaaatactcagcatcaacagaatccaacggatcctatcattaacaaaatacaaaaactagtcaagactagcaaatcaatcaaacaaaagtaaaacatctaattgtttatgtgtagtcacaaataacataccattacaagtgttagatgctctgttttgatctgaaatctgaatctaagaagcttcaatgatcgtaaaaaagaaacttgaagagatagagaatgacttttcagtttccttgttaagcaattgagcgtgaactactacttttagggtttgaactgcacaagaaactctaatagagagaaaaagtttgaaagcctctatgagaaatgaagggttttaaaagagttggtttttctttcgtgggctacccgcatacccgcagtccgcaacgggcttgtccgcaacgggcttgtccgctataatccgcagtccgtaatgggcctgcccgcgagacccgctaatttgtggacaaaaaaatcaacgtccaagcccgttccgccatgggctacttggacaaagcccgcgggctagcggccccgcttgacaactctagtcacgttagtaaggtgttaatgtggaatcattttgcaaaacctatttcttctactaaactcttaaaccctaaagagtaaagacatttgcactaccccgcgtggtcgacgattcgacgcttccaatgacgtcatctcgcctctatctccgtttcctccgccgcttctccaccgccaccggtatagattctcaaaccactgcttaccccggcgcaatcactatgtccaaagctaaatccaaactccgcaaagtacaagatccagacaaagccttagcgatttacaaatccgtctccaacaattccacatctccactctcctctcgttacgcaatggagcttacagtccaacgtctcgctaaatctcaacgcttctccgacatagaagctctaattgagtctcacaaaaacaacccaaagatcaaaacagagacttttctctctacacttatcagatcttatggacgagcttcaatgtttgatcatgctatgaagatgttcgaggagatggataagcttggcacacccagaaccgttgtttccttcaatgccttactcgctgcttgtcttcattctgatttgtttgaaagagtcccccaactgttcgacgaatttcctcagaggtataataatatcactcctgataaaatctcttacggtatgttgattaagtcgtattgtgactctggtaagcctgaaaaagctatggagattatgagagatatggaggttaaaggtgtggaagttactatcattgctttcactaccattttaggatctttgtataagaatggtttagtcgatgaagcggagagcttgtggattgagatggtgaacaaaggttgtgacttggataacacagtttataatgttagacttatgaatgctgcgaaggaaagtcccgagagagttaaggaattgatggaagaaatgagtagtgtaggattgaaacctgatactgttagctataactatcttatgactgcgtactgcgtgaaaggaatgatgagtgaagccaagaaagtgtatgaagggcttgagcaaccaaacgcagcgacgttcaggacattgatatttcatctgtgtataaacgggttgtatgatcaaggtttaacggtgtttaagaagagcgcgatagtgcacaagattccggatttcaaaacttgtaagcatttgactgaaggattggtgaagaataacagaatggaagatgcaagaggagtggccaggatcgtgaagaagaaattccctccgcgtttggtgaccgagtggaagaaactagaggagaagctgggattgtattcaaagggtaatgcagctgctgtttcatcttcttctcaaactagagaagtgttagatcaagaaagagaggatgatgtataaagctcaagaagttgcttagaagatcttatttttgtttgtgcttgcttgcttcagctaatattatggcttgtggaaactgtgatctagcgtgtagaagacaaacgattcccaatttacttgtctatgctttgagccaattactacgcttgcgttgaaagttaaccgtatttttttgttcttttcccccagatcatctgaactatagtctgaattgtgaaaatttcatatcgtttaacaatttaggtttacagttatttgtaaaaccaattcccaaaatgattagtaaaaaaaactcaaaatctctagactctaaataggctaaatatcttaatggatataaaagagcttaatgggcttataggcccattagagacggcaccactctaaataaacccctctttcttcaccgtccgttctaacttctagaaaaatcgccagaagtgacgaaattgaaaatctcagatttctcttaatcggcgacggagtaacgaaacaaggagaagaagaagaagaagaaaatgacgactcgaatcgctcctggtgttggagctaatcttctcggccaacactccgctgagaggaaccaagacgccactgtttacgtcggtggtctcgatgctcaggttttttaacttttaggtttcgtgaaatgattctggattttctcatcttcctctgtgagttggtgaaattgatttaaatttcctgtttgaatctcagctttctgaagaattgctttgggaattgttcgttcaagctggacctgttggtaagttcatatctatatctccttaagtttcttcaatagctaatggcttttgattagtggaacaatgatattgttcttggcctgtatcagttaatgtctatgtaccgaaagatagagtgacaaatcttcatcagaactatggattcattgaatatcgtagtgaggaagatgctgattatgtaagtgttgctctttttcacttactgtgagaagttaatagacttttttttgtgtacaatgttgaagagatttcgatgtttctgtgcaggcgattaaggttcttaacatgattaagctccacgggaagcctatacgtgttaacaaggtatcgaattgtttctgtaacttacattgtttagtatcgagcggatgggttttgtgagttttgatgctgagacttgtttaatctatcttctatgagtttgctaacattttgtttgctggttaaatttgtattaggcatctcaagataagaagagcctggatgttggtgctaaccttttcattggaaaccttgaccctgtaagtatcttttgtggtagactctgattttgatactctacaaaggtcatttaatctcttagctgaccaggttttgttttcttttataggatgtggatgagaagctcttgtatgatactttcagtgcatttggtgtgattgcttctaatcctaaggtagtattttttatttcattagattgtagttcatgattcttgatctctttatctgtctcctgtcaccgattcgatagtaaattaggattcatcggtattccactgtggagaataaatgttagaaacttttcatttcagataatgagagatcccgatactggaaactcacgaggttttggtttcatcagctatgactcctttgaagcatctgatgctgctattgaggtaattatctgcttctttcataactctcagttctatgaacttgcttacgaaaaggagcccaatatatttcacacatttaacttctccgattacctaatccaatggtagtatattcctctgatctttgtctgactattgcagtcaatgactggacaatatctcagtaatcgtcaaatcacagtctcttacgcatacaagaaagacaccaaaggagagcgccatggtactccagcaggttaggctctacatactctttctcttttcttaacttatggattcagtttctctccaccattggatcaataacacattactgttgtgaattacagagaggcttttggcagccacaaatccaactgcccagaaaagcagaccccatacgctattcgcaatgggccctccatccagtgctcctcaagttaatggtctaccacgtccgtttgctaacggcagcatgcaacctgtcccgattcccgctccccgtcaaccaccaccacctcctccacaagtatatcaaactcagccaccatcctggccatctcagccacaacaacacagcatggtcccaccacccatgcaattccgtccacctcagggtatgcctccgccaccacctcctcagtttctaaatcaccaacaaggtttcggtggtccgaggccgccgccaccacctcaagccatgggaatgcaccaacatggaggatggccaccgcaacacatgcagcagcaaggtggaccaccacaacaacaacaaccaccataccaacaccatcacatgtctatgcctccaccaccaccacaccaaggttgataataatcatcgcctcagtttcggaccaattcaactatatgtaaaccctttctttactggcaagtaatcccgaggattttccgttttagattcaatgaaacctaatagggagagagagaaagagaaagagagagggtgagagagagatcacaattaatattctatattgtcttgtctgcagagaatctcttatcttcggtttagagagagagagagcgtagaaattagtgccaatgtgtgtctggtttttagtgatgttatttcttgtttgtgttgcagaatctctgatgccgtgtgctttaatatttaccaaaactgtgctgtaaaatctcaataattttacttctgacctttgaggttgctttttactctaaacaagaaaaagacagaggagtaatcagtgatggaacagaggtggcttgtttttcaagttatggacccattctccaaacttcaatagtctctctgaccatttcatcttgtgaattcagcttcagtcttaaaaaccctaaaaacactgaagatagagagagacgcatctctgtatatgttttgttgtctgagaaaagtaaaggacaaatattcaattttaattaaactttttgtctcttatcgatttcaatcatttgtcacttcgtttgctgactcgaaatagtccacatcgaccgcccaagtgtcatctactaagcatttagatatcgtaaaagtgaacatctgttcctatctaagccaataagccatcttgtattggtgtaaattgtgaaacccacagttctactacatttcttgggttggttcaaactatctacgtatacatttttgtagtcactttgtgaaataaatcgtggagttggaatttatttacagtagctgccattggtattaatatttaagattttactttttaaaataaaataaattaacaaacgaatgtacaaatctatttccataattttcgcagcaaatctttccaaacaaccaaatatttaatgtgattacaattactaactcacaaatattccattccgtgatttttccacagaaaatattgttattaacgaatttatagaaaatattaattactggtataatcattatggtagcatattccaaataaaatccgattcaatatattttgctccatttagtaagtgtcaagtatattttacttaaccaccaaaagatttatgacctaatggatgacgcctatatataatctttaccattgcttctcatctcattgttaaacacactatagcaactaaaaactaaaactttccaaacgttgatttgtcttcaaatgtaagctatcaatacggtaaataaattggataggggtttaagattttggttgataagtgaaatttttctaatttcaaaacattttatatgcttaacaatcacatatgtataatttatttattttatttaacgtatttcaggtttaatgttttttaatacttttttatgtatatttttgtttatatttttccaagaaaatagtattttgtagcaatcctcttttgatttgatcttttttttttaagcgtgaattaatattgcaggaagagtaatgtgatgtgatctcatttatgaatatgtaaaacaaaaatattaatgaaaatagtttaatgaaaaaatcgagtaatggaaagatattccgaaatttgctattttcaaagaaaaaagatatttcgagattttctcatatttctgttaattacaacaaaatcccttatttatcacatttaatacgttatttaaaatgattattcaaactcaaaacatagaacgttttttaaaaaatccctcaatatttggaaccaattaaaattaatattgatttaacaagtaacaaataattgtttctttatttcataccaaaaaattattgtttctaactcaaaaagttgtgtaaaacaattacgtacacatgagaccgtcacaaaattatcaacaacagaatatgatcaagaataattcatgtgggttgattttctttttataaacaataggttatatgtattgatttatatttctttacaagtttatatgatatgacgggtttggatcgatattaatacggaatgaaataccagagtgatttcatatacgcattaattgttattgattatttaatattcctaatcacaaacatttctttatctaatataaatctccatcaattctaattactaaaaaaaggagaaatcttaggacattattaatattatacgtctatactttattaaaaggtaaatattataattctttaaagttaaataaacatttagaatatttaacagaaaaacgtttagaatatttctaatatgtgaaatctatacaaattaaataaccatctgaaaaaaaaattttaaattgatttaaattagaaatcttttaataaaagtattattaaaaaaaaatgtttaatatcacataacgagattagatggtatgacgggtttaaaatgttataatatttgaaatttatagcaattaaataaatatttcaaaagaaaacttttaaactgatttgaattatatatcttttatattaaaaaaataacaaaatactgtttaattttacttaacggggttagatggtaggacgggtttgggtcgatagttatatgagacggtataccacagataaaatttattagatatgtttcatttcactgaacggggttagatggtaggacgagtttgggtcgatagtaatacgagacggtataccaagagtgaaatccattatatattttttatttcactggaagggattagattgtaggatggatttggatcaatagtaatacgagaaaaatcaaacattgtatttatacactaaaaatatatatagatataagagttgtacatttaaaaaatacaaaacattaaatcatattttattaaacaaattaaacttttattttttttttaaaaatagtcctgcggtatatcgcgggttaaaaaaaaatcgaattttacataatacagtttatcatgcttttattagatacactatacattttaaccgtaatcctaactaaaattctaaaaaaaatacatattataaccgttaactcaaatacataatctattattcaactatacgaattttacttaatatataaattttatttagaaaaaataaatctgcggtataccgcgggtcaaaatctagttttgtatacataactttaactttagtaaccaaaaaagtgaaatttttgaaaagcaattattgcgtgtgaatatgaacatctttttttgggtttggtgttgacgattatgaatatatgcaatctatgcattagaatctaaatcgcacaaatacaatattttaattagcctacgcatttaatgattacagttttaataattgcaccgccgcataatttacatttaacatttacatcgtcactaaaagtgaaaaaaatttagtagaatttagttagacattatcataaacagaggattttaatttttaacattattattttaacactcatcgtagtctgagagtcgaacactcgagaaggaggacgatctccgaccaccaccactaccaccggagaacaaagcaacccaaatctctgaaaacgctcttacaatcgcgcggtggtggcgtttcgcgtttagcgataggaagcaactaagaagctgttcaagctcagctacttcaaacatcttcttctctactatcatctccatcattgatcctttaaaatcttcgtatggatcctccgatttcttcaccaccgccactccttccaccataaccgccgccgccatcgtacacggcattaatctctgcacaaacgaagacagtctcgccggagacggtggcggtgatgatgattcactttcttcctcgatcaccgccttcttgagaagttgtctcggacgtcttgtgacacgcggtagctcggaagaggaatattccggcgagaggtttgtagaagatggtaagagactctctctatcagtctcttcttcggcggaggaaatgctccctcgccgccgagagtttgatttctccttcttctttaaacgccggcgattatctttctccgacccaccgttgtatattttccgacgaggcgtttcgtattcttcttcagtgacttgagcaatcacgtgccacttcccttcactttcccactgaaacgtcggcgtttgcggcggagataacaccggtgagtttctcagatcaacatccaacggcgtggacgagcgtccgcagccaaacacagttaaaacgtgtagtctgaaagaagaacggcgacgttgcggcacggtggtgacgtcggcggaggagttaaccagtggagaagtacgtcggagacttgaagaaacaggattaaaaggaagagaagaaggatcttttaaacggcaagatttgaatgagaggattcttgaaatctttaatttgaaacgtttcgtcatttttttttcttttcttgttttttgtgttttgttggagaagtgaagaaagtatggagcatttaccaaatgagaactgtttgtgtctcttctgcttctatatatatgcaaacacttttatattggagtatataaaattgtataatatttctctgctttagtatgctttataccgacattacatttactaattatcttttttttgttgacagctgcaatataagttatttatacgaatccctacttttttttgcccatactaaaaccttaccttagttaaatgatcaaatgaaccgtgaatgtcattagacgggtcagaatgtgtgtgatatgtatatactttgcgttttcaaaagcaacccaaattagttaagtggacgtctaaggcttgatttgcagagatgttggcaatagcaatggtgaaggaaaagttgcacatcatcgttcttctgaagtggtggtagtcgagaaaacgtatttatatgtaggatttcatatatatacgttttctcgattacttcttcagtagaatgatgatactgtatcgatcataaacaagataccgaattgtgatataaccattttgacttgagagtttattaaatatcgatcttagttaataggaataagatagtttgtaccaaaaaaaaactaaagacataaccatgtgtgggcatatacaagtcaaacacctatgaaattgaaaggttgagaaattaaacggctaaattaaaatacaaaacaacaacattctgtctaaattgttttatattttttaccacaaaatacatttcttttttagaacttttttttttgtctttattcctaaatactttcttgctttctatatatttagatcaattttttttgttaatacatattttcaaaaatcgaaaagatattttggaaaaaaattcacaattttgattacatatcgtagtatcgcacagaatcatgtttagcctagtcttgtaataaattacatgtaattaaaataatttttgtaacgtcatcacatgtatgatgtcaatgttgatacctatttttttatactgtatatacttatgacttaaattgacaagctaatcctaagaaaattatacaaaccctaacccctaggcatcaaagattgatgtaactcgagtttgaccgatacaaaagttctacttagctcgaattagcttgcatttggatctagcaaccaacaagcataataagactagtccaaaaagaactcacagttcttgttagcttgcatttgaagctagcaaccaacaagcaaaagagtagtccaaaatcttgtaagacatttagcaaagtccagaatagtcaacttaccttaaaagaaagaatatgcgataatccattgtcttatcaggtttttgaaagtagtaactattttcctaccatcccaatcacatgtattgagaaaatgtatactcttagtcttactataatattttaacttaactactatcaaacaaatttttaaagttaccgcgcgaaaaacctaataattttaaaaaggcattttacgtgaagaacatatcacttcgacaaacacttgtcagctgaattaactaacatttgttaatattgactcgtaattatacacttcgtcaaaagtttacctaaattatttgagttttttttgtgttgggtattaattagcactgctcttttatgagattgaaagatacggtttcaaaactttcgggatttaaaaaagccaattttgcaataataaattatatattatatttaaaagaaggtgaaaagttgtatgataagacaaaaaagatccatttttgaagaatgaagaagcgaagtagggaacgaccaaaggatccaaggagacaatataatctgattcatgccccaaagtcatctttctccatctctttcccatatatttatatttttcaactttatttattttcttcctttttggaaaattacaatatgattacatttctacttgtgtcgtttaatcattaaaaatatataatgtagatgctcctttactagttaaagagtctagagttaaaatgtcaattcaatcgattccattacaaaaccagattatgtttactttttaataaaataaaataaaacataatttatttttccttcttggatagtattaaaaagcaataacagaaaactctggccttttatgttgggttttgataattaacttgggcttttcttaaaacttaaatggcccatgaactgtacaaagaatcaacaataattcctatatttaattaatcctaacttgacaataacgatttgactcaaaaataattttatatgttaagatatttacatttagtcaaatgacatttgttaaccttttgtcatatattttaatttgttgatataatggtgttcatcatgtaaaatatatttaattccaataaaatatttgtgactattattttaatttttttttaagttagtcactaattcactatagtgcagtaatttgcattgaaattttaagattatatacactagttggatatatcatatatgtagacgggagacttaatctaaacatgatatatatttttaaaaacaacgagggtgagagagagaccacataactgatataactttaaaatttagagcaaatagaaattacaatacgcatatccaaatatgatgaaatactagaaagaaaatacaatattcattaggttaaaaagaaatctcaaggaaagaaaatcctaaataatctcttctttaactatctcaaaatgttgagtaggttcatcgacactatttccaccattatatctcgtacaatttttaattatttattttttgtccgaagtctcaaaatctccttttttatccatataatacttgtagtgagatgacatatgtacatcaaaattttgagaaatatcaaatatattgttgcatttaagacatgtatatagatcgtatttctcatatggtagactatgtgtcagaccatcatattgatcatcgatacttttatcattttttcacaatttatataatcagcagttttttcattggacatggttggttttgggatttttttcaaagaccgactctcatgaaaaatattttgatcatggttttgctttggtgacaaggaaaacatgtttaaatgtagacgattttcagaattttggtgagaagaaatgaaatttagagactcagggttcaaaatatagtattgtttaccaagaaattttggaggatgaaaataggattccatatattgggtttagaatccatggcctatttgaacaataaaactatatatatctattagtaatggtttgagtgaaagaaactctagtaacacgaatattatcattaataggcaaataatcggtaccaaaaacataatcaatgtttctcctcatcatatgatagggcatatgtgaattgttaaatccaaaaaaagatgaagacatgtgaatattgataacatgaaaaagaaggagaagatgaaaacaaatccctatggtttgaacaatcaaatgtagtgaacatcgatcgaaccattttggagttgtgattcattttgatgggaaaaaatcacgatggtttatagaagtatcccggttagtatgtaacttatttgggatggaagacattttttaagatttgagtgtatcttatgtcatttgcttatgtactcttttatacaaaattcgcactagaaaagtaaagatataaacctcaaaaacggaaatgtattttaaaatacaaaaggaaagaaatcgacattatgttaactattattatattatatttaatatttataagaaaaatcttgaatcatttattattttccccaaaactcctctatttatatggtaatatatggatggaacaaaaaagttgattttcggtcatatactaatatacctggattcggtagttgaagatatagacaataatcaatgtaaatttcttatatttcttatattaacagttaatgctatccataagacatttgttgaagttttgtcatctatcttagtatttactataaattttgtcattttagcttttgaattttgtctcataatagttgtcgttttatattttcaatcagatgttggtaaaaattctagtttttttttcatagttttaatgacttgaccaataattttttttggagaatatatcaaacaaggataaagtagaaattttaattgtttttttttaattttttgtagaaatcttgaacgataaataatttaaaacaaaaagagtatgattttaatgtttcgtatttgaatataaatgtttagttattatatatatatattcctaaaatgtacccgttcgtaaattgatttttaatattttatccaccgtattaatttcctttttcatgcaacatagaaggaatttctcaaggtttttcttgttgatatagtttttgtttatcaacgctttttgttttcttcccctagataatatatgtacaaaaagtttgaaatgtagaagttgtataggttgaaagttatctaagagtgtgagaaagaacaagagaggcggataagatcgaataaatgaacttgtcttagggtttgtttaaaccaaaaatcttagaaagttaacaaagtcataactaaactttatcaatatgtcctaagtcttaacaatatatagaaccttcgcaaatggatgtttgtgtcgcggtaatagttaaagaaggatccacgacaaaaatataattatataggaataaagatgggcataaactttaagtttaacaaaggagtcattgtgtaagaatctaagctaaaataagtcataatctaaagtctggctttgatagagtaagtgagattgtatctaagacatagtggaggactctaataagaaaaatatatcatatgcactaaggtaagatctaagatctatgactacaagaaattcgcgaatccaccactgtctggccaggggttcttggtagtggctaacaaaggccacatatttgttgtcatttagccaccgtcaggctaccaaatatttatttgacattttggtggttcatcgatagttacgtggacgatacttcgccaccaaacagtctgttaatcattcatttgttaatcagccacaactagctactgaaataatggtgacatataagtttttaattgtattgttttctttcagtgaccgttagttagtggctacgataatagctaatttgaaataaaatagttaccgataagctatttatgaccgttatgtggtttccaaagtaagagaacatgttgtgggagtagagtcagggggtgacatggatattgacaatggtggtgaaacaatactttttgaaagaaccgatgaagacgaggacgagggttatggttcaattgaagacgatgaaagcgacaacgaggatggatatggctaatgctctatgaaaaatggagagagagagagagagagagagagagagagagagagagagagagagagagagagagagagagagagagagagagagagagagagagagagagagagagagagagagaattaagaactttttaatatagaaaaataactttaaaattgaaagagaaaataaaagttacaatacgaatagcaacaaatatgatgaaatactagaaaaagaaaacaatatgcattatattgaaaaaaagatattaacgaaataaaatcttatgatgttgaataggtttgtcgtcactccttccatcattatggaccccatcttcttgtttaatcttttgagactccccataaacttcaagattcaatttacgatattttcttttatttcttgcacgaaatctttgagctctttctttattcgtttcactcttgtagtgagatgacatatgtgcagcaaatttttgagaagtatcaaatatactgttgcacttaggacatgtatatggaccatatttcttatatggtaaactatgtattcgaccatcatattgagcatcgtcacttttctcgttttcttcacaatctatatattcagtagttttttcaatggacatggttggtttggggatttttgtcgaagatcggccttcatggaaaacattttgatcatggttatgctttgatgacaaggaaaacatgtttaaatattgacgatctccagaattttggtgaggaaaaatgacatttagaggctcagggtttaaaatctcgcattgtttaccaagaaaatttggaggataaaaaacaggattccaaatattgggtttagaatccatggcacgtttgacaagttcaatatcatattgaacagcatcaagtgaattggtaggaacaatagaactatacctattagtaatggtttgagtgaaagaaactctagtaagatgaggattatctttaataggcaaataatcggtactggaaacataatcaatgtttctcctcatcacttgtgaattgttaaatccaaaagaagatgaagagacatgtgaattttggtaacaagaaaaagaaggagaagatgaaaacaaatccctatggtttgaaaaatcagatgtagtgaacattgatcgaatcattttggagttgtgattcattttgaaggaaaacagaaatcaggatggtttatgtaacttatttggatggaaaactttttttttaagattgagtgtatcttatcccctttgcttatgtacccttttatacaaaattcgtattagaaaagtaatgatataaatctcaaaaacggaaatatattttaaaatacaaaaagaaagaaatctacattatggtaacaaatattatgtcatatttaatatttataagttaaaaatcttgaattatttatttcttttccacaaagctcctctatttatatggtaatatatggatggaataaaaaaagttgatcttctgtcatatatctagattaggtagttgaagatatagacaataatcaatgcaaatttcttatatatattaacatttaatgttatccatcttatgggacatttgttgatgttttatcatctatcttaattttgtttgattatatgtcatgtaatggtatttcctataaatttactcgttgattattattgttcaaaaattattcatagtttataatttaaataagtaagtgaaaaaaataataggatggatgagtcaatctaataacacattgttttccatttactagggaatatattagagggacatttaactcataaattttgcttcttcttttttcgacgacatccaacaattagatttgaattttgatgatgacatatactcattcgaaatctcattagattaggtgatgtatcatttttgttttctaaatttatcaagtttttttttattatgtcactttaaagaaattgaatggtttcaagttcttatgcttaagctaaagcatgtgagttgcttgtcatgtgggttgtataaagttatgttgcatggaaactctatctgatatattttttacgttttggaatctaatttacagtagcaaatgataaataatgaatttgtcaaggtcttttttgttgatatggtgtgagaaagaacaagataggcggataattaagtttgaaggtatgaaattgtctcatagtttgtgtaaccaaacaatcttagaaagttaacaaagacataaatttttgaatatctcctataatataattctataggaaaaaggatgggcataaactttaagtttaactagagagccgttgtctgagagtccaaagttataaggagagagctagagatacaatttaggacatggtggactatttgttttttttttttggatataatgttaaattaaattcaaaagaaaaataccattttacatcgaatgcaatgtttgttaaatagaacttttatgtactaaatcaaaagtttaacctcaatctggcatcgcaaaccaggcttttagacccttattataccgcttatctccacttgctctgatcgaacacggtggactaatataagtcataatctaaagtttagcttctgtagattaagtgagactatatttaagacatagtaagctctgatataaattaaataaatatcttatatactaataaaggaagatctacgtaatgcttaagaaaaacggagaacttaatgttttagccacatactctttttgtgtgaaaagtatgagttttctataagaacgagtgattatgtaagaaatgaattcatcaatattttactacttttcttgatatcttatatcctttattcacctaaatctataagtagttttatgtattttactttgcgctaaatcaaatctagtaggttatttgcagtaaaattcaatgttaattactaaaattcgtttaatttaattgaagggaggaactcttgaataagtcataattgcatgacctatctccgtccaaatgtaccatctcgttatcgctaagatgaggattgtgacttgtggatctatagttaccttttgttattgttcttgtactgtgtagatatggtctagttatgatatgtgaaataattttgactatgtgataatgttataagcataagactatgtgatgattgtgtggcaagacctgaaacttgttaggttgttaaaaggagataaggagaacctagagaattgcaaagttttaaagaagaaataggaggacctacaatatgcaaggtttgataaagagaatgagatgggataagtggagatgatagaggttagcatgtaccatatgaccgggaaagatatattgtaggattgcttgtcggaccaaatgcataaatatataggactactatgttgcggcccgtgaacgactgacgagcctgaggagacgggtgcacacagataaaagggaaccgaattgttgttgcttgtttgttggttgcaagagcatatatatattgttagctattctataattgtgtggtgcctgcttgtaccttgtcgttctatggatcatgtgggcaagaaatatcgtcctcattgagtaacttgttgctcatgttcccggaaaatggtggcaggagaggactaggagcggagtggaaaggcgctatatacgacgggattctaacatggttttaggatttcaacaaagacatttctttgttctaagtttatgatttcaattttcaaataaggatttttgtttatgttgttacttacgttcaagcttttaagatgcaactatggcaatgtttttaaagacctttcatgagaatttattgaataaagttctggatatttcacgtgttcttttagaccccgggttcagttgtcacaacttaagtaaatcaaaagtttgtgtagttagaggattgtgtaagtgcaacaaaaaaaaaatactttttattttttttaagggtgaattgtaagaataacctatttggaagatgaaataaagaatatagcaccataaactgtataatatagtgagtaacacatgtgtgtgttaaaaagaccacagactccttcaacttgtcaaggaagagatggtagcgcgtggagcaaccaaaaaagtgaccaaaatatattcatctcattcaattttgtttgctatgtaagtttaaaattattatttggttaaaactaataatactattaaaaaaagggatttttttttgtttatctaacatgatttgaattttaaaaatcggaaacaaattttttaaaaagtgaatagtggtaccaagttctatacatatcatcataaaaaaatagaatagtatatatttgttcaaatagaaatgtttcttctgatgaatccaaataatcaattaaatactttttgatggaagaatactaaaccctaagataatatatagggaacccaagacttttaatataaaacactaatcaaatcacttaacatccttaatcaaaacaaacaattcattttaaaatgtatatagtacaaggtatacgtaaatagtatattcacaaaatagaatagtatctgtcaaaaatcttccaaaaacaaaatcgatttattggctattttcctttagaatttctaccatcgtaaaccatttatcgcttctagatctaagaatgatccctaatttatcaacatttaagaatgatccctaatttattgtagatatgttgtgagtctgtaactatgaagaacaaaaagattaagtgataaattagtttaaaaccatatatgcattttgatgtcaaaattatgtttcaaaaaagacaaaaaagaaaaaacaaagcttataacctaaataaatctcacaaaaaggtaattaactaactgtaactagaaacaaaaataagcaaagaggtcatttggagagaatgaaaaaaagaggtagggagaaaggctgagaggagagagagaaggagagagagagaaggagagagggagagaaggagagagagaaaaaaagtagggagagaggcggagaagggagagagaaagagagagagaaggaaagaggataaagttgggattaatatataaaatataaagaatatcatttttttttttgtagtgttacttaattataatttttttgtaagtcagttttccaaatttcctttttttaatgatattcagcctgcatgggcatacaatctaaagtccgattgaaactgagttaaaataaatccggttccgttcgtttttggatagtgaatattatccgaatagatcctaaaatatatatttttgagttttggtttggttggggtagaatccgaaatctcaatgaatacccaaaaaatccaaaacttgaataaatacttgaaaaccccaaaacccaaacgacccataaaactggaaacaatctatacacatgattgtttcagttttttttgagtagtttgggttccaaatcggaatcagaaaatatttaagttccatgtctgatttcaaaataaattttgagaaccgacctaatcggaagaagaactgaatcgatctaatccaaaattcatccggttcttaaatagatcttgtacctctcaaccagaaaaaaccctctgaaatctgaattatccgatctaaaccgatctgaaaatctgaatgcccaaatctaattgtacatgtttgtcttcaatctttatttaaaatactttttgccaatacaattacagatatttttttgggtatcaaacacaaataccgttagtatcaatttttgatttacacttcctaatatgccttatttgtacactcataaatcttaccttgtgattagtatcaattttttatttacacttcctaatatgccttatttgtacactcataaatcttaccttgtgattaataatatcagcagtatcatgtcaagtcttattccactggttgttgttatggatatcttttgtgcaaccaatttgtcttccactttaccttgaaaacgctcttatacggattgaaccaaaactactatacatcaactacgaagaaattaatttttgaaatctctgaattaggtactttcaatgagaatattatcttaccaacatattactgccacataatgtgcacacatataaagatgttattcatagatatgttcttacttcttacacacaataaggaacaaaaacgagggggcttttgcgaaaatggacatattttggcccataaactaggaaaaagacatttttgagttaagcttatgaaaataagcacttgttaaattaggaaataacgatattgtcctctttttcaatcaatgttattggcattcatcgtcttcatcgttgagacttttccaacgacacaactctcacctttcactgttgtgcttgcttctccgttaacaacatctccatcaactcaatcaacgtcactttcagcagcatcaacatcgtttcttttgctggaatttacaaaaaaattttgtcatcatcaccgtgaacccaatagatctaattaaaagagtttaatgaaagaaatataaaccctaagcggatagtatataggaaacccaagggtacaatcttaaatgcggattgaacaagtttaatcaccaactcaaattctaaaacaaaatcaaaatcaaattacatgtttaatattggttagtgtaggatatataataaactgaaatttgcagatcgagacgaagatcactaatttccgttgaacaccaacaacatagttatcaaattcgatgccaaaaattgcagacctagatcgaaaaaaaaatatgataactgggtttaattgaagaagaacagctccttcgcatatctcacattcccaccatttctcttgttcactttcagcagcatcaacaacgtcactttcagcagcatcagcatcaacgtcactttctgaactcgtttctcttgttcgctgcgtcaattgcagaggcaaagcagacagcgttaaaaggcgagaaaagcagcgaatcaaatatcatatcctaaacagtcaaataattcagcttaagcatagatgttcctaaattcacaaaggcatagagttttttgtgccaatcccataattgatccccaaaacaagtccaaatattttcaagaactttatcaccatgccacacaaaaatcatagatgtgttcttggctcttacacaaacaaaataaggaaaaaaaacgagtcccaacattttcaagaactttatcaccatgccacacaaaaattcgtaccaacaattagtttggccaattttaatggcctccgttacattttgaattgcgtccatcacttcatcccacttacaatactttgtccccttaaatcattacaatatttttgtaaccaaataactaaatctttaaccggactgccaagtgccaagtgatctcaaaatcaacaaaaatttgcattttcttactttttttttttttgaacgacattgtattttcttacttaatctgaagttatagataactaataaagtgtatatcaaagtttttttcaatgtttaaaaagacgcgaacacatctaactggaagtgtgcctcttgtcttacggatgtccttctagtagaacatctataaaaatctgaaaatctttcggaaaaacaaaaaaaaaaacttacaaattgttttccatctaatcacgaacttgatcatcagttctcgtgatgttggaaacaaaaactcaaaatatcatcacttcatgtgcatttgtactaacacatgcatatcagtgattcgttgggttcttcaattttagtaaaaaagttttttttttatcaaaaccatttctaaaaaaattcaattagaaattacgataattttgacaaaataagggctactttcattatttattatttatgaattttgaaaaaatcctaatgtgttgacattgttcaaataaagaactaataaagttttagatggaaaaaaaaaagaactacgtgtttttttggtgaaacttttgaataaagtaataagacctacccatatgatgatctaacctacccaagttatcacttgtatcggaaagtccccaaacttatctttctggttgtgtcggccaaatgtatcccaactaatacacacaatttcactttgaatttctctttctcttcttccagaagatttctccttctatcgttgacctaaatgattgatctgtcttggttattttgtcacacgatgtgtatgccaatcagctttggactacaatgcatgttaaggttcgtactaaaaaaaactcagcatgaagaatgttggttcgaggacttaaattctgatctgacgtagctagtctatcgattatctgcctttaaaccaaagctttttggattaaagataggtaatccgtgcgttgaaggtatatcattttcttacccaacaaattcatttaacctcatagtataaatttcgtttggttttgatttttgatagcgacaatatatgccttttcaattaaaagtgaaaagaaaaaaacgcatgccatttacttgtttgagtaagttactcattatggtatatgctcttcaagaaaacaaatcaaatactactttttcgtcacgtatctttctttttcagctcaccaaaatataactttcaaggaatcatatcaaaactttactatttacatggattttgtgcatttgcataatttacgtatacaaatcccaaaggttagcgtttttgccaactatatatatagatactagctagatgattatccagatttacttcttcttttttaataatatatatatcgtatatccattaaatgtgtaaacctttacttctaacagatttagagatctataaaacgtatacactaagaattatttagaaaaactagaagtttgaaataagttattgtctctctaatacaccaatattgcttcttatgttcattacaattttacaaatgtatgcttaccagattacaaaagcatgttgaaaattcgaagttatgataccaatttattagtagcgaatgtaaaaaagactaaacataaattggacgtagtccaccaagatatataatgttataattagcggggtaaaatattgatttaatactggaggcgtaataacatcttgtttcagaattccaacaacgtacgagtaagaaaaacaaaaatacagttctcaacagactaattggacgtaaaactctaggccagccaaactgacaaagcatatgacaaaaatataaatgatagaattggcaatttcagaattttccatcgatcatgctaaaatgaacattagttggaacccaaaaacatttttgtttatcttgcacatacaaacagagctataggttacgttatgacttatgatgttctgatttattgatcaaatcacacatcagttttttcccaacagatatcaatttcattatgtaatgatacatatagtctgatagtattattcgtctgttgagaacaacggctttttgttggatacaagtttttttgtttcgtcaaaacaagtttaattttggacttcatcacttcaataagaaaaagaaaccaactgaaaataaatgcaccgtataaatttagttcaccaaattatataaatgtggaaaagaatctttaaaggttacgccactattgaacatagatcaggaaaatgccgaaagtgaagaagatggcgacttttaacttacaatattagcaatatttttggtcatatcgtattaaaattgatgacctaccatttaaaaatggtggatataacttcttctagcatatgttactataatgaatgatcaattctgaattctcatacatatgacttcacaacggaaactttttgctttagagtttcataaatagtttacgacatacaatttttcatgcattccactcacgagaacaactttatacgtaacatgcaattgcaaaactacaataatcgggtttacatgtaacatagcatctaataaaaatcttcacttcctttattaaaaaataataaaaattgaaaacaagaagaccaagttcaagttcaacgaaggtcgtcacaaattatttgaagaccgtgtgcgaaaccattttttaaactcattgtaaccttttaattattattttaacttacgtatgtattggttaaaacttaaaacacttgcctgattacactactttttttttttgttggaaatcttttcaatttattttgctcgatatacttctcaggttgtatacgtctaaatcttgaggaaaattcatatcttgcagaaatataattctcgtaccagaatacgtgggcacccacaaacactgtggaacaacagtagaagtttttgatcgtcattgttccactatggatgcaagtggtggacatatatagttatgtgtatatatatactagtaaatgcacacaatcgatataacaagttattctaaaatttaacccaaaaaaaaaaaaagagaagaaaaagactcaacatggttcatgctgatggtcataattttcccggttcggatccaaaccctcatatgaacaagttcgctttcgggtgtgccattgttgcttccatcatttctatcatctttggatatggtaacatactaacattctctacatatcaaacaaaagttttctacatatatcatataaagatatattcaatggaattatattaatgattttatattaacgaatatttttttttttgtaatggtgtgttgtccttagatacgggagttatgagcggagctcagatatttataagagatgatctaaaaataaacgacactcagattgaagttttggccggaatcttgaatctttgtgcactcgtcggatcactaacggcggggaaaacgtctgacgtcatcggccgacgttacaccatagctctctccgccgtgatattcttagtgggctcagttcttatgggttacggcccaaactatcctgttttgatggtcggacgatgtattgccggagttggtgtagggtttgctctcatgatagctccggtttactctgccgagatatcctctgcgtcacatagaggctttctcacttctctacctgagctttgtattagtcttgggattttactaggctatgtctcgaattactgttttgggaaactgacgttgaaacttggatggagattgatgcttggaatcgcagcgttcccgtctttgatattggcttttgggattacaagaatgcccgagtcgccgaggtggcttgtgatgcaaggtaggttagaagaagccaagaaaataatggttttggtatccaatacggaagaagaagctgaagaacggttcagagacatcttaaccgctgcggaagtagatgtgacagagataaaagaagttggtggcggcgttaagaagaagaatcacggtaaaagtgtttggagggagttggtgataaaaccgcgacctgcggtgcgtttgatcttgatagcggccgttgggatacactttttcgagcatgcgacggggattgaggccgtcgtgttgtacagcccgagaattttcaagaaagccggagttgtttcgaaagacaagctcttactagccacggtcggtgtaggtttaactaaggcctttttcataataatagccactttcttgctcgacaaggtaggtcgtagaaagctcctgttgaccagtacgggtgggatggtcttcgcattgaccagtttagcggttagtctcacgatggttcagcgatttgggcggttagcgtgggcattgagtttaagcatcgtctctacgtatgcatttgtagcttttttctccatagggcttggacctatcacatgggtgtacagctccgagatattcccgttgagacttagggctcagggagcgagtataggtgttgcggttaataggatcatgaacgcgacggtctcaatgagttttctgtcgatgacgaaggcgatcacgacagggggcgtgttcttcgtattcgccggaatagcggtggcggcatggtggttcttcttctttatgttgccggagacgaaaggattgccattggaggagatggagaagctttttggtggtgggggtcctcgtggtgatcgtgacggacttgagattcaaactaaaaccatctctattgggggtttctcataagagtttctcacaattaaaaaaataaaaataataaaaatgaaggagagagagtgtagaaagattctcagaaactttgagatactctctacaacccatcatgacaattcgcttctcactattggttcaactttttaacaaaaatatttttttaatcaaaaattcaaattataatataatattaatttttttttgtttgagaaactttgtgggtttctcatggatggagatgcccttagagagtcaataattaggttagattatcatggctatgtagaataatttttaaatccaacatgatttggcatatctattataaggtgtgattttttgtaaaggacaaagtatgatttttatattcatccctttttactgtagctaatgagaatctacaacctaataaaaaacaataacaattatttaattataaaatctaatagttcaccaaaacaaaatcatatatcggtttggatttataagagagggttaaagtttaaattttatgattaaacgaagttaaataccagtttaggtttataaacgattttagattttagaatcaaacgaggttaaatgtcggtttagagttataaacgggtttggattttacaattagatgaggttaaatgtcggtttgagttttagaaagaacgatttaagtttagattttacaattaatcgagtttaaatgtcggtttggatttacaaaatagaattagagtttaaattttgtaattaaacaaaattatatatcggtttgagtttatgaaatagtggttaagattatagattttataattaaatgagtttatttatttattaggtgacatattctaattggctgaaagaggtgaatgaaaaggtgaaccaagaattgttcgatttttaactacacatctaattctagactctagagtatgcatattaatgtttccagagatcagaaagtgcttaaacaaaacatattgatcacttcatggtttttaagtcttagtttaattgatggaaaggagaggattaccaatactgaagtagagtcatagttgatatttgaggggtgagaaccctgagattcgtaaagaaatcgatgaacttgtgcgtgaagaaattagtttgatcatgctcaaaggtctaaataataaaaaaccttgacatttgttcccaattgaagtcctttaattgtgagaaaaattatgttgctctagagcaatattgaagaaaaaggagacatatcacatatgggaagacctgaggagcaatgatttgatttgacggaccaaaataaaccagagattttcctgacaaattaaggtaataatgcatgaggttacgtggaaatgaatcaacaatcgttagctcctaatatcacggagccaaaaagagaaaaattagaccggagattattacaattagtaactaacacaaaactgttattaagacagaaagagagagaagaggcatgtttctcggaatgaagacagagcaaatctcaatcttcctttttcaccttattcctattatcattttctgatcaaatgttcaaaaactctctccccttaatctcttcctctaaggtacacactttcatgctaatctcttaactaattttgtattaatctcttatatttagcattacctgttttgttaacgatctaacgaacataataagacaagaacttgttccaacgttaacaccattttgattatgatctgttttttctacgtgttgttgttgttgttctcagaataattgagtggttaagggagagaggagacggagagtttttattttcgttaccggaaaattttgatctccgatggcttcttctcctgaatctgctcctccaacaaactccacctcttctccatctccaccgtctaataccaattcaaccacctcttctccgccggctccgtctcctccttctcctacacctcctcaaggagactcatcatcatcgccacctcctgattccacatctccaccagctccacaagctcctaaccctcctaattcctctaataactctccttcccctccgtcacagggcggtggaggagaaagaggaaatggaggaaacaatggtggcaatgatactccaccgtcacgcggctctcctccttctcctccttctaggagtaatggagataatggtggtagcagatcatcgccaccaggagacactggaggctctcgctcagacaaccctccttctagcggaggaagcagtggaggaggtggaggtggaagaagtaatacgaatacagcgatcatagttggtgtattagtcggagctggacttttgatgatcgttcttattattgtgtgtcttagacgcaaaaagaagagaaaagactccttctaccctgaacccatgaaaggtaaaaacatatacacactcttatgtttcaacaaataagaagcttagattctttcataaaatttcaggaaaccaatatcaatactatggaaacaacaacaacaacaatgcttcacagaattatccgaattggcacctaaattcacaaggccaaaaccaacaatctactggtggttggggaggcggtggaccatcaccgcctcctcctccgcggatgcctacaagcggagaagattcttccatgtactcaggcccatcacgcccagttttacctcctccttcgcctgctctagccctcggattcaacaagagcacttttacttaccaagagcttgcggctgcaacaggagggtttacggatgctaaccttttgggacagggaggatttgggtatgtccataaaggagtcttgcctagcgggaaagaagtagcagttaagagtttaaaagcgggtagcggacaaggagagagggagtttcaagctgaggtcgatatcattagccgtgtgcatcatcggtatcttgtttctttggttggatattgcatagctgatggacagaggatgttggtttatgagtttgttcctaacaaaactttggaatatcatcttcatggttagaccacttaaaaactttgagtactaagtttattttctctaatctatatattcaagaaagttgtaaccttaatttgttgttgtagggaaaaatcttccggtaatggagttctccactaggttgcgtatcgccttaggtgctgcgaaaggactcgcttaccttcacgaagactgtaagttttaacattcaccattctcattttcttaaccaagttgcataaaacagagaaagctctgtctctgactagtgttatctttttggctgagaaaatggtgcaggccatcctcggatcattcaccgcgacatcaagtctgcaaatattctcttggacttcaactttgatgctatggtgataaactagtagcttgcattcatctacggttttttgttaagactacattgatgacattttgcatttgtttattcaggtggctgattttggattagctaagttaacatctgataacaacactcatgtatctactcgtgtgatgggaactttcgggtaagcgttttaccgtatgataagattgttcgtgacactcaagaaacataacctttgtagactaatctactttgcttctttccacaaacatgtgtagatatctagctccagaatatgcttcaagcggtaaattaaccgagaaatccgatgttttctcttacggagttatgttattggaacttataactggaaaacgaccggttgataatagcatcaccatggacgacaccttagtagattgggtattcatgcatgtaacatatgtatcgtgtatatatgtttttcgcctttttcgcgtactaatgatcatgaatacaggctcggcctcttatggctcgcgcgctagaagatggaaactttaatgagctcgcagatgcgaggcttgaaggcaactacaacccgcaagaaatggctcgaatggtgacttgtgccgctgctagcattcgtcattcggggcgtaaacgtccaaagatgagccaggtgaatcaaaattataactaaaagtctatttttgtcagagaataacaaacaaatgttgtggttttcagatagtaagagcgttagaaggagaagtgtccttagatgctttaaacgaaggtgtgaagccaggacacagtaacgtttacgggtcattgggagcaagctcggattatagtcagacatcttacaatgcagacatgaagaaattcagacagatagctttgtcgagccaagaattcccagtcagtgactgtgaaggaacatctagtaatgattctagagatatgggaactaagagccctactcctccaaaatgagatcgaatcaatgattctgtaaagaagagattttggggctctgagagtagagcaatgtaagctttaagcaaaagcattgtcattgcttgattggttggttttttttttcatatatttttcgactaaattgtgttatgtttagatcgttacgtatgtgtatgattcttgagatttgattcgattctcaaacatgaaattaaaattgtttgattttgaattgtatctactacatgtctacattcataatcaaagtgacaagctttttcaactttggctttatgctgttctttacatgctctgtttttcatctgttttcgtaatctaccaaaaattaaacctaaacaaaccgaactcaaaccagattgtttaacgaatcacaattaaaccggtccggttagaaaaccctcgcgtgtgacgcctacctttcctcttctccgtcgtctctcccatttcttcctcaaatctctcttttcacgccaaatgaaagtttaaaacctttgaattgtttattgaaagtttacatttttctgttgaatccaactatgtttagattgagaagtctcttgtcgctgaagagttcttcgattgtagaattgtcatcacaaaacgtcacagaagcaattcgtttcgctccatttcattcgacaagtgttctgtctgaaaaatcgaggagtagatttggttctgtaagatcattctctataaagatttgcttccttattgaatctatgtacactgtaattagacgtattgatgctcttagattaatcttggtttcaggctagagattccgaaggcgaacgatcttcaaaggtaaattttttatgatcctatggttaatgcattgatcgtattggaatcaggaatatgaattgttacatgggtttgtacaaaattagataggattgattgttggtagaaatgctatccgcattgatgagttcatgttaaaacctgtgtttgtattgtcatgaatttgattttttttttgtgtgtgtgtggtcctttgttgatgtatatattgaaaaattgtattcataagagagttagttctcctctgaagctgaaaatgttgattccagaactcctccataagatttacatgtaccgtaaaggagaagggtcgtaccagtgctaagaagactgtggataaactccttttccacaggggaattaatgatccgcttcaggtgaattc

SEQ ID NO: 247 - DNA, 88413 bp, Arabidopsis thaliana
gatctcctataaattatttaaaatgtgggttggaatatttctctgtttttcggaaaagtacttttaaaactaccctctaatcagtaattatttttttaatgtcattagagccaatataattcatataattgaactctactttgatttatgtgttctttaagataatgtaatatgaaatgtttaaatttagaagtcttttcaatcttttttttcttactactttgaactctactctattctagaagaaaacttgggccttcaattttcaagcctcgaggactgattagtgattattttgtctttgttcagacaacaaaaataaagaaagtgaaaaagataaaaacttttttcttttctcttcttcagtttcttcttctttttgttttccttcctcgttctttcatgtcttccttgtgccattgatgagtccgtcaagaccaaatcgagagtagtgcaagacttttttctcacactgtttctaaaaccgcgtgagaaatcttcttcctcctcagatctctaccttttcccttaaattttcccgcattttctctctcttccaagcttctccaagcgtacaagctacttcttcttccataaactcaaagtaaaaccctaaaccaaaactctcttcacctctataaaaacaccacctttttttagctcctgtctctttcacagacttcaatcgcattttcattaccagccaaaaatcatcttcaatttccaggtaattaacatcaatcttgaattctctgtttcactttttttactaattctctgcaatatttttagtaagttactcttgcgctttaagttttctcttttcaatgtcggttacaaaaatttagattgctccgtaagattcggcataaagtttgttgctttaagctataaatcaattacccatttcgattttgtcccatttctcattgcaaagctcaagataggtttggtttctaatctgtcgttcttgctctttgattaggttacaagcttaagctttttcatagatagatagaaaagagaatgatgggaggaaaatctagcaagagcaaaaagaatgttgaatttggttcaccgtcaacgccagttcaaatcaagataaactcagagtacacagagcatttaagctcatacgaaagagcttgtagtgaagatccaaagcttgaatcttttgactctgcgcttcacgaaagaactaacagagtcatcaacaagcttgcttcaggagttgagatcaagtctttgtcgtttgattcacttagggaagtgacacaatgtcttttagatatgaatcaagatgtggtcaaagttatattgcaggataaagaagatatatggaacaatcaagatttgttctctcttgtgaatttgtattttgaaagtactgcaaagactatggatttctgttctgagcttgagaattgtcttaaccgcgcgaggcggagtcaagtgattattcagtttgctgttaaccagtttgaggaagagaatgaggataaggagaatagaaagtatgagaagactcttgaggagcttaagaggtttaaagtagctggtgaaccgtttacgaaagagttctttgctctttttgatttggtttacaagcaacaggttatgatgcttgaggagcttcataagttaaagagaaaactcgataagaggcttaggaatatcaaaacatggagaagggtgtcgaatatggtgtttgtgactgcgtttgtctctgtgcttatcttctcggtggttgcagccgctgtggctgcaccgcctgttgtggcggctatagctggtgcattggctgttcctgtaggttctgttgggaaatggtgcaacactttgtggacgaagtatgagaaagtggttagagggcagaaggagattattacatcgattagaatcgggacttatatctcggttaaggagatggataatataagtattcttgtgcgtaaagtggaagtagagattgaatctttgttgaagaaagctgagtttgctattactgaggagaaagaagtgaggcttgctatagatgagatcaagaagaagctcgatgtgtttactgaaaccattgaagaacttggggaacatgcgggtaagtattgtagcgatgtgacaaaggcgagaaccgtgattctgcagaggataatccgatacccggctggttcaccgaaggatgaagctccttggtaagaaatcatttgcccctaaagctaactctgaatagtaaacttatgcttcatgtttttgctatagaattctagagaacaaacttgtgaacatgattcatcactaggatttatagatgatttggattgagtttttttttcgtgttttcgattgatatcaggacggagatgatgtagtgagaatgtggattcggattcagatttgtgtttggctttggaaaattgttggtttgtcatctttagcacaagtattatgaacagctaaaggataatctttacctaatgttattagttgccctgaggaaacctttgtttaatacatttaattaaagagacacttgtaaggtttctatgtcatttattttgttggctttctttaatcagtgttgtatgtttataaatgaatgtctatgtgcttagtcaaggcttggagaaattataagctggatccttaaagaatcaatcaattttaaaaataggacgtgaagagttagttgatgagacgagggagggatgtttctcatagacaatagggacataatactacttcttaagcaacatttgcgatgttttaatgttttaatgttctttaacgttaatttggaaacatgttttacgtgacagacgtggtctatgaaagcccattttgacagaagcatgatataaaacccatgtttcaagaatatggtgttgaatgtaaaaaggtttaaatgaattgatttagctacctatgtcatcaaagtccacttatcttttcggtcaaaagtctttagagaatttcatagttaaaattattattcagttttaaagtttgttctctttcaattttaaaattattgtgttagaatttgagtccatgattaaatcttatgatatctttatgttagttcgtatgtaaagtcaatcggtttgtgttaatcgtgacttgttaagaaagggcgtgagtaagagttgtgtcttgttggataagtgcaagtgttttcctaatgtaaagtatcgtcgagtaaataatcaaatttcagattcaataaagagttatccttgttcttgtcttctttacaagagaagatacaaatgtctcttgatctgtttttcttctttctctaaacattccaacataacccaggaggatacttgaattcttgaagcatataaagagatgggaacaacagaccatgaccatcaatgtattaatagtgtgaaagatgaaattagaaactccgtatagtttcattacaaagttggtatccttcaacaaaaataaaggacatatcaaacacgaaatcattttggctactaagcacaatggaaactacaagctctcaataaagaaacttctatagtttgtgctggtcacattcatattccactgttactatatattttgacaacattatcacatcttaacgtaacttgtttagcaaacaacaattttcagtggtttctgttggcaatgaagttagtaagagctatcaaaggtttgactttgtcagaatcaaacccttgaagatgttctctcgcatctctcttcaacttctccacaaactccttagatttctcaacaccaatcacttttggatacgtcagctttccggcgaccttatcttttccggcggtttttcccaattcctccgacgacttggtctcatccaagatatcatcaaccacctgaaacaacaatccgatacacctcgcaaagtttctcactttctctatctctttctctgttccaccgcctataaccgctccgataaccgcagatgcttcaagcaacgaaccggttttatgaacgtgaatatattcaagatcctctaatccgacatcgttttgttccaacccttcactgcttaaatccttcgcctgtcccgctacgagtcctttcgttccaatagacttagccaattctttaacggctcgaaccattttcttggatgacacgtcagcttccgtcaaatgctcgaaagctagagctaaaagtgcgccgccggagagtatggctacgctttctccgaagactttatgtgttgttggtttccctcgtcggagatcgtcgttgtccatacaaggaagatcgtctttgatgagtgacattgtgtgaatcatttcaactgcacaagccgcttgaatcgctaaacgctcttccccgccgactagctcgcaagcggctaggcagagtattggcctgacacgttttccgcctgcgagaatcgcgtaacgcattgccttgtggatgttgagtggctcaataagtggaattgcttcatctaatgctctgtttattgtctctgctttgctgatcatgtacggtttgaaatcgaaactgaaaccgaaatcgtcttcttcgtttactaatttgattgatgaatcaagaaactcacgggtgtcttttctagcgaaaatagcagcggcgaccggagatttgatcgggatatggagaaggcggataagccgccgtgtattcgcgggactcagccgtcctttcagagttgtaaacacgaagtgtagagatagaaagacgatcaaaagatagagaaagatattttgagcttccattttgatcaacaatataggtgattgattgatctttgtttcttcttctttgtaataactttttgtgttctgtttttttttaaggggttttaggaaaaggtcaatggcagggcacgtcgtgggatcatatcattcttggtaagatcggttaaaactgaaattatttgaagcgtggtttggatccaagccgtttactttgaagttcggtgtggagtgaagtgagccaacgagtgcatagttttttttttttccttctaaattcattcataccaaatcaacattacagaagacaaaaactttcgaaaacaaatgagtacataataccatattgagaaaaatatacattaagtgaatttaacgatactttccacgtataagcttttgagtcatagtgtaaatactgaacaagtgagtaagacttgtttgtttatcgacttttacaaccatatatataagaaaaggtttacaaagaaaaccaattcgaaccgggagaaaagataaatcaaaccggagttttgcatgaggctgatggtatcttcattgcaaatgaagcggagaaacacgacctccctagttttcatcaacttttcacatctggttttgttttcatgtggtttattttttataatcgtttctcaagtttcagtggaggatttaaagatttatgatattggatatcaacgtgctcgacgcatggtgtcctaacgttcaacaattagtgtcgtaacgttgaacctgtcttttttatattatagtaaatagtaacattttggatgctttcttttatgaaacaaagtcaacgaatgcaagtctcttcgtggaatctggtcatatatcggttttatgttatcggaatatgttttaaaccatacatgcgttgattaatcatactgtacttgtttcacggcaagatgggagttactagtcccttattctccgacccgaattttagtttggttaattttgttaccttagcccttaaccgaaataatggaaaaccggaatacctgaaccgagttgaaccaaacttggtccttagttctttctagtccatatcagaggttatactatttatacattagagcctcatcaatgtgttttcgattgattttgatacacataagccctccataaactacaaactatggaggttttcagcacactcatttgtaacatttaatttttattttcagtaacatttaagattttattagattagatattttattcaaggattttgtgcaagaaaacccttcaactcgttaatttttcgattttaccatctatttccgaaatgtaaattaattttatgaagtcaaaaataatacgcaatataacacttatacaaagacgaatactaatatgcctaaagtaaaaaacaagttctaatttacagaaaacatatattaagatataagagttaagaaaaatctatgtaaaattttagtaattattacgttaagcataaggcgaatgctaatctgcgtaaggtaaaaaaacaatttctaatttacagattttttattaagatctgcgtaaggtagaaatgaattataatttgtggaacgaattctaggatgcgttaagtatctaatttgtattgttctcgtgcgaaaaaacaaaaaaaaaaactacattgcgtattattgttgactttttgtgattaatgtaactatgatgaattagaatgaaaggatccatccaaattcttacaagacaaagtcataaattcataatataaagactctggtaattaacatgattgcgatacattaactttgtttaaactgctcaagtaaggagattagaacaatggctaaaatgtttgcagaccgaccaaattttcaatgggcctaagaagtacgaaccctacatttctaattaatctcccactattcatctactttctctctaatgaaaacacacaaaatttccaaacacaattgtaaagaaaaaaataaaaatttaataagcaaaagaaaataaaaacctagacattggatgtagaaggctgaacaatcttgttttgtctccctgcaagccaatgcatggtcctcctagcaaaagatggcgttttcgtctccaaagattccgaattttcgctcttaagactctcttcgggaggaatccgatggtttggaaaccggagtgaagaggaagacacgaaagaacaatccgaatctctagcactagtccccttttgcttctcctttttaccccttagccaaattttcgataaagaaaagctctccctctccacaacactcttctcaattcccttaactgttggatcaaaaccgcattcggacataacggtcctgtggctcggcacccggtcttttccggatagtttcttggtcgaaacatgaaccttaagtgtagcttcttgatccataatatactcatatgatcccattgacaaacacctccttccatccacatttttactattaccacttatgctatttttcttctggtcacttccttcaccaacatgatctatgttcctaaacttccctaacttaacttctaaaggaacaaccttttcatctaaaccatccatgtcaccatccgggtcacatgatttacgacccgacctaatccgggtcgactcagaatcattgttcacatcataacctagttgagagttagactcaagaacaggaaccatatctctcgagctttgttcactctcaagaacaagtagatacgaggagcttagattgtggtgagacgaaaaaccagagaggagattagatctacacaagggacaagtagagtgagagagaagccacgtgtcgatacactcaacgtgaaaggcatggctgcatttaggcaagagtctaagtttatcctctgtttcaaactcacagagacaaacaggacaatcaaaaggagagattttgagaccgacaatggacttgtaatgaaaaacaggtaacgtgtcgattaaggattggtcaacgccagaatcatggaggttaaagagttgttgaagctggccttgaagagctgtaacattgtcgaagtaatcttctctgctttctcttgatggtgtgaggaggaatttgacaagaatatggagaagaccagagatgaagaagatgatcgagaggattatgattattagaagaatatttggagtgattttgctgtttaaatttgacaagcttgtgtttgatttgagaggtatcaatggtggtggtggtgaagaagagatcaaattctgagttgatttcatttccggtaaaatcttgttcatgttttctctggaaaaaaaagtgaaagagaacaaatttgagctcaaaaacagagattattaatgcatgctctgttttctgagagttttggtttatcttgtaattgaaagaagagaaataaagatttgagctcaaagttttttgaaaatttatgagatagagtgatgattaagagaattacaggttggaccattgatggtgacagatgagcgaatttatttcagtttatatttttctttcaccaaagaagagagagtctctttgaaatgattttttaaaattctgaaattaatgggatttggaattttgtatttaattaccaaaaatgcaaagtcaacgaaacatttctttaaataaatagactgatacaatcactttctttcatgaataataatatcttatgatttttgtaaccaaaccctgtccttccatgttaaagccaaccggaccaaacgatataattgtacaatccattttaaaatcttacaatttaacattccgagtttatattcaagatatcattagactaagactcgaataaacatgtcgttttactaaatattttaaacattaacattactaatttttttttatttatttttttgaaagaatgtaaaatttatattcaaccaaaaaaattgttgtttacaatgaatgcgacataaatttaaagaatcaaaatagtgttaaaagttatctagctgcgagtttgaaaccaatactgcaacattactaattagtgttgccatgcatgagtgatgaatttgtttatatgtatgtttgggcaggaattattttctcttggatggagtgttgtttttgttagagtaggtgtccaaatcatgataggccgagaagcttttgaggcaacttcgactttggatttgttcgggaggggatagttaaaactagagtcgcaccattcttcgttatgagttggaattcgtactatgttaaggttaaacgagatcgactatagatttattgatattattttttgcatgttattgccttatcatggttgatagttttaaaccacgcgactacagaacgttaaagatttggacgacataatgaatgatagttatgagttagtcttttaggaaaatttgcgatccggtctaatccggtgagatgggatatctcattaggctcatgtagttgactgtcacattaactaaacttggttgatgatcaccttttttatagtgtagacacacctatatttgacgtctttgggtctatatcttttattaagagttgacattttagtatgtgtttttagtgcgagcaaaacagtcagttttcaaattaaatgtacgagataaaaagatgaggcattagacagaactattatcatttcataattttaggcagtaaacaaacattctatgttgacaaaggagaaacacgagagagagagagagagagagagggaaacataaagccaacatggaagaaggttctacggctttctctgatttaagtcttaactcgaagcatgtatggtcttcgtgcactttttatttattatatgcttagtagaacaatgtacctaaaaggctataacatacacattttccatttatttttgttgttcatcaatttttggtttatgatttggtgttttaatttcctttggtacataaactatcataattgaaaaaccaggatatgtagttaggtcaacctacataaccttttgataggctcacgacctcacgcattgaaaaaccattattagaaaatagttatttggaaaagtgaaatagattttgttagctcgattttaggagatggtaagggaaagcccactcacacactcctaaaaaaaatctaaaaaccagaaattgcccactccgttttgagttttgacatactcacatactatacatatatgttttcgttttttaggttttgaacttgaaagacagagctatgttaatcggacatattttttttattatcaaactattcttaactcgtgtttggaaaatatagtttattttgttctataagtttctaaacagttctaagttttaaccctaccaaagagacattaaattagtaaaacccgtcggttaatacttaatacttaacagtatacggaaaattgtaaattaatataggataaagtggaattcttatttgaaacacaatgttctcatcacaaaggatcatccatacatatatattaggtatgggcacgaagcggatatccggaaaaattgtgatatttgttattcgattcattttaaacgaatacttgattttgtgatttgctttgcttcaaaaatttccggatatccgaaatttcgaatattcggaattttttgtgatatttgcggataaccatatcagatattcaaagttttttttttaacatgctttcaaaataagttttaaataccaaacataaccgttgttggtatcaccagtcaacaaactgttatcaaactaattccaaaaactaaaacccgatagttttttatgccattgatcaaaacataacatgaaaaaaaaatgatcaaacaaacatcttaacataaaaacataaaatgacaacaatacacaaactatttatgatatctatatatagatataactatattttctaatatatataaaaagatacggatcgaagtgggtattcgatttttttaaaaacaatatttgttatttgattcggtttttacgaatactatatttttctatttgctttgctctaaaatcttacggatattcggatttttcgaatcaaatcaaatcaaataccgaatcgaagcggatctaacgaatattttgcccaatatatattagttccattcgatttattggaatatatagtaccacgaaatcatctctcgttttttttgcttatagtgtatatcaaggatcaacttcatatcctgcagaagaaaagaattgtcaaatttatctagacaatattaaatggcgaatttatttttgaaaaaatcaagacaatattaaactttggatacgatgaaaagatgaaagaatgaaacttacggtgtgtatacgacacgaatgttaccggcatcagtattagcgataacccgaaaagcgtcacgagagagattaaggtcaccgttgcaaggctcccggcagaaatcaactaccttcacgtctacggtacgcccggtgcatgctctgtcaaagttgtatgtagcaccaatgcatcgaaccctgtacctccgaccacaagctcgaccattttgccacaaattgttcttgactccgactaccagcgtctcacgttgtgttccgtaacacgcagaccctaaatcacatcattaatttataactgatcatatcttatttttataatatatatatttatatatatgaaacaaacatatgtataattatatagacgtactagtgtagggagggtcgtaatagacagcttttccttgagcagcttcagcgattggagctaagatttgtgcaaacactatcatcactaccacaaattttactgccatttttatcattttctttaacttgtttgtgaaataacgaagcaaagggaagcgagtatttatatataattggactcaaagactgtaagtaaaaggaaaagtctttggtctacgtcaagtcttccattacttattgtattgatttcatacaggacaatttgttattccttactccacctaaattttcttggtgaattgaatgaatatgaatatatgatgatgtgtgaaggaaaattccacgagggtttgaaatttaaagttcattttttttttctttgtggatattattttcacaaagctgcgaaggaaatttcgaagaaactaaggagggtattctcaacatcacttcgaatcctaccttgagaaaattctcaaccttacccaaatccaaaaccatcgggaaaagtataaccgtcttttaaaccttctgatgagtgttaggttctaacgttaggaccatctactaaaacaaaatgtgttaatgaagaaagtcccacattaaaaattaaaaattatcaaatagtatataaagtgttagggtcactccacctattaccaattgatttttagttgaaatctcatattaaaagcccaaatctatcatggtatccgagtcagattgttcttcaacttttctaaacatataaaaaaataacttgaacaaaaggtaatagtgaaatctagaatattcttcggacttcacgtacttgctccctaagatatctccaatattcggtttgttacataacaccaataaaattagtcaaatgatgaagtatgaaaaacaaatttgctttattgacctcttttacaagagaaagacaaatgtctcttctttattttatttttttgaatcaagacaaatttctctttgttatcatgtcaagtaaatctgcgtttatgaattcaacattctggaaaataattgggcttagtgggccttcaaatatcattttatgtaaaggcccaaatctctatataccaattaaactttctatcgctgagaaagagatttgatcaaattaaacttaagataacgattgcccttaccgaggaagttgcctttgtcggcttgtcgctataattcatcaatcaaagattcaaaatataaaaaatgagattttaacttttaagcatatgtcatttgtgttgttatatcatcgtccaagtttaaatttacaaaacgtatattgttaagaaaaaaagagagcaaaccaaaagaatgtacaaaatttcaaaacgtccgaatcaaacgacaagctatgttcagaacgagtatttagaattagtagcgattccataggcctccaagtacgaatattacttttaaaactaaattataagttcgaatattccatctttttccatactatggtcttaaaaacagtgggatgatgatatttgcttatccttcaagataatgtttaaaattattggatgagaagatatttcttattatttatatttcttgtagacatggagccaaaaaaatttatatatatatataaaaattaaaatcttttatcacatgatccaaagcccaaaaagtaaaataaaaagtatctcatcacatgaccatttttaaccaaacgttactgtcactaaatgaaatctatttttctttcttaaattttgctctgacaaatatttttgattgcgtcattttctactttggaaatgtctttgatttagcatttcagttcgctcaaaacatcaaatcttaccttctttagctttcacattagattctggtaattattagcacaaaaaaaagataagccagaatacgaaacaaccaaaaaaagaggagaattcttttttttttttttctttccgatgcctccgaccaataattaccgaatctccggcgaaccaccgtctactacgccgtctcatccaccgccaaaaccgaaaacaaggattctctctctattcctcgttggtgtaatcatgttttcaatcttctttctcttcctcgttcttatcggtatcgcctctgttcttatcctccctctcctcctctcttctctccatcgtcaccaccgacgtcgtcgtcgtaatcgccgacaagaatcctcagatgggttatcttcaagattcgtgaaaaagcttcctcaattcaaattctccgaacctagcacatacacacggtacgagagcgattgtgtggtttgttttgatggattcagacaaggacaatggtgtcggaatcttcctggttgtggacacgtgtttcatcgaaagtgtgtggacacttggttgctcaaagcctcgacgtgtcctatttgcagagctagggttagattgtgggaggaagatccacaagaaggagaattatggagatgttttggtcatagaagaagtagtttgctagatttgtaagtgctatgtttcttgtttttgttttgtttcaatcatatttggattagaagttataatcatttaataatgttttaagctcattcaacatagttatagtttctaactcgttcttgatgactagttcgttggaggagactaattgcttcattattggtttatagaatgattagaacccttaagctctcgaaaaatatataaatagatagatatgtagtcgttttcagttttaacacggtgctacagagtttcttgaccgattcaacacgaattgttgaacatgttaccgagctcttgttttctctctttaacatctctatttgtgtcgctgtcaggaagtaattgtttagacttttcatcgatgtgttatacttcggtttcttgttcttgaatttgtctaagtcttggtttctttcgtttgatttttgattgaataggtaatattgtgtggttatgtagacgtggactcagtctaatggatgataagaatctccaaaactgaagctacgaagaggtacaatacaagccaaggactctttcctccatagagaagtagcgggtcgatcttatggtaatatataagcactaagcagatgggcgtttgatcatataaaccctcactaccattaccaaaaagcaatagccaagagctttttttttcattttctttttgaaagccatggatcggttttcgttcttgaatgttataatggaggttgcgggtattctaaatgaatcccgcaaactctcctcaagaacaaaaagttgatgttctcagtcttggtattccctctcttactcaattgtttagtttacttgttcaacgccattgccatcaaacccgagataacaaacttgatccttgaatcaagtttgttacctatgacagatccaaacaccccggaatttgctgcccatcttatgagagtctttgtagattttcgccagtttgtcaattctttatacatcttcatcgccgtctcctccatcatcaaccttttatccactcttgtcatggttcatgcatcggctcttactcataaagatgatagcttcgagatcaaagattttccgattctgacgcttaaatattggaagggacctcttgtgaccaatttctatattgttctcttcagtcttggctattggttcctattctttatagtcctattttctatcgttttcttctctacaaaactcgattccttggcagccaaatctcgcgctttattcattgtatttgcagtctttgagtcttacttagctatcgtttggaacttatctatggtcatatcgatactcgaggatacttatgggatccaagctttggggaaagctgcaaagattgttaaagggatgaagccaaaactattcctcttgaatcttttctttgggttattgtcatttggattagttcaaatcttgcggctggtcgattggagtagttcattctcggttaccttaaccaccggtttggtccttatgagttcggtctttgtggtgaggatgtttcagcttgtgacttacaccgttgcttatttccaatgtaagagcctgcaaggacaagactcgctgagggatgttgaatatacgaaattgtcatccactactctcatgggaggattgccttgattaggcatgtataatacataaatatacgtgggtcgtttgtttcttaagaatgttaaagttcaccatggatttggtaaagtatttctaataatccaaggttttttgtaatttataaaagtaattaataatcaaaggtttggttgaaaatatattttgtgttaaggtatggttgcatatgtatatatttagcaaggtatttttgcttttctgtacaatgcatatgacatgattatccttttggatgaaaatgagaaaactactatactacaacaactatagaaagcaaaccaaaataataattagaaaaataagaagaacaaatcccaaatgtttttcatatcatatcgcattgcattatgttacaacatagctctgtaatgagaattttgaatttcatacatgtatttcatgttaaattatagtttttgactacataaggtatgttttagcacaatattatagtctttagctacgaaaaagccgatttctccacaaacttgcataaaacaaattcacgtaggtgcacacatgaatttcacatagtcaagatattacggtacaataacagagttagagcatatgcatgattatgcacaaaacatgaagtgtaagtatgaaattcagatttctcattattcgaatttaagtataaatttaacataatgcatttgtaaggatataaaaaatctgatttgccgtgtttaaggtaagtgtttttgttgactccttgttgggacatctagcttcaccgtgtcactccttgaggataagactaaaaatgtcggaaacttctctcaattttatttgaacatgttcgggtttgaaaaccggtttatgtaactatcaagaaataatcaaaacaaaaaatccaaaaataaacttcaatgtgaattttgatttgggctatatatttcaaatttcagtctaaaatttattggcaacaatattattaaaaaaaaaaacctacattgttattacaatggggaaacttatttattaagcggtataaaaggttttatacataagtaacgaaaaagtagtaagtaaacgaccatgagttggtaattaatttgcaaaaatgatggatgatacgtaaaagtttaattatattatgttaaaaattttacttaccttaaaaacaaaagagatcagatttaaagaaaagagaggttagattaaaggaggaagttctacaagaaggagaactatggatatgttttggtcatggaagaaatagtttgctagatttgtaagtgctctgtttttctttttttcaatcatatttggattagaagttataatcatttagcaatttgcaacgtcctcaaagaatgtttgaagctctaattcttctatgttcggttaaatataaatatataatgacggtttggtatagcatatagtttgaccctactgtttatgactcattcatgatgacttgttcgcttgaggaaacaaattttttttttagatagatgtttcattatcttacacggtttcttgacattttcaacacgaatagaggaagtgaatgttgatcacgtacatttgatgaagaagtcaacttgcaatgttaaacatgttcctcttattttctttatataacatcttcatttatgacgcggtcaggaagtcatcatttttagacttttcatcgatgcattatgcttcgggttctttgttcttggatttgtctaagtcttggtttcttcctttgattttggatataatatgtagtaataataatatattgagggttccgtgtacttggactcaatcaaatggatgacaagaatctccgtaagcgaagctaccccgaaatacaagccaaagacttctttttccatagaaaaatagctggtcataatctaaaggtatagtagtttttgaatgtttggttagtagtatataagccctagacagataggtttgatcttataaaccctcgccaccattaccaaaaaccaataagccaagagcttttctcatttttcttcttgaaacccatggctcgattttccttcttgaatgttgtaaaggatgttgtggctattctaaatgaatcccgcaaactgtttctcaagaacaaaaagttgatgttctcagtcttggtattccctctcttactcaattgtttagtttacttcttgaacatctttgtcatcgtaccggagatcacaaacttgatccttgaagcaagtttgttgccttcgacagatccaacctccccggaatacgcagcccgccttatgagagtctttacagattttcgccaatttgtgggttcttcatacattttcgcggctgtctcctccatcatcaacctcttttctgttctagtcatcgtccacgcatcggctattactcttaaagatgaaaacttcaatatcaaagattttcctgttctgagccttaaatcttggaagggacctcttgtgacatatttctacattgctcttttcagtcttggctttggcttcctcttctttataatcctttgtcctatccttttgttctctataaaatccggttccgtggaaaatatcggtttcttggcggtcgaggctggtgttttattgattatattcaccgtctctcagtcctattttgctatctattggaacttatctatggtcatatcgatactagaggaaagttatgggttccaagctttggggaaagcagcaaagattgttaaagggatgaagacaaaactgtttctcttgaatcttttctttggtttattggcatccggattagctcaaatcttgcagctgatcaatatgggaagatcgttagcggttaccttaaccacaggttttgtccttgtgtgtttggtctttgcggtgaggatgtttcagcttgtgacttacaccgttgcatatttccaatgtaaaagcctccaaggcagagacgttgagtcgctcagggatgtggaatatatggcattgtcttccactactctcacggaatgattgccttgatatttcaagagaagggcatatatgatatgatatttaatctgtggattgtttgtttgtttgagaatattgttgaacttcaccatggatttggtaaagtattttgaataatcaaaggttttgttacatatatgttttgttaattgttttaaggtttggttgaatatatttggttttatatatagacatgatagttttgcttctctttttctgtaaaatgccgcatatgacttgagtatccatttcgatcaaaatgagaaacactaaactacacattggtatcttttatttatttaaagtagtataaaatgcaaataatatgcatttcaggccatatgcagtaaaacgcattgttggtcactgtcagatttggaaccagagatccgcaatccggaagaaccatccacggcagatattaaaagtcaacggccatctacatcacgtctctgaaagaaagcagggacgttaggcttcctcgtgagccgaactaaacaagaaaagtcaccgtaccagtgggctcggacgatcaccttcctagaaccagtccatcccctgcccaaagagggagtcaaacctaacgttgcaacaataaagacaaaattaaaacaaacaaattaatgcataattaaagcaataattgccattaattcctaagatctcctaagaactttgtatatataagagaagagtggaaatatttagagcataaaatattgactacttgactatactattcatattatttgtgtaattactatatgtgtgctagatctatggaattttaatgatgagagagcgtaacgagttggcaagagcatgaaagaaaagagacacagagatttgttaacgggtttggttaacaacctacaattttgggatctagtccataaacaattcactagaaaatgctccaacctacaattgctatattgcatccacctcttttttctagaattacaatgaaagaaaactaccattcattgtttttcgggttgtctgaatttttcaacctaaactatttcaaaactcatcgtttctctccatacttttttcctccgaaaaacaaccatcaactttaaaatttctgaaaaaaacaattttctccctaaaccatgttaaaccacaaattcgcgtttactgtttcgcgttacgattacccacataattacccacgacccgtgtggaaacgacgtcgttttccttcataggttttattcccaaaattgcccagaaacgacgtcgttttctttgtgtttaaaatctcaaaatcgaattggggtttagggttcatattcacttctcaaattgaagaaactatgagcaccacgagctactactaatctgcttcaagtccgacacatcatttttctcctcctggtgttccatcgaaatgctggtgtggagcgtcaatcatcacttacacatcaaagacgaaggaaaatccaagccggagattctatcgatgtgcaattgcattgcaggtacattgttctattttgttagattgttgatttaagagaatgcaattgaaggcgtattttatccgggtttatgtgtgtagagagaaaatgaagatcacttgttcaaatgggttgatgaagctctcttagacgaaattaggatggtcgaggagaattgtaagagagttgaagaggatgtcaatgatctaaaggtgcagatggctaaacggcatcggttttgttttttttgggaaataaaacaaaggtgaaacgatgtcgttcgtgtgtgatttttggaaaatcaaaaaaaagtgaaacgacgtcgttttaagacgggtcgtgattacttatgtgggtaattgtaatcgcggaacagtaaacgcgattttgtggttaaacccggtttaatgactggttcaattggaggcgtattttctcggatgaatccgaaagtatatgacgttttattcagaaaatttagaattgatggttgttttttcagagaaaaaaagtataggggggaacgatgagttttgaaatagtttaggttgtaaaattcagggaatccttgtttttccgacgagtgtagcttcaaaacaaaaccaccaacagatcttcaaatctcgttggtgggcaacgtcacacacacatgtgtacctctctcgataaactctagacgtgcaatattttcctttcgcgacaacgttctatttatattcttaccataaacccctcaagctcacatgacacttttctctcttattggtcatctcttctaagacaccaaagccacatcatctcttaagattcgtgactatatatttctcttcagttcaggtctgtttctctctgtatccactcttcagctccagctcttgtgtcacacgcacagtcttgcgccacacgtacaatcttgtgccacgcacatattttgtatcacagattatatcaactttgatcatcttctttatctagagtctaacaactagttacaaataaacattcattttatactacaaattgaggatagtatacaattttctttctttcttgattctgaatttttgtccttgaaggtttaatcccacttcgtaataataaattcttgagtgttccgatcatgcatccacatgttttctcattacttaaccttaaaaacgagagtaattagattttagtaatggcatatgcgcaactcacaaacaccattgttgaataatttatgcggcactggtagcagaaaagatgaaatccagcttatatgtaatttacgtgctcaactttaatcagcggacaaaaattataaatgcgtaaaccacatatctccccacctatatgcgtggaagttgtattcaatatacaaaaaaaaaaaagtcattataatttcaataaccagattgtatgaacccatgtcgattcatgtatgactcattatgttgcaaacaagttacaagttacaactatcacgtgactttgcaacaccaagtactagattttttttgttattaggtttaaagttccataacgactccatcaatttgtgtactgataaatagtacatcaactagaatttaacgtgccgtataccgtaaaacaatatttgtttcatataatcttaactaaatagtaaatagtaaaaaaaatcttgggtttaaaaattcataacaacgactccatcaattgcgtactggtagtatataaattacgcaaagtcttgatataattttatctaaatgaatctagttgctgatatgagaaagtaaatacgttgtcgattaatttttgtatgcatcatgatctgtatatatctctactttccaaaagtatacatcaaatatgaaaccgtgagtcctatctttaattttggcaacaaaccgtgagtttcttaagaaagtatgattacttagtcgtaaaagcatgaaggcaaaacttttgaataaattgtgtaaacaatgtaaaaacatttcacatgggattgtctatagataatacggcaaatttaagatgccactttgaatttcagccgacatgaaatagtcacacattgattttagtatatatcaaatataattaagtaggagaaaaccctaaaaaaaccgacatctttggtcaagccaacaaaaaaacacagaaaagctaaactgttgttgtttttatcttggtttcgaaaaataacgtgtatgaacctaattaaatccggcccactaaatatataaatatcttttggagttcgttttcacattgattttcctaagaatttgtaggaccatcatacaaaagttattgatggaaactgctcaccctatcaacaatgaaaagcaagtaagttcacattatattttcaattatcttgtaatcaaatgggatttatactggtgacaatttttttcttttgggttgttctatgtgttggaaacactatgagtgctataattttcatgaggatgacgctaaatgtttggaatgattatcaatagagatatagcatgagaaatcaagagatatataatcaaaggatatgatataaatgttctttttgtcaacatatataaatgttttgaaacgtaaaaaagaaagaaagatataagcgttttggttcaatgaatcatatatatgaaaggagactaactcttttccacaacttgacacataatcacatgagcgtttgccacctagacttcataaaataagtaatatataattagtaattaatttaacataacaactaaaataggaggatataattaatcagaacttgagccatcattctttctacatttttttaattcaatatatcctctgtaattttgagatccacttaagtggctaaagtgatcataaaatccaaacatgttacacatattccttgcctaaaaattagacgattattaagaaaaaaactaaatgaatatgcagattaaatatatctaagcttttcgagatttatgctaagaaaacaagtaatttgaaagatgtttgaggagctatccttataactaatacgtaagatataagattatgacaagaacttaactaaactttccaagaacatcaagttgaatatgattagattgaatatgtagagacatagttaataaagacatgttctatttttagtgtaagaaataaattttctaaaatttcaccttctcacaatctaaacatataaccaaaaaaataaggatatataaatttaaaaaaaaactgagaatctagaacaacaataaaaaagtaactcaaacacattcgtttttcagatgaactaatatagttggacttttcaaaaacaattacaaatcatatttatttttcaaaacggatgcattcaactttactttatatgaacagacattatataaaacaatttgtaaatagtaatacataaatccgcatgtaatgcgggtactcatctagtataataaatgtttggaatcacgtgaaattttctcttcaacagaatgttcttcacaaaatgaaaataatatacttttggtcgagtaaaaaataaaataaaataaatctcgacgtaattttttttatcctattctatagacaaacttttggttttggagtaacacatgagaatgagtcattcttcctattttgtggttgagaaatgagtcattccttcgttcattggatttcattttattccctttttgtatgtttttgttcatagtgacaatatatatatatatatatatatatatatatatatatatattatatatatgattgtttgtttcttgttaaaggatctttaataaaatctaaataatactatgttttatttttgtggaacgatgctgcttttgtgtccatatgtagctggcactttgtgaacatttcttgattatctagaattatcttgtctttttaatttttttaaatgaataacacaaaatatcacaaggacatatttcgaacaaagtataataatgttctcgagcacatcagcattaatcaatagagaaggaaaaaaaaaaaagtgatacaagcattatagtatttcatacgcaaatccattctagatattcttctagaaaaacatacgtctctttatatttttaatttggtgtatctcagatcctctactatccaactgtcttgtaaaagttactttaactagctaatgtaattgaaactgtaattttatatgaacaaatgatttaaacggatgatttaattaatgctataaaactagtttgatcatcctatctcttcagatcacgtgaatatgaattcgtagtcttaattgaacatatttatccacacacatatctatattttataatataaagtttgaattccaagttttatactctaaataaattggataatgttgtcatatttctcatatacatatctttaaaaccttgtctctacttaaggcttggaatcacacggtcgtcattcatcttttgatttggtagtctggcgaagttagaaatcaattttgagttggtggatatccttctaaatgggtggtagcctagtgatattaagagtgagtattcaagatctctagttcaatctcatgaaagatatatattttacattttaaatgtgattctatcaacggttagttatatacactaacaaagattacgtactaaattcagactaaaaacatgtaattctgtaatggtggagtgatgaaccttctatagagaaagagcttcaaaattacgaattcgaatttttatgtcagataaaaagaagtggtctgcatcccggtccaaaaatactatgtactaaaaattcacaactttttagtcaccaatcttcaagggataaataataaacaaagactcaattttgtttcatatgagctaaacggttgagtaaaacaaacatcgtcaaagattttatcttataaaaagcgttgtcaaactcgttctgagtaccattgattattgggttattttgaagacatgcatataaatttgtttcgattctcatactacaatattattaaatcggaacatacgtacaactaatcccattatagaaagattaaaggtataaacaacgggataagatacgaaattaaaatctccttaagtcaacaaataaaatctctttttaaaaggttacagttttaataattttgtaaatggggttggcgaaagtatatcattaatcggctgaccaaaaccgatggactcacctgttagtggataaatgaaaccttaataaatgaattcgataacttcgaccctatccattggtggtatcacttgccacgtcttttaatcctatttttatcttttaaaatcctctttttatttacgtgtttgatcttcttcctcccattattattaatatcttgctgcaaaaaataaatatagaggaaaacgaattccagtcataaacgctattaaagtcttagatatgttagacgagaagatactagtaatgctaattagtcattaggaattccattaataatcgctattaaacgcttagacatatgttagacgagaagaaaaatagaaaatcgaagacatatgttagacatatgtactatgagctttaacaaaaaaaaagacatatgtacttagtacattgtactatgagagtatgagtatagtaatacttaattagtcaatagtatatcttttgttctttatcacttactatgttggttgattttcaatgtctttgtaaccttttctatgtttcaagaacgtatgtaataaggtttacggacgcatagatgatattttgtaatttgttttagtatttttcatttttaaatgaatttctgaagaattataaaccgaattccgtaattcagaaaaaaaaaaaaaaaaagaattccgtaattcattgttagaatccaagcatcgtgtccatgatttatagaaacgattgtaatactagtatcatatttttcatctaatacaattaagaaatactaaccaataattactgataatttatcttaattaagctgaaattgttaaaaaaaaaaacgtacagacatctcttacacttaaatatttctgatggaaacactaaaataaaatattttgatcgtagaaatataactaatatttacttattttttctttttttttaggttttaaaattctcattatgttggttttagtatgtttttattttatttttaattgcataattaattaagatatttttttgtacaagataatgccacgcaagcattttacgggactttttttccttcgcatgcaaagtccggcggctcattttacacgataatgaggatttgctcatgtttctacgaatttaacaaaaaccgaaaattgcctttaaatgaaaaagggagagtcaaaaaaaaggaaaaaggaatattcaaaatagaaaagtagaaaagagaataatataaaaataattatctcaagaggctatagataaagtgggacccaagcaaatcttttagacaacgtggctgatcctatcgggccccacaaagacaatggttatgtggaatttggatatgtctccttttttttttttgctctcccacgctcttatcttgtatttagttagaaatctgaaacaattccctcaaaaaaaaaacaacactattcgccactcatttcatattcaaactttaaaaaactgaataaattttaataagaaaatttttaaccttttgaacaagagttttttttgttatattttgataatttttcctaacttcaaccaattaaattataatagacaacaaaatttaccgttttgttatttataacttacatgcatattgtccaattttaaacgtgaacgacatgatggtaacgttagttacattgtagtctcagttaaattcaaaacatttgattatttataacccacacacgcataatatccattttaaacgtgatttatacatgatgatgacattagttacatagtagtgttcgttaattacaaaaaaaaaaaaaaattggacgtttttcttgtttagaactcacaagcgtatattgtccagtctaaatttataaaatagtggtgacattagttacataatagtctttcgtcaaaaacaattttttgaccacttttatcattcataattcacacactcatattgtccaatttaaacgtgaactaaatatggtggtaacattagttacttagtaatcttcgttaaataaaaaaagttcaaccgttttatcatttttaacccacacatatatttaacgtgaattatatcacgagttacataatagtctccgttaaatttggaatttagctcaaatttgttgtaagtgaattgcttgttaccaatgtcgtcagtaaaacataacggtaaatgtttctattttgtattataactattttaacataaaagatataaagaaagatttctatgtataatacattatttcgatatatagatttaaattatagttataaatatattttttgcttgatatctctgtaaattaataagacggaatttaaaataattacaataaataaattttaagcaaattagatgttagttaaaagttagatgagaaaacactgtagcatatgaagaaaaaaaaacacaaaaaagtataattagatgtgaagcattaaaaatgttcccattgagatgacgccacgtgtcacaatctgaggtcggcggtcgatgttataccgttgaaatgaggaagaaacggaaaaaaagtttgaaacgttcctaggagggaatggatgacgtgtcataatatgattggagtacatagctgccgttgatcgcgaaagtaatgccaagtcatcagtcgcacatgcctcgtgacttttcttatctttctcttcccaccctaacacgccacgtttcctctacatgtttgccacgtggcttttcactatccacccaccaatattcctaacactaaaattagattaaaatttatttactatgggatatgaaattatgaattgtgaagttatgtgattatggttaggctgatgctacgtaatttgttactctttagtagcagtacaaatgtactttacaaaaagatttggtgtgtttcaagcatatcatacaattctttttatttttacagtacatatccctattttacaataaaaatatcgtattttatttatcaaaatgttgttttgctaataatatttagtaaaataattttaacaatagtaagaaaaagcttgaaaaatcaaattttgtaaatttccccttctacttgttagtaattaatagaaatagataaatattagtttcttttgattttatttttcccaaattcactagcatttgtggaaaattgatgtgagtacaaaactgatgtgatttttctttgttattcctcaaaaatataatttttcaaccttcaattttaagttttttgatggatatgagcagcttttgtcaaatctattaaataaaaagacgtgtgccacaaattatccacatcagcaataagtttttttttaaaacaacatatatatggaaaaataatagctgtaaaatatttatttcccatttaggttaaaaaagtagaaatataattggagataagagacgaaacagctcacagcaaactaatcagtaattagggttatagctttttaaagatttgtttccttttatttcatttttcaaagacaaaagtcggtttgagttaaccacacgcgcttatctaacggttcagatataccaatcatatccatctcgagaaaatcgagaccgtccaaaaattgtgttgattttttaaactttaattttgtttcctctttcgttttcgttcttatcctcaccgaaaaaatttccgttttttcttccttcttaaattccacaatatggacgctctcttccttcttcttcttcgtaaaactatccttctttttcttctctccttgttatgaaatctgagaaacccagaaacaatatttgatttcttcatttacccaattttaaagttttgatttttttttcttctcttcttcgttatgtcgccggaatcttggaaagaccagcttagtctggtttcggctgatgattatcggatcatgggtcgaaatcggatccccaatgccgtcacgaagctttccggtctcgaaaccgacgatcctaacggcggcgcgtgggttacgaaaccgaaacgaatcgtggtttcgaatcagcttcctcttcgtgctcacagagacatttcgtcgaacaagtggtgctttgaattcgacaatgacagtctttacttacaactcaaagatgggtttcctccggagacggaagtcgtctacgtcggatctttaaacgccgacgtcttaccttcagagcaagaggacgtctctcagttcttgcttgagaagtttcagtgtgttcctactttcttacctagtgacttgctcaacaagtattaccatggtttctgtaaacactatctctggcccatttttcactatcttcttcctatgacgcaagctcaaggctctctctttgatcgttcgaattggagagcgtacacgactgttaacaagatcttcgctgataagatcttcgaagtgctaaacccggatgatgattacgtctggattcatgattatcacctcatgattttgcccacttttttgaggaacaggtttcatcggataaagcttgggattttcctccatagtccctttccttcgtcggagatttaccgtactcttcctgtgagagacgagattctcaaagggtttctgaattgcgatttggttggtttccacacgtttgattacgctaggcatttcttgtcttgttgtagtaggatgcttggtcttgattacgaatctaaaagaggctacattggtcttgaatattttggaagaacggtgagcatcaagatattgcccgttgggattcatatggggcagattgaatcgataaaggcttcggagaaaactgcagagaaagtgaagagattgagagaaaggttcaaggggaacattgtgatgttaggtgtggatgatttggatatgttcaaaggtattagcttgaagttttgggcgatgggtcagcttcttgaacagaacgaagagcttcgtgggaaagtggttctcgtgcagattactaatcctgctcgtagttcaggtaaggatgttcaagatgtagagaaacagataaatttgattgctgatgagatcaattctaaatttgggagacctggtggttataagcctattgtgtttatcaatggacctgttagtactttggataaagttgcttattacgcgatctcggagtgtgttgtcgtgaatgctgtgagagatgggatgaatttggtgccttataagtacacagtgactcggcaagggagccctgctttggatgcagctttaggttttggggaggatgatgttaggaagagtgtgattattgtttctgagttcatcggttgttctccatctctgagtggtgcgatccgtgttaatccgtggaacatcgatgcagtcactaacgccatgagctctgcaatgacgatgtccgacaaagagaaaaatctgcgccaccagaagcatcataagtacataagctctcacaatgttgcctattgggcgcggagttatgaccaagatcttcaaagggcgtgcaaagatcattacaacaagagattctggggagtcggattcggtctttttttcaaggttgttgcgttagatccgaatttcagaaggctctgtggtgaaaccatagtccccgcgtataggagatcaagcagtaggttgatcctattggactatgatgggacaatgatggatcaggatactctggataaaaggccaagtgatgatcttatctcgcttctcaatcgcttatgtgacgaccccagcaatctagtctttattgttagtggtcgaggtaaggaccctctcagcaaatggtttgactcttgcccaaatcttggtatctcagctgaacatggttatttcactaggtactttgctaaaacccttccctttcatcatcttccctctcatttttgtaaagttaatacttttctccttttgatttgtaatcacagatggaactcaaattccccttgggaaacaagtgaattgcctgcggatttaagctggaagaaaatagctaaaccagtgatgaatcactatatggaagcgactgatggatcattcatagaggagaaagagagtgctatggtgtggcaccaccaagaagctgaccattcatttggttcttggcaagctaaggagcttcttgatcatctagagagtgttctcaccaatgagcctgttgttgtcaagagaggccagcacatagtagaagttaaacctcaggtgtatatacaaactactatgagatttacttgctcgaatttgccattattatcatcattgtaatgtgaatttgattttcagggagtaagcaaaggaaaggtggtggagcatttgatagcaacgatgaggaacaccaaagggaagagaccggactttttgttgtgcataggtgatgaccggtctgatgaagacatgtttgatagcatagtgaagcaccaagatgtttcctctattggtctcgaagaggtctttgcgtgcacagttggtcagaaaccgagcaaggccaagtactatctcgatgataccccaagtgttatcaagatgcttgaatggttggcctcagcttcagatggatcaaagcatgagcaacagaagaaacagagcaagttcacttttcaacagcctatgggacaatgtcgaaagaaagcatagatctttgaaagggtttgcgttagattttatgttgttgtgatattaaaagattataggatttgaaggttttaggttacctgaaaggtttctaggtttgctatatatgccttttgtacagagtatcttgaactggtcaattcggttactttgcccccatgtgagatgcttatacatagaaaaggaaatagatataatatgatgaattcatttcaattttgttttcttgtcgaagagagctcttcttctgattgaaaattgggaaagacaatttgttctgatgaattatatactaggtttcactttcctttggcaagctcatgacaaaagtgcattatatactaatcaaagtttaaaacatttgttacaatctatgacaagagaacacagtaacttggtttgatgggtattatatgtaaaacagaaggtccagttcatggatcatacttgtcaagctcgtaaaactcaatgttcttgtacttttgcgagattatctctgcttgaacctttcttgcagtatctgtcgcacacccgacaaggatcagaacagaagtgcctgcaaatcctctgaatgctgtcaagtgagtgatctgttcgactacagcaggaccagcagctagaacagccagaaatgcagaaccaagaaccgatatccggccaaggacctgatattgcaatcagagcgagacattttcagatagttgttagatgataaaccaaaatgggaagtttgtaaaaattgatcaaggagagagggagaaaagatcttacggttttgatgaagagagcagtgcttttaccaggtcggactagagggattgatgcaccttggcgttttaattgttcactcacgtcgtccgggtcaagttgcaagaaagtgtagtagtagttgaagaaagctatgagaagtatattggttggaagatagaaagaacctgcaatagtttgtttgtgaagtcatcaacaaaaaacagtttcaaaggacccaatcttcttacttgctgtgtattaggagaacttacctccaggggttaaagcaaaagcaacattcttcaaagcagatatgccggtaaatcgtgctaaagtagcaggaagagcaagagatgatgtggagaatatgataggcattactcccgcactattgaccttgaatggaagataagcagatttctgaagcccaccagctttgctggtgtatcgcgaggcataattgagcggaattttcctctctgcttcctgaaaaactttgcttgttagactatataagcataccaaacttcttagattcattaaaaggaacaaaatttggtatagtacctgaacatatactatcccgagtaccaagaggagaaatgaaacaacgatggttccaagaccagtatagtttccttcctgtaaggcctctgctgttgttctaccgaatgatgcaggcaagtaagagatgatacttgtgaaaatcaatagggaagtgccatttccaagtttcagatcagagattctctctccaatatatgtagtgagaacagaaccaagcgttaacaacgtaacagaagaaacaacccattccgtgctgaagtcattaacgtaaggacgaaggtaaaacacttgtccgattgcttgtactatcgcaaaaccaactgaagcatatctagtatactgaagaatcttttttctaccagcttcaccttcttttttctgaagatcttgcaactttggatagacttgagcaagaagctgaaacacaatctgagcgttgatgaaaggaacaatcccgagagaacatataccaagtctacctatgcctccaccagaaaatgtatccaaagtgctcaaaatgctattctgatccaaatttccaacaaaagcttctcgattaaccccgccgagtggtatgtaaattccaagccgagagagagctaaaaacccaagaagcttcagaaacttccctggcaatggccctttgaagaaatctccaaaatcaatggaactgtcctcaatagcagctgaagttttcaaagagtaaagcaaccatcatcaatcatgctaaaacatacaataagcaaatgtagataagccaaaacgaacctgccacgcctctaccagaagacggcttatctcgcctgttaccggaagagctttcaaatgatggtgacaaaagactcacaaagctttcccaaatgctacttaaaccagaagtttcatctggattgatccccaacggatcaaaaaccgaagcctcagagctgaaacatcaactccaatcaacaaacaatgcagcagtaagtgacaaaacatcagcatttctacgaactagtgatgaaataaccctcaaatctccacaattcaagagaaattcacatgaaaagtttcgaactttaagtcgcaatatctataacaagatcattatcttcgatttcaaatggaacccatctgaaatctgaaagaagaagtaccttctagagttgataacaagaccgagattccatgatttggctttacaagtgttcctcctggtctttgtcgaaacagagaagaagcttcctttgtaaagagaagagcttcgcaatctcgaagatgatttgtgattgagacgagacagagacgcgaagtttgaagaagaagaagagtaagaggaaacttcgcttaccgttatcatccttatccttcttctccttctccacaacaacgacgatttcttcttttccttttcactttttttttttttcttacggaatccagctaatgggccaggccttttaggcccaatacatcttttgcacattattaatctttgttgttttgggcgttaggaatgagaccatgacttcaagtctttctttctgtttcttcaagacttcaagtttcaagtttcaacaatcacaaattatatctttctctcaaatgaactatgtaggataattagttaattaagctgtaacatccatagactataaaacttttaataacaaatcaagatgatgcaattgatcaaactctagttagacttcacacaaaaagcataagcacatagaagtttagttatctcctttggtgacagattaggaatactctgaagatataatgagactacaagtttggtatatgtgaatgcatcaaatataatcatgccaaagaaggaggagaagggataaaaatggtggttccagcctcaatctgaccgcgaccgatcaaacgccaatgcctatccacacggcgacttatagccactttctctccaatgctggtgcacacagggagtgtcagattaactttcaccatatctttctttactccaataaccatagctcccgtagacatcgatccgatattcaacatcagtatctctcccttgactagctttgacactctcatttgcctctctgtttcctttgtcttcactccaatgagacgtgtcagaagctggaaactcacttcaagttcaacatagacatcagggagagtacctatttcaccaaggacttgaccaactaacctatcaccacgcgtaagcgtaggatccatgcttgtcccaattccaatcaaacctcccgggacagcaaactgaagctcgttctgttccgcgtacaatgaagttatacgcgtgtaaatgggagtgcatttagtgtctccattctcatcttttctagtgattccaggtcttatctctattatatgccccaccttcaaaacaccctgcaaacaaagcaaagagagacataagttacattgattcaaccgcgatttatcctagtttttcggggtattgagtatgttttacctgaaggatactcccacctgcaactccacctttcataccatcataatcagagccaggtttattgacatcaaaagaacgaatcacaatcattcttggaggtgacacaaaatccctcacagggagtggaatcttcttgacaatgtactcacacaaaacatcgatgttgtatttcagttgcgctgagacaggaactataggagcaccttccgcattcgtgttctgtaataacaagtttaaaacttaaccaactaatcaagaagtgaaaaatgcaaaaaaaaaacagaatgggaaaattgaatcaaaccgttataaatctctggatgtcctcgtgctgtttaatagcctcgttttcttggatgagatcaatcttgttctgaatgattatgatatctttaagatgcatcatatcaacagaagcaagatgttcagctgtttgtggttgtggacatgtctcattcgcagcaatgattagtaaagcaccatccataatcgctgctccattcagcattgtcgccattaggatatcgtgtccctaatcaacacacaaaacacctcattaacatatagaaaatggttacaaaagatttagaaatagtgttaaaactcattttataccgggcaatcaacaaatgagacatgtcttagtagtttcatcttgtacttctcatgtccagagacatcacaacttgggttgtcttctttgccactcccgaaagacctataattaacacatatcataagttgctacgtacactacgtaaccttattgtagcaaaagaagagcaagaattcacttgtaggctactggtctagggcatttttcacatttgtaaatctttgcgtttgcgtaaccaagtttaatggtaatgttacgctccaattcactcttgaatttgacagtgtgcacaccggaaacggctttcacgattgtcgatttcccgtgagcgacatggccaatggttcctgagatatagagagcatagtcatatctttagctttcaatgcacggctgatcagtttcttcagcatcaaaactcaatgaaacaaaaacttgtgtatacctatgttaatggtggcttgacgagagatgacctcaggagagagaggatgcagctgagctacatcaagtttacttagatcttgttcagctaagcccttgttcttcgacattacgacagatttcatcttaaacactctgttgcaatcaatcaaagttcacaactttagaacaacgttgatcagagccaatacaataacactagaagtttcgaaaggctgttcagaaactagggtttttatgcaagatggatgggttccgttcacaatagttacgattcgattaaattcaattagggttgctaatctatttcactgaagttcttataaaaatgatttacacaaacctgaagtacggtaagaggtagatgaagaagtttgctcgcagagatttcagaggagaaagcgtgccgttgaaggtttgtgtttttggttttgataaagtcaggtggcgtgtaaggtatatttataggtagggttttatcttaacgtttactgtttgtctttttcgccaacttcatttttccatgtgtcaataaaacatgtcttacaatttttattttataattgtcggtttcttacccgaaatgtttttttataggaaaatttgtgttaggtaattttgcaatttcatttacaaaatatagcacgctccttttgagatgggctaaaatcgttccaaagtttgggcttacacgcctaaccattggcccactccagtttacttctatctttcaccaaactaagaaacattgatccttgaacaaaaagtagtatatgtttatatgatgacaaaaaaaaaagagtaggaaatctatgattctataggagtgtaaatgaataagctgtgataaatttaggttatttttcttaacgatatatattgttagatcaaattttatagttacatcatttggagtataatgtaaatatgttccgctttataataatgtaaatatgatttgtaatactaatgagaacacacgctcattgtcttccagttcaagaaatatcttaaaccccactttttatcagccacctgaatttgagtcttcctctgccacataataaattgtttacatggaccaattcttggttacaaaacatctgatatcatatcgtgcaattaagaaggtattaaatgatgtttttttctgtggcatttgtatatactttcaagtttcgaccaattctataagttaagaaaaaggcattgagggaaatttaggttagaaaaagtacacaacgatcccagcaatgggaagtagctatcactttcagtgaccctatttctctgagtgggcaataacattgtaggccccattctgtggaaaatccactaacttcaatgtctgctctcattttctattgtctccttcgctgtttttttacaatttacgttaccaccaaaactattcctttgtttaatgacgaaaacgccactctttctaagcaaaatgtcagagaattttgtttctttgttggagagttgaaaatattttttacatagaaaaagaaaccaataatgcagtcaaataataataggaagcaaataataatgcaagtatctctaattctctatatcaaattgtattcaatcatattcaccagatgtaacctctataatggaacctttttgaatattaaaatatcattagatcctattcttacaatgtatcaatcaattactaattaattttctctggttttcttgatataacaataacgttaaaaaatctcattgttaatctctttatgccatcattagtattgtaagattttgtacactttaaattgtaaatttgatcttacagaaacaaaagatctacaaatcttagttacagaagataatggtattaaactatacaaatcttagtagtttaatattattaataatcaaaattattctaaattagaacttttacaaaataaacatttatcagtcgctttcataaatgtcaaacaataaaaaaagaaaaagaatcaaagatctaaagagtggcatttttatgacgtcacattgaaatccaaccgtgtaaattctttttttttcaatataagcaaattaattcacacgttttgtgcgctgtcttcgaaactaaatcatttataaaaaagacaaaacagacaagaaaatacaaactgtcaaaagaagattttatattggttgatttgaaatctctcagcaaagaagaagaagaaagattaaaaaaaaacaatcctttattatttttcatttcaactccaattttgattatctgggtttcgaatattcctcattttctccaatcacaggacgaaaagtaatcatctttttgtcttttcttctccggcgagagactacaatggactctccggtatcaaaaaccgatgcatcgaaagagaaattcgtggcttcacgaccatcaacggctgattcaaagacgatgagaggttgtggactcgcgaatctggcatgggttggtgtagataaagtagagcttcgtcagaggttgatgatgcctgagtatcttcgtctcgctatgcgtgactgtatcaaacgcaaagattcctcggctattcctgatcatttacttcttcctggtggtgctgttgctgatatggctcctcatgctcctatggttgttttcattaaccccaattctggtggtcgtcatggtcctgttcttaaagagaggcttcaacagttgatgagcgaggaacaggttttgctctcactgaacttgtatttcaaatctttttctttgggtttttgggggaatttcgaatctaatttgtatctactttgtgttttgattatgttagtttggaaactttcttaaagtctctggcttttaagtttttaatgcttgatttatatgtttatgcttagctgatgttagatctagtgttttgttggaactttgaaggatgagttacgtttaaagattgagtcttttggaaagctgagtgatgttgatgttgtcaagttattggtttgagcttttgatattgaaacttcatggtgacttttgtgttgatacaggtgtttgacctcacggaagtgaagccgcatgagtttgttcgatacgggttggggtgtttggagaaagtggcagcggaaggagatgaatgtgcaaaagaatgcagagcaaggttgaggattatggtgagtgtattgaccatatttttctccaatctctatagatccacttgaatgtttttagcaatcagaattgtgaatggaattggttggataggttgcaggaggtgatggtactgttggttgggttcttggatgtcttggagagcttaataaagatggaaagtcgcaaattcctcctgttggagttattcctctcggtacagggaatgatctttcaaggagttttggttgggtgagttgtgttttctttgttctctcttatgttgtcgtgacaaaacttttgaattggtactgactatggtatctcttcttcagggtggttcgtttccttttgcgtggagatctgctgttaaaagaacactccatcgcgcaagtatgggtccagttgctagacttgacaggtaaaagtcttattttgctcaaaacatttagcttttattgtatttctcttgttgtaaaaatgtatgcgctttggttatgtggtgttgcagctggaagattttagtgtcaatgccatctggagaagtcgtagatcctccttattctttaaaacccgctgaagaaaacgaacttgatcaggttttgctctatttcattaggcttgcttcttctcattgaatcatcagcatgtgattttgtaaattgccacggtttagtaattaaccaggctttatggtggtttcagggtttggacgcgggaattgatgcgcctccacttgcaaaggcttatgaaggtgttttctacaattacttaagcataggtttgttgaacttctctttttgatatcctaaacaattttcacaattgtttttctgaccagattcttgtgtttgtctggtttgtttaggtatggatgctcaagttgcatatggcttccaccatcttcgcaacactaaaccatatcttgctcaaggccctatttcaaataaggtttgtttattatatttgcacctaaactttggactcattatttgtctttgttaaaagctaaagtagttatgttggttttgagaaacgacattaccaaccacacaatgtttgcttttgcagattatatattcaagttttggttgcagtcagggttggttttgcacgccttgtgtcaacgatccaggtttaaggttcgccatttcgactcttattgtgtagttgaacttgtgtgtaagtctctgcttaagccctttgttgtgttgttgaccccttgtttgtgctatatgaatttgcaggggacttaggaacataatgaaaattcacatcaaaaaggttaactgctctcagtgggaagagatcgcagtcccgaaaaagtaaaaaacagttttcgatatatgatttatgtattacaatctttgatatcaatgcttaaaacctgatgctatggatttctcttgtagtgtgagatcaattgtcgcattgaatcttcacagctatggaagtggaagccatccttggggcaatctaaaaccggactatctagagaaggtattgtttctgttccatttcatcatatatgaactcagttctctgatgttaacccgaatgttttctttggtttttctcagagaggctttgtggaagcacattgtgatgatggtttgatagagattttcggttttaagcaaggatggcacgcgtcatttgtcatggctgagctcatctctgccaagcacatagctcaggtaacttcaaaagacactggtcaatgtataatctttttagccatgtgtttgactgtttcattttggtgatcatttcaggctgctgcggtaagatttgagctaagaggaggtgactggagagacgcattcttgcaaatggatggtgagccatggaagcaaccaatgagcactgagtactcaacatttgtggagatcaagaaggttccttatcaatctctgatgataaataatgaatgattgagattcaaagctggattctttgtacaaagctaattgttttgtatttggatttgattcagttagtcatagatatagcctaagctttttagtcttcttttcttttaaatctgagattgtgaccatttttctctttttaatttctgcttattgttggttttgtacatttttgtgttgtgaggaatgaagtttgtttatttataagaatgtgggaagataatatttggtcaaatttcaatctctcttcaatctttgtaattctagcattgagcacatagatgtgattctttgtcatatttttatttattttaacactagttcgactgagaaccaatttatcatcgacaccaatttctaagtaagaatatttttaataattatcattattagtcgtatatttttaccagaataataaaaaattaaaaacctaagttaataaaccacacaaaaaagtttttctctcttcgctctctcgtagtttgtaaagatagaaactgaaatttcttttgtttttgttaaccggatagttttccggtgagtcgccgtcccgtttaattcgggctttcgtccgacatcttctagctacgttagtggagatggttggctttttgtatggcatcgttggctaacttagcgacgttggccagcttccgtacggcagcgttgggcttacactaacagcgttggtcatctttgtttttgttttgttacttcaaaggtttgatgatgaagctttatggcatgcagaatcgtcagatctgaagagggtttctctttacaagatctattctccttctgttttgtttagcttcactattgggttatgcttttggctctggtagtttttcggcgatgtgtgcgtttccagcaattaccctcgtttggatctaccatatttaagacagtttcaattttattttcgcctaagattgggttaaagcttctatcctatgcaaatttgatatgcctttagtgcttttgcaagagagttcgaagattcaatggttggacaagtttgaactactcaatttttttaatttctttacccgttttgatgaattatttgtgattctagcaaccatatgagattaggaaattgatgtttgttctataacatctaattgccataatcggtgatagaaaaaaagagtttcattgctcggtgctttcccggcgatggttctccgattcaccagacttgagtctcatccggtggaggttgtggaagattcacgtgtccttagcttattattattggtctgacacgtcttaagcttatctcttttttgtgacgtaaaagtctgttgtggacctcatatgtagactgtcttgagccttttatgttgtaacactgagcctcagtatattaaaaataaatctttctctgaaaaaaaaaaaaaaaaagttaaaaacctacgctaaaaaattctaggtcttggaaaagagtatttgggccaaatgatcacattaattagttatgggctgaaataacattctgaagttttatgaggaccgagagaactaagtttaagaaaaatgttgaaaaaagcgtattagcagagggacaaacgctttttagggttttagatttcctctgagagagaattttcgaaagcttgagagagatttccaactacgttagccatggcgagcaccaaagttcaaaggattatgacccaacctatcgtacgtttcttcttcgattcctttgttccatctctttattgtttctatcgaaacctaattttgtatcttgctttttgttttccggtggcggcggctccagaacttgatttttaggtttcttcaaagtgtaagttgttcaatttcttctgatttgctctctgaggttttaggttattagtagttcgtctactgatttgttccctggtcttttgtgtttgtgatgcagaaagctaggatccagatttggctatttgagcagaaagatttgaggattgaaggaagaatcactgtaagttgatgttgaagctccgttatcatgaattgattagattcctggctttgtttataggacattcgagggttatgctaactttaggagagtttgaaatgcattagcagtgtgactatctctctaatttagtctgtgtttgaactgttgcatttgttgtgaattgaaaagggatagttgtcactgttactactactgcacaaagaactgataagagcctgccaatagaaactagtttgattagctagctgttcttaggttgagtatgattgtgtcattctcttcggcttaaaacttattgtctcctacagcctacttggctttgggtgttacttgtttcagtttgttgctatgcttgtagttgtatgtcctctatgattttcgagttatgattcaagcattcaagcttttcttagtttgattctatgataatttggagaaacttgagattttgtgatggtgtcattctcattggcttaaaggtttgagttgtctacttgacttttgttgttccatgttgcagtctacttgacttttgttgttcctcgagttaagatcctagcttttctgaggttgattatatgtatggaggaacatgatatttgtgatagtgtcactctactcggttttaaacttagatttttgtctacttgaatttgggtgtattattgattcttctaggagaatccatcaaaccttgcttatccgtcgtcctttgcagggttttgacgaatacatgaatctagttttggatgaggctgaagaagtgagcatcaagaagaacaccaggaaaccacttggtgagttatcctgaactcactctttgataacaagtctcagatctgtctgcttatggtttgataactcgtgttaatacctattttcaggaaggattttactcaaaggagacaacataactctgatgatgaacacgtaagtaacacaatctctactctgtcttctctctttatgatgtatagcagcttgatttgtcacataacaaaagattgaaacaaaatcctttctatgttaacaggggaaagtgatgtctgtctcaaacaactctcttcgatgaccttcaagcttatgttaaatatctgttgagttcttcctcagcttaattggtacttgacgataccttcttttcttcaatgtcgtataatatattgcaatgtagtgagtgacaaaggagcttgatcgaatctagtggattggttggttaaaacttcaaaaaagagatttggtcccttttggttaaatctagtgttatgtaatttggctgatctttgttgcaactttttaacctctgtttaaatttcaaaccttaaaaaagtaaaaccaattgattttgattataaaaaaaattgtatcatttttgtttgtttggtgaactgaccgagttggccattctcagggctcaagtagattgaaagtttaattatactaatagaccaatcagaatataatctgttaaagttaacataaaaatacagaaatctatgtgaacattaacttttcattgcaattagatgtttttatatccatgttgattgttgaatcttatccctaatcttgctattggtgaaatgaatgtatttttactattaaagtctttttttaataacaaataattggactttatacaacaaagtattattatttaattatcaactttagaatatagcatgtgccaaaaatacatacactagccgccggcccaagaatgtcgtccaataaacgaaaagcaaaagtgacggcaatccaagcctactgtgatcttgtccgcacccgataactatctttaattactaaaactagtcaaagtactcgactaatcacaaaactagacaagtgtttcaagtaaattaatttttgatcttttcattttatctctctctctttttcttctatccaaaacaccatttttgaggtatttttctctctccttcgaatcgaattttcaggtttctctttccgtttgtttgaagaagcttttaagtagaattcataaaatcttgcttagcttctgggtttgatttgtttgtggtaaagttttgattttttttttagtttgagagctggatttgtgattctttctctgggttggtgaagttttttacttgcttcgatcttatagatcagagcttctagcagcgtaaaaaatgcagacgaggtatatggagaggactaatagtatgagagagaagagaaaattggaggaagatgataatcagcagcagcagcaacagcctgagcgtaaaaggccagctcttgcaaggtaatttgtgttgatgcttgtaatttttctgattattgattatggcgttgttgaatctgtaattgatttgtagttgtatgaatgaaaaaagggttgttatgtatattgattgtctgtggatttgagaaagttgtgtatgtgttattgcagtgtaattgtggaagccttgaagatggatagtttacagaggctttgttcttctttggaaccgattcttcgccgagtggttagcttaataagaattgtttacatgtcttttggtgctttgtgttgtttctttggcttactgatttgttttgtgagcattgtcaaacaggtaagtgaagaggtggagcgggcattggcaaagcttggccctgcaagacttagtgaaaggtaacatatgactgttttaaaaagagataaaattaatggttggagtatttgtggttttcttctaatgcttgagttcacaggtcgtctccaaaacgaattgaaggtatcggtggaaggaatttgcagctacaattcaggtctagattgtctgttcctttgtttactggagggaagatagaaggggagcaaggtgctgcaatccatgttgtactgttggatatgacaactggacatgttttgacagtaggacctgaagcttctgcaaagcttgatgttgttgtgcttgatggtgattttaacactgaagatgatgatggttggagtggagaagagtttgagggtcatttggtgaaagaacgtcaagggaagaggcctctcttgactggtgatgtgcaggtcacgttgaaagaaggtgtgggaacattaggggaacttatctttacggacaactcaagttggattagatgcagaaaattcaggctgggtttaagggtctcttcgggttactgtgagggaatgcgtgtacgcgaggcaaaaacagaagcttttaccgtgaaggaccatcgtggagagtgtaagttcttgctttcctttgatattagtcattgatgtatctgaatctttgtttttcttttgcctaatgtttttttttcctacagtgtacaagaaacattacccacctgctttggatgatgaggtctggaggttggaaaagattggaaaggacggggctttccataagaaactcaataaagcaggaatctacaatgttaaagaattcctgcgtcttatggtcaaagactctcagaaactaaggactgtgagtgcacgatttaactatccagtatcttaccaagatgttcaaatattattattcatcatgatgactcttactctgattttcagattcttggaagtggcatgtcaaacaggatgtgggagacacttgcagagcattccaagacatgtgtattgagtgaaatgctttacgtctactatcccgaggactcagttggtgttgttttcaacaatatatacgagtttagtggtcttatatcaggaaagcagtattatcctgctgattctctttctgacaatcaaaaggtatgtttgttgggtcttcttgcttcttatagatacagatttgattcttctatcatatactcggaaaatagtaaaaggttatatatatgatgcagggttacgtcgatggactggtgaggaaagcctatgaaaactgggaacaggttattgagtatgacagcaagtcacttatgaacttcaatcaagttagcaaaacagatgatattgattactctatgccagtttcagttccaagccaaccatctacatcttattcagacgtaactgttgaaggtagaggttcagtccacaaatgtcgaatctttttaagttttggtgtgaaccgaatttaacagtcattcattgggtttttcagcatacaaccagagtccggcttcaagtttcccgggtcaatctcagctagctgatactacatacatgcactttggaaactcttcatttgcaccgcaagaccagctagttaacaacactcatgaatcacaaagcatgatcaatagcaacggtggtgtgagattggcactgggtccagcaacaggatctcaaaaccaagaacaacttgttcatcctcctcctgagattaactcttacaatgattggtcaaatacatgcaacagaggagttgatgggtttttatcagaggaagagattagggctagaagtaacgaaatgctcgagaacgacgatatgcagcaactgttgagactgtttagcatgaatggtggtgaccagcaaactccattgaacatgggagaagatagttttgggttccattcttttggtcagacgtcaatggctgattacgaagaagaccgttcaaactcgggcaaggctgttgtaggatggctaaagatcaaagcagccatgagatggggcttcttcatcagaaggaaagctgctcagagacgggctcagattgttcaacttgatgaagatgacgaataggttgaagaagaaggaagaaacagagaatctgagggttttcattgtgatgatgggtttttaacagtttcccagaaaaagaagtcttttgttttggtttcttcttctcgtggagctttgtatttcttgtacagggagctttcttcttctcttcttgtttgtttgtgcgtattatatgtaatcgctctacttgactagttttcatgaacccagaaacctgatgtagtttctattgcataatgtcttttatgttgtgttcctttgggttttgttattttttgggtatgtttgataatacacttgtttagaaatatttagtatttaattaataaattggtaaaatagaaatacactatttcttttaattttaaaaagcgtatatataaattaaaagaacctatttctctaatcttccacaacaattctttcatctttgacgaaaccagtttcgcccatcgccgagcagtgagttttaaaatttctgacctaaaaattctcatggggttttatgattcctagtcgattttatctggaattcgtaagcatcttgagattttctccgtcaatcaagagaaaacaatgtttgaaataggaaaaattgaacttatttcgcgaatttattttgagaattctaggaatatacaagtccttacgattgcatacaatctgttcgacgaaattcttaaaagagatgtatcgtttgttgtttgaaggagaaggaagattttgaagattctggcggagctgtggaattgaaattattcaacaaacaccaccgactcagcttgattcaatggaggaagacgaggatcagtttttgttgagtagcttaggtgtgacatcggccaatcctgaagatctagaacagaagatactcgatgaggtaaatatttgctcattcgtttggtattagtgctgcattgttgattctatgaaagggttagtaatttatgaaaactagcttgaactctaaatgtgtttatctctttgtcaggcgacgaagaaaccagacaacgatgagggtgggagtgtggaggagaagtctacacagcttgaaggaaccaatctgctttcatctagccaaaacgagcttttgaataaattgagggctgtaaagtttgaaatagatgctgttgcatcaactgttgagaacgtcgacgagattgcagcagaaaagggcttaaagaaagatgatgaatcagatttacaagggttgcatagtggttctgctcttcagcatgcccttgccacagaccggctaagaagtcttaagaagagaaaaattcaacttgaaaaggaacttactggtcttcatggtcagagtgcgtctagtagtgctgatcacggtaatctactgcgagatttggtgaaggagaagcctagtcttaagagaaaattgaaagagattcggaaaccaagcagaagagatgggaagaaggtgaaagtagtctcctttcgtgaggacacagattttgatgctgtttttgatggagcttcagctggttttgttgaaacggtacgtccagttatcttctaaaggttttatatatttgacctgattcctgtgggattatgctctttatctgtgggtatgtaaaatgcatatatgaaagacagtgactaatttcaagggtgttcttgtctaggaaagagatgaactggtgagaaaaggaattttaactccatttcacaagctcgatggttttgaacgccgacttcaacaacctggaccgtcaaactcacgcaacctacctgaaggagacgacgaaaatgaggactccagcattattgatagagctgtccaatctatgtcgctggctgcaaaggctcgtcccacaaccaagctacttgatgcagaagacttgccaaagcttgaaccgcccactgctccttttagaaggctgagaaagctttacaagactcctaattctccggataatgaagcaaagaaacgtaaagctgggaagaagagcaaaaagacgcggcctttgcctgaaaagaaatggagaaagcgaatctctcgtgaagactctagtcttcaaggaagtggtatgactgatgctattgacaattatttgtatttacagattgctgtttgggccctttgattgaatttcatggctattaattggagcgaatgcttttgaaaagataaggctgtgatattggatcttcccgatgttgagatatcacatgttatcaatgcaatgcttttaagtgataagtctcaacagtttctaccaatgttaagcaaattcttttttttccctcacttgagtttatgtaaaccaacaagttatgatgttgattcttgttgcaatgtttcaggagatggaaggagaatcttgaccacttccagttgcgaggaagaagagctagatgattttgatgatgcagatgacaacgaaagatcttctgtacagcttgaaggtggattaaacattcctgaatgcatctttcgtaaactttttgactaccaaagagttggggtgcaatggctttgggaacttcattgccaaagggctggtggcattatcggggacgagatgggtcttggtaaaactatacaggtcttatcttttctcggatccttgcatttcagtaagatgtacaaaccgagtattatcatatgtcctgttacactcttgcgtcaatggagaagagaagcacagaaatggtacccagattttcacgtggaaatactccatgactcagcacaagattctgggcacggcaaaggtcaaggcaaggcctctgaaagtgattacgacagtgagagttccgttgatagtgatcatgagccaaagtctaagaacaccaagaagtgggattctttgttaaaccgggttctaaattctgagtcagggctcctcatcaccacatatgagcaattgaggttgcagggtgagaagctgctcaatattgagtggggttatgcagtactggacgaaggccatcggatccggaacccaaattctgacattactttggtgtgcaaacagttacagaccgtccatcgaattattatgactggggcaccaatccagaataaactaacagaactctggtccttgttcgattttgttttcccgggaaaactgggggtcctgcctgtgtttgaggcagaattttctgttcccataactgtgggtggttatgccaatgcttctcctttacaagtgtcgactgcctataggtaaattacctggtctttcttttgaatcacttagttaactcatcacagtttgtgctctaaagaattcttgacaatgtgcaggtgtgctgttgttctccgtgatttgattatgccgtacctcctccgccgtatgaaggccgatgtaaacgcacatcttacaaaaaagactgaacacgttctcttttgcagtctcactgtggagcagcgatctacctacagggcattccttgcaagctccgaagtagaacagatttttgatggcaacaggaattcgctttatgggattgatgtgatgcgtaagatatgcaaccaccctgatctacttgagagagaacattctcaccagaacccagattatggaaacccagaacgcagtgggaagatgaaggttgttgcagaagtgctcaaggtctggaaacagcaaggacaccgtgtacttctgttttcacagactcagcaaatgcttgacatcctcgagagcttcttggttgcaaatgagtatagttaccggaggatggatggtcttactccagtgaaacagagaatggctttaattgatgagtttaataattcagaagacatgtttgttttcgttctgacgacgaaggttggtggtttgggaacaaatttgactggtgcgaacagggtcattatctttgacccggattggaacccctcaaatgatatgcaggtacgttttactttgaatgtcacagattcagtgtgcaaaaaacccgtcgtggccataaataacaatcaattttctgcttttttgggcaggcaagggaacgtgcatggcgtattgggcagaagaaggatgttaccgtttacagattgatcactcgtggcacaattgaggagaaggtatatcatagacagatttataaacattttctcaccaataagatcttgaagaatccacaacagagaagattcttcaaagctcgggatatgaaagatcttttcatcctgaaagatgatggcgatagcaacgcctccacggaaacctctaacatcttcagtcagctggcggaagagataaacatcgtaggagttcaatcagataaaaaacctgaatccgatacacaacttgctcttcacaaaactgcagagggatcctcagagcaaacagatgtggaaatgactgataaaactggtgaagccatggatgaagagacaaatatcttaaagagtctctttgatgcgcatggaatacatgtaagtacattaataagtgctcattgaaggttcttctccgacttactttcccataatttccaattcccttcactctcttacaatttttaacacagagtgctgtgaatcacgacgccataatgaatgcaaacgacgaggaagagaagatgagacttgaacaccaagcatctcaagtggcacaaagagctgcggaagcattgcgccaatcacgaatgctgcgtagccgcgaaagcatctcagtgcctacatggacgggaagatctggttgtgcaggtgcaccatcatctgtacggaggagatttggatcaactgtcaattcccggttaacccagactggagacaaaccatcagcgattaagaatggaatcagtgcgggtctatcttcaggcaaagcaccatcttccgcagagcttctcaacagaatccgcggaagcagagaacaagccattggcgttgggcttgagcagccacagtcttcattcccttcttcttcgggttcaagcagcagagtaggttcgttgcagcccgaggtcctgatccgaaagatatgcagctttgtacagcaaaaaggtggaagtgcagacacgaccagcatcgtcaaccatttcagggacatagtttcttttaatgacaagcagttgtttaagaatctcttgaaagagattgccacgcttgagaaggatcaaaatagatcgttttgggtcctcaaatcagagtataaagactaaaaaggagatgttttggctgcctctactgttcaagtctgaagacggagaaggcaacattggctccacacatatttgccaagtattctctttttctttataagctcacgcacttcttaacctttttttttaccagcaaagtcacttacacttcaaagtctacttttttgttttgtttaacatgatgttaaataaaaaagtaggaaaatcttagtaaagagagcacaactatgaatcttttattgaccaactcgaaaggcagacaccagttaagtaacagtaaaacaaactctcaagtgtaaagactaaagataggttttcttgtgtttgaatgttggtgcaggcaggtcgagagaggttgggatcgacctaccgagtaacttatgaagaacttgaatcaaacggctgatgtagattactcttatttggaagccgtattgagacgaagtggttgaaggtagagttttcatcagctacaatctctcaattcttttactcctggtggacggtgaaccaaattaacactcagactcagtcattgtgggttttcagcgaccagagtgtcagtctcagcttgcttggaaaacacttggtttcgctccgcaagaccagctaattagcaattttcatgagtcatgactccacaaagcatgatcaaaatagcaattgtggtgtgattcacaattgctaacatccctaggtgtgaatattgattcagcctgctcctgagattttaactcttgtaatgattgctcaaacacaagcaacagaggaagttatgagagctagaaagtaactcttgtaatcttgttttaaaacttctaaaaaatgtatatttgtcaatatattaatgtttggacccaaaaaaaaagtcaatattgttgtttttgttaactttgatattactgaaatttcttgtacgaattaaatcgaattagtgtgattacaagtaatcaatcgaattactgtaaatctgaaccaatcgatttcggttcaagttggtaggtataaattaccaatttagaaccgtactcaattcaatgcgttgttgactcatcataacttattaacttgtgcatatctgacgaaaatacccttgtctaattccaaaatatacaagaaacccttatcagtcccaattctcacaaataacaacaacaatttcgccggcgtcgtcgtcgtcgtctctccatcaccgtctctgctgcattgattcgcagcactgagtcctaaatttccagtattcttctctaattctttcgctgtttcattgatctcaattttaaaattttctctttttttttttttttttgcattcgcattcgttttatgatcggtgactaatttcacttataggcatcaattctattcaattcctcttcttcgttttatgattgatggtttgatctccaatttgattgtatattgtctgatcttaatagtggtaaattgttatgttctcaaggtgtaaaaaaaatcagaaaatggacaacttggaagatttgaagattgtggcagagcagtggtctaaacaaggacttgaatttgttcaaaaaataccaccacctcagctttatactgccattggtgttctcttattagctaccatttggctcttatctagtaagtagtgaacaccacgacattcttcttctcattgatcttttccttatttggtattagattcattttaggatttggatgttactatggtggtaggtatagatttcctattgcattgtatgtcctctgttttggttgttaatgttgtcacttttgctgatttctgcagttcgtttgtttagacgtacaaaatccaatactgtactcctctctgggctaagtggaagtggcaaaacagttctcttctatcaagtgagtaattttagggtttaaggttcctttactcgtttgtagacaatgtattttagttatcagaaaagctgctaaaagaaactgagtaggtgaatgttgttgtgtcattatttataagatggtttggtttacgtttttttatgtatttgtgatagctacgagatggatcttcccatcagggtgctgtaacgtcaatggaaccgaacgaaggcacctttgtgcttcacaatgaaaacaacactaaggtaaagaaagatcttcactttggttttgttcaagaatgtaaagtttttaagggacttgaaagatattgcctctttgtttgatagaaaggaaaagtaaagcctgttcatcttattgatgttcctggacactctcggcttatatctaagctagaagaatacttgcctcgagccgccgctgttgtgtttgtagtagatgcattggagttcctcccaaatatccgggcagcttcagagtaattcattaccatataaaagatgatttgcttaggcataagtgattcttagagattgaagacttattaaacatggtttgtaattttacaggtacctttacgacattctgaccaatgctagcgttattaagaataagaccccggttctgctttgctgtaacaagacagataaagtaactgcacacaccaaagagttcatccgcaagcagatggagaaagaaatgtgagattgattcctagctgttttctaaattctgaagataaaaagaagctctgattgatactccttttgttaatgtgtgtgtgtgtgttttgcagagataaacttagggtttcgaggagcgcaatatcaacagctgatatagcgaatgacttcactcttgggattgaaggagaagtgttttccttttcgcattgccataacaaagtcacggtcgctgaggcgtctggactaacaggagaaacagatcaggtacaagagttcatcagagaacacgtaaagccatgaggattgtgtaagcatctcagagaatgtacttaaatgtcttttcatttgtttgtaaatgaaattataatttgagaacttagatgatattcgttggaaggatttttggatgttgaaaacgtgtttactgcatcgactggatcttttagcgtttcatccaagcaacctcactatcaataaattgtttacaaagacagtttatcatctgttgttgttggcgcttgattttgatccctgcttgttgaatcgaagtgctttcatttgattttagtagatgatctatccgtagaattacttgatttttttggattaatactaatagatttgcgattgtatttcagtttttccgatttatgtagcttagtacaggttaagagtagcaggttgatttgagtattttgttctgtaatcacatgatatcgatatttaacaaaacagtttgcttatagctttgtcctccttcaagaataaagtctgcgcacaacaccagagagagaagaaaatctacaagactaaggcacaaccaaaaatctactagacaaagacgttggattaggctgtattctgattgatttgcagagagctgggaatataagagcacccaagtggccaacaagttaggtgcctagaggtgcctagattcgccaagatcaactttcttgaagtagccctcctttccaatgatgtaagctatgttgcgagtcgggtcaaatccaccacctatgtttttatcaagaaccacagccatcttcttctcctcgtcaacaaagaaactcccacccgaataagagaaggaattaccagtgagaggtttcatgtcaacctttaagaacaacttgttccacgacactgcattgggctcaaccttgctgctaatccatatcttcaaggtatacggcgaagaagaccgctgacacaagaccgcaatctggttatccccaacgctagatagagccacagtatcaccaaagtaaggctgaaatggcagaggcagaggcggtctaaatctctccgttgtgaaatcaaaacacagcaagaaataagaaggatcttgtcctccatatggaacaaccttgtctcgtgcaaaccagtaactgtttccatcgatagacaaaccacggtgaacaaaatctatctcccaatccggattcacatcaagaacctcccatgaatcagactcaaaactgtagatttcaaactcacaaagtaagtgtctccttccatactcaccgtcatccacaaatctcaaaactttatgattcttcatcacatcgtagcccagagcatacctatcccatttgttgaaagagtttctgggtttgatccaaattgtttgcccaacacaagggttccaaacaacaaccctagatatgtctttagtggtgcataacaagaaaccctcgcagtgaaaaatgttagatatgtcgacttgtgcaccaccgtctaagctaacaagttgacctaaacgctctatgggattagggtttagtagattgagactgaataaagaaaccctaaaatcgagcatcatcacaacatgaaactccttactctgcttcttctttgcttcttctttatcgatgtgcttccttgtaaaagacatatctttggataaagtgttcaactttttgcatgtgaatcgtactcttctcagagatgtcactggaaacttcgagagcacctcctccgccacatcctttggaagatccgagagcatcgtcgttgattgtttttgcatatcgaagaaattttactttaccttttactctgatttcttcagagattatgagagaacgaacacttcagaaatgttagatgtttctaaattgggcttgggctttaaagtattacccaaaggctattaaagtcgttttttccaatttgggctcctgatttattagtatgggagggcttagttttgggctttaaagtatgccccaatgcctaataatgtctagctagttcttcgttatactaaagaacgaattttggaaattcttgaattacgattgtacccttatattaatttcatcttttgtcttattcttatttatgcaaaagttatgcaaaagttttaagaaattagcagccaagcctaaagaatcattgagagtttataagggtgatttggtaattgagtagtttattagctaatttgatttcagtggcacgtggtaaattactggtggtttaaaactattgtacgtggacgattcttagccaacgaactagtacactctagtgcgaacaggtacatgattaaattcgtggacatccaatcatatctcgtccaagataagaccaaaacatatgaggtcattactcactaataaacatttaaacttttgttttgtcaacgaatagtgtgtttttcttttgtcattccaatttttttctgttttcttttcactattcacttttggtccataatattttatgggtatataagataatcgtttttgtcttcatacatggtaacatggatgtttatatatgtaatagtgttaaaaagaaaaagtggtcggttatacttaacttattatgatagagctttgaaaacaaacaacacgagatggagaaattagtcattcaacaaaagaaaaggacgaacgcagtgacttaacatgaaactgtgagcggcccaaaatcatttatgtaatggacccttaacttttcatgcacacgatttttctcatttatatgtttttctgctctctttttttcctctttatcattactttaatttattttatgttcttttttcgaagcaccataattgtatgctttcaccaaataatccaaatttagaatcattaatatgtcaaaaaagaattgcatatattcaataaaacgtaatgctaagtagtacaatgcatgtattatacaaaatgtaatgatatagatccaacgtatatatcaaagtggaccaaaatatatcttatgtattagacgagtttactatgcaaaatttatgattctattccgcatggagcgtgctaatactacttcgaacccctttgagaccaatatgtgattctatattctatctagtacaaattatgagaagtatatacgtacgatgagagtataaaacatttcaatatttgtatagagaggacaccacttggttgacttgacccacgataagatattgaagaaaccaaacttgtatagtacgaattcgaaatcgtaattgatgatgcgattcgacaagtccaggggctccctcccacgcgcaatgggcccagcaaccacgtgtggccactagagagaataaaccattagcccacgtgatcttgggcccaatcaatctctccctcacattaaacgacaaaacaaaagctcttctgggttaaattgataaatatcaaaactttaaaggtaatttgctaaaatcgccacacaaaaaaagtcgcagaaaatatatgaggaaacaaaaagcgaagacgacaaaaaaaaaaaaaactctgatttttttttgttatctctctctatctgagaggcacacattttgcttcgtcttcttcaatttattttattggtttctccacttatctccgatctcaattctccccattttcttcttcctcaagttcaaaattcttgagaatttagctctaccagaattcgtctccgataactagtggatgatgattcaccctaaatccttccttgtctcaaggtaattctgagaaatttctcaaattcaaaatcaaacggcatggtttccggagtcgggggtagtggcggtggccgtggcggtggccgtggcggagaagaagaaccgtcgtcaagtcacactcctaataaccgaagaggaggagaacaagctcaatcgtcgggaacgaaatctctcagaccaagaagcaacactgaatcaatgagcaaagcaattcaacagtacaccgtcgacgcaagactccacgccgttttcgaacaatccggcgaatcagggaaatcattcgactactcacaatcactcaaaacgacgacgtacggttcctctgtacctgagcaacagatcacagcttatctctctcgaatccagcgaggtggttacattcagcctttcggatgtatgatcgccgtcgatgaatccagtttccggatcatcggttacagtgaaaacgccagagaaatgttagggattatgcctcaatctgttcctactcttgagaaacctgagattctagctatgggaactgatgtgagatctttgttcacttcttcgagctcgattctactcgagcgtgctttcgttgctcgagagattaccttgttaaatccggtttggatccattccaagaatactggtaaaccgttttacgccattcttcataggattgatgttggtgttgttattgatttagagccagctagaactgaagatcctgcgctttctattgctggtgctgttcaatcgcagaaactcgcggttcgtgcgatttctcagttacaggctcttcctggtggagatattaagcttttgtgtgacactgtcgtggaaagtgtgagggacttgactggttatgatcgtgttatggtttataagtttcatgaagatgagcatggagaagttgtagctgagagtaaacgagatgatttagagccttatattggactgcattatcctgctactgatattcctcaagcgtcaaggttcttgtttaagcagaaccgtgtccgaatgatagtagattgcaatgccacacctgttcttgtggtccaggacgataggctaactcagtctatgtgcttggttggttctactcttagggctcctcatggttgtcactctcagtatatggctaacatgggatctattgcgtctttagcaatggcggttataatcaatggaaatgaagatgatgggagcaatgtagctagtggaagaagctcgatgaggctttggggtttggttgtttgccatcacacttcttctcgctgcataccgtttccgctaaggtatgcttgtgagtttttgatgcaggctttcggtttacagttaaacatggaattgcagttagctttgcaaatgtcagagaaacgcgttttgagaacgcagacactgttatgtgatatgcttctgcgtgactcgcctgctggaattgttacacagagtcccagtatcatggacttagtgaaatgtgacggtgcagcatttctttaccacgggaagtattacccgttgggtgttgctcctagtgaagttcagataaaagatgttgtggagtggttgcttgcgaatcatgcggattcaaccggattaagcactgatagtttaggcgatgcggggtatcccggtgcagctgcgttaggggatgctgtgtgcggtatggcagttgcatatatcacaaaaagagactttcttttttggtttcgatctcacactgcgaaagaaatcaaatggggaggcgctaagcatcatccggaggataaagatgatgggcaacgaatgcatcctcgttcgtcctttcaggcttttcttgaagttgttaagagccggagtcagccatgggaaactgcggaaatggatgcgattcactcgctccagcttattctgagagactcttttaaagaatctgaggcggctatgaactctaaagttgtggatggtgtggttcagccatgtagggatatggcgggggaacaggggattgatgagttaggtgcagttgcaagagagatggttaggctcattgagactgcaactgttcctatattcgctgtggatgccggaggctgcatcaatggatggaacgctaagattgcagagttgacaggtctctcagttgaagaagctatggggaagtctctggtttctgatttaatatacaaagagaatgaagcaactgtcaataagcttctttctcgtgctttgagaggtatattcagttcttcagctatgttgtatctgcggtgtatataccaattcgcgggtatttgattattttgttgcatttggcaatgcaggggacgaggaaaagaatgtggaggttaagctgaaaactttcagccccgaactacaagggaaagcagtttttgtggttgtgaatgcttgttccagcaaggactacttgaacaacattgtcggcgtttgttttgttggacaagacgttactagtcagaaaatcgtaatggataagttcatcaacatacaaggagattacaaggctattgtacatagcccaaaccctctaatcccgccaatttttgctgctgacgagaacacgtgctgcctggaatggaacatggcgatggaaaagcttacgggttggtctcgcagtgaagtgattgggaaaatgattgtcggggaagtgtttgggagctgttgcatgctaaagggtcctgatgctttaaccaagttcatgattgtattgcataatgcgattggtggccaagatacggataagttccctttcccattctttgaccgcaatgggaagtttgttcaggctctattgactgcaaacaagcgggttagcctcgagggaaaggttattggggctttctgtttcttgcaaatcccgagccctgagctgcagcaagctttagcagtccaacggaggcaggacacagagtgtttcacgaaggcaaaagagttggcttatatttgtcaggtgataaagaatcctttgagcggtatgcgtttcgcaaactcattgttggaggccacagacttgaacgaggaccagaagcagttacttgaaacaagtgtttcttgcgagaaacagatctcaaggatcgtcggggacatggatcttgaaagcattgaagacgggtgagtatagttagaatttatctagaagctagttttgcttacttcacaaaatgtgaccaaatcccaaattttgtttttttcattgatcagttcatttgtgctaaagagggaagagtttttccttggaagtgtcataaacgcgattgtaagtcaagcgatgttcttattaagggacagaggtcttcagctgatccgtgacattcccgaagagatcaaatcaatagaggtttttggagaccagataaggattcaacagctcctggctgagtttctgctgagtataatccggtatgcaccatctcaagagtgggtggagatccatttaagccaactttcaaagcaaatggctgatggattcgccgccatccgcacagaattcaggtacatttcattgttcccgctgttgtctccacatatccataaccaaaattatgcaatccggtttttttggttccttattttgtacataaagaaaatgaatttggtttggttaattacgaatttgatttaggcgtttaaagaatttgaggttttaaccaattcactatttgttttggttattgtttagttggaacctagattagtttgatttttgtattcggtttagtcgacttgggaacttttagacacatccataggcctagaattagcagtcaaggaatgtaatgttttcaaattgatgaaaaccagctcaaaagtgtaaaacttgggtttcatgtgttggtgtctttgttatgtctttattcgttgtttgcagaatggcgtgtccaggtgaaggtctgcctccagagctagtccgagacatgttccatagcagcaggtggacaagccctgaaggtttaggtctaagcgtatgtcgaaagattttaaagctaatgaacggtgaggttcaatacatccgagaatcagaacggtcctatttcctcatcattctggaactccctgtacctcgaaagcgaccattgtcaactgctagtggaagtggtgacatgatgctgatgatgccatattagtcacacttcagttggtatgagagtttgtatcattgtatgagtgtttgtgtgtctaacgacgtcggaggaggatagaaagttttttttttgtttccggtgagattagtagagaagagggagattatttgcgttcagctcagctcgccggaaaaaaaacgtaacagtagttgtagagaatttcaagacttttgtttgtgctgtgtaaattgacaactccgagagaaacaaaacaatgagataagaagagagcatattaatcgatgaccaatccttttaatttgttactcgttacatcaattcaaaattattatttgattgttaaccatttataaatcatattatatccaattagtctgtctacgcaatcaagaggtaaaggccaatcacattaattttaaaagatttatgatgaaatggtaccgtccaaaaagttgaaattttacaaactccactatatatataaaaagtgagatgtttaaattaggctggctaagcttaggatgtaacacattaacaatagttaatttaatgtttatgatgtatcgcactatagttttgatgtgtatgctctccaggctgtttcgtttttcacattacccacactaaactcaccttttttcttaaagaaaattaaagtaaagctcaaagactgaaatattaacaatatataactaatcattaaggaatcaaaactccattatatatgctctataaatactcaccaatcaatagccttctaaatgtctcaaacccaattcaaacccttaaacccacctaaaaccttcaaaacttataatggtttctagtacacttttggttatgtcaatatctctctttcttggtttaagcatattgcttgttgtacacggtaaagatttcaaccaagacattgacataacctggggtgatggtagaggaaatattttgaacaatggtactcttctaaatctcggtcttgatcaatcttcgggttcagggtttcaatcgaaagccgagtatttgtacggaaaagttgatatgcagatcaaacttgtcccgggaaattcagccgggaccgtgaccaccttctacgtaagcccttcttaattagctagacatacatataaatctgttacctaatgttatattgaatgatacattttgaggactttttggtgtgtagttgaagtctcaaggattaacatgggacgagatagatttcgagtttttggggaatgttagtggagatccatacattgttcacactaatgtttacactcaaggcaagggtgatagagagcaacaattctacctttggttcgatccaacagccgcgttccacaactactctattctatggaatccgagtcacatagtgtaagcatatataccacaatccaaatgatagttcaccaagtgatttttttagacatcgaactgaaagtgaaccggtttggtttttggattaatttgccaaatcaaaaatcttaaatcactagatccatgacgttaaatatatatttcatcttactataaattttgttgctacctttatatattttcaactcatttttaattatactatgaatgatatggttaataaatataagaggtgacaaaagctaatcacaacattataatatctcattgaacaatatcttggttcatatttttaatttcctaataggttctatattgatgggaagccaatcagagaattcaagaacttggaagtattgggtgtggcttatccaaagaaccaacccatgagaatgtatggaagtctatggaacgcagacgattgggccacgaggggagggctggtaaagacaaactggtcacagggaccattcgtagcctctttcatgaactacaactccgagaatgcttgtgtttggtccatcgttaatggaaccacaactacttctccttgtagccccggtgactcgacttcttcttcttcgagcagtactagcgagtggttttcgcagagagggatggattcttcaagcaagaaagttcttagatgggttcagaggaagttcatggtttacaattattgtaaggacaagaagcgattctctaatggtttgcctgttgaatgcactgctaagaacaagaacacaaagtcttgagttttttttttcttaagcatttaatgagttttagggtcttggtttatgttaagatcatttgttggggtttgttcattgtgtggtggtttacatgggatgggaaagtttttttggtggtaaaagaggaaaaactttgcggttgaattttcaaaactaagccaaagaaaaatggagataatgataacgaaaaaaagaagaagataatttgatccaaaaaattcacctttttaatcatcgtcgtagatgaaaaaaatatcttaaaacgtgtaatcaaataactaaaaaaaaaaatcatattaaatttgtttaaagaagggaaagtagccaataatttaccaagtccaaatgaataacacatgattttgataagagttgtaaacttaatgattcaagaagacattgttttttttgaatttttaaatctattaaaatttatgaactaataactattcctaattttttcgacatatgtcaaaatccagacaaatattagcatatatacatatctagaaataaaattgaaaaatatttagatatacacatgtctatgaaattaacacataagggaatgaggaattgtataagtgttacgtatgatgcattgatgcgagaatttctttttttatgtaatgaaaaagatcctttgtgaatatataatttataaatattattgtttagtactaaaatatagattttttcttaagatctatgaaccaataaatttctctacagttttttgacatgtcaaaatctaacaaatataaaccacaagcatataaaccaataaatctctctaaagtttttaagaccctcaaagaaaaagaaattaaaaaatagtcggattattagagatttcaagatgcacaactctagcaattgcatagaaatatattctgattctatggtgtcgtttgacttatattcttggacagttcctctgactaacagagattagtcacatagcacagctgttttggttggaatctctagttacaaccgaagatagaggtccagctctgtgacggagaccagtgagcctcctcctatttgcctcttgtacaacctcgccatgaacatattgagctatggaaaaagctagttgagtattcttcagagagatcagcagaggaacatggtttggcttcttatcgtgtctagctcataggtatgtcactgcagtctataccaaatcttaagttgtacatgaatatatctcacatgttccaactgtctgtttactacattctttttcgttatacatataattggtgacttccgatcttacgagtttatatgactttcgttatgtcattgactggtttgttccgatcttacgaggattacttatatgaaaaaaggcaagcgggaaagaaaacttgccaaaaacaaacatcatccgttcaaacaaaaaggaactatataaggaatgaaaatcagcacaagaacgttacactaacactcagaatattgagctaaaagaccaaaaaaaaaataactcctagataaaaaggacaaaaatccaaaaagcagtgtctgaaaaaaaaaaatacttgcatggcaaacttcggcaatagaactagaatccacaagaccacacctaaaacaccaaaaaaaaaaaaaaaaagagaaacaagtcacatagaagagctgtttttgctgctggaaactcttaactacaaccggagctcgagatccagctctgtgtcggagacgagtgagctcatcgtatctgcgtcttgtgaagcctcgagacaagccgtctccacggtcaatttagccaataaatttaggcactcccaatctttagtcggagctagatctggatctgaaagaacgagggcgaaaaagagcatgtctggggagtggaaggaccagagccgaagcctcgtgcctgtctctagaatgttttcggtgacgaccttgttccatcctgaacctaagacgtagttggaagtggaagtcatatcccatctcttgagcttaagcttcctctgtagaccctcggaattcaccaagatcacatccgctcctttgtcactgtcacttatctttttgtaatgtctatctattttttctaactcttcctcgtttaagaagtccatatctagtatctgttccagggcatcaagagacgtgtctgaagttcgtcgacatcactatcgggaagaaccttcacaaatatcagctttgcatccacaccgttcacttctctcatcacgttaatcagtcattccgtcggtgtcctatcttcatccgtcactataactttaagcggctttctttttcttaccggtttgtttgaaacccctttttgaggcctcttggactctacatggcacaaacttggagaagaagcaacacgattagggttttgttccgggtcttgattcttgcactcatcaatcttcagtcatttgcttaagctggaaatcatcgttgtgctccttagattgtaattaattactcttttcgttctctctctcttattatcctcgagacgtacaatatctaacgctctgttgtctccctgcaaaccattgaattgatcatcagctctcaccatggttatcaaaaaatagatagacaagaagaaaagagttaagcggcagagaggacttatatattattctgatggtcaattcctttctcgaacggacaaaggtatatatatatatataactctctattaatttttttttgttataatatctttatatttttgtattagttttagataatcactaaattacttgcttcttttctatgtcataactacaggcttgtattgtgttggttattcttttgtttgttgttcggtttaaactttaaatacatgtatttaccttcaaactttttttttttggtgagattctcaaactatttaatttaagtccagaaaaacgatttatttctccccaaaatatttgtatttcttactggtttgtttgaaacccctttttgaggcctcttggactttacatggcacaaacttggagaagaagcaacacgattagggttttgttccgggtcttgattcttgcactcatcaatcttcaatcgtttgctcaagctggaaatcatcgttgtgctccttagattgtaattaattactcttctcgttctatctctcttattatcctcgacactagcatgagcttcagtggatgtttctcctatttcctcatatgcaaaagctctaaccattctctccctcgctacacgtacaatatctaacgctctcttgtctccctgcaaaccattgaattccctttttcgaacggacaaaggtatatataactctctattaaatatatttttttgttagtgataatctctatatatttttgtattagatttagataatcactaaattacttgcttcttttttagcgtgggaatattttattttttaatttttagtaattttttgtgtgactaataatatttaaattttttgaaatatatgtttttatatgtctacttattgttaataatttaataatttaaatttctttaattttaaaattaccatggcaaataaattcaatttatatacacaactgtttttaaaaactctaatacaacttttaagtttttacaacattttatcaaaacaacatatttttctttataaggaaacacccataaaaagtggacctatccagttccaaaataataagaaaaccaccagaaaataaatatgaaaacaataatattcaaatccaaataaaattacaaaattaaattaaatacccaagatttggccttctcacatgcacatgcaaacgtgatatttgcggttcaataccctctccttggacatcattatattcttgattagagtcaaatataaagagaaacgtgattgctgatgatagacacgattcattattgtttgctcaacttgatccgttaatttcagtttcgtatcaccacactattgccaaaatctcaagtatccaatccatctattctctctcgcaatctcttgtatcttcaactacaaatccctaataaaatctcgttctcacaaatatattttcacctctttagtattgattttcgatttgagttgtgatccaaagagtatacatgagtttaaaggttctatgcttcccatgaatggatgatccttttggttgttagttgaatatttttccattctattgtttagtcctagttttttctcatcatttagttattgatgattatgtatagttaggaataagccgttatattttaagtgaaattaagttaaaaaatatatataaaaattattatcccataatacgagactaattattatactatttttttttattctaacaattaattttgtttttcatatgttattttttcaaagtttatatttctatctttacatatatatatatatatatatatatatatatatatatatatatatatattatttatatgtttctgtttcataagccaaaaactgattcactaacttatccgccggcatatcaaacggcacattcgccacataaatcttcatcatcgatatatccgaaacatgtgaatttgttgtaccttgattccaagcagcagcgagctgcataaccgtcccacccctatcaatcttctaacggtttctagaacatctggatgtcacgtcagcaaagtagggcgatttcgagagtgattagggttttttcgtccgccgcaagtcttttctgccaaggcggctagccgccactgccaccatgtcgaaggaggtgggagcgacccctgggttggtaccaactcattctccagaagttcagggtccgaaatcttacgcaaacgttgttagcagtcgcccaagtcttaccaagttcaatgttgatgtttcagtagtagatgggaaatctatggttgtggttccagatgtggtgcttgaggattcagttccgctatgggatgatttcctagtcggtcgttttccaagctctgccccccatattgccaagatccatgttattgttaacaaaatatggaacttaggtgataaatcaattcggatcgatgtttttgcggttaatgataacacagtcaagttcagaatcaggaatgcatctgctagattaagggctctccgtagaggtatgtggaacatttgtgatctccctatgatcgtctcgaaatggacaccgatcgtagaagatgctcagccggaaattaaatctatgccaatgtgggtggtcataaaaaatgttccctactcaatgttcacatggcctggacttggttttcttgctagtcctgtgggggaaccgcaaagattacatcaagaaacaaagtaagtaacaagcttcgaggaagcaaaaatttttgttgatgtggatttatcaaaaccgctaccaaaaacctattttttcaacattaagggagaagagttctgtgtcgagtttgaatatccatggttgcctccaaggtgtggtgtctgtgggaagtggggtcaccctgaaaatggttgtttggctagcttgggtacaacaaaggtttttacgggtcctctgttttgctcagaacaggtaattgttaaatcaacatcggcccaagtgtttctctaccggttgcagtggcggtgggtaatgaccttgtggagtctgtaccgttggttgattctcaagctttggaggtagtaaagggagatattgcagaagaagttgaggagggagaaatagcttcaaattcaaaccaaaagtcagttcagggggaaaaaatacaagaggaaggggattggttaacagtctctagttcaggggggaaaaagtacatatcaaaagtcaggaaggactttaacctatggtcaagtttgtatcgcttcaccctcacgttatgctattcttagcaatattgaggatgattcagttcttgaggaagtgcaaaacgaagactcggtggggaaggaaacagaagactcagttaagggggttttagaagtagtagtagtggagggaaaagaggaaatggctctcaataaaactcaacaggtgaagtcttgttttgatggagcttcaactcgagtttccatccccagatcatctaagaaggctcataaatttgtctcagtccccaatcaaaaggccacggacgttctcccaagacaagtcagcaagaagaataataaacgctttccttaatgtctggttttttctggaacatacgggggtttaataagcataataaacagaaggttgttcgagaatggattaaaaaaacttctttgcagtttgggtgtgttctagaaacaagagttattgaaagtaaagttccggtaatttttgcgaaggtgtttaaggattggcaaatggtttcaaactatgagttcaatcggttagggagaatatgggttgtgtggagttccagtgttcaattgcaggttatttttaaaagtagtcaaatgatagtgtgtttggtgcgggtggagcattatgatgttgagttcatatgctctttcatctatgcctcaaattttgtggaggagaggaagaagctttggcaggatcttcataatctccaaaattcagtggcttttcgaaataagccatggctcttgtttggtgattttaatgaaactcttaagatggaagagcattcaagctatgcagtatcgcctatggttacgccgggtatgagagactttcagattgtggtgagatattgttctttggaggatatgagaacccatggtccgttgttcacatggggaaataagcgaaatgaaggactgatctgcaaaaaattagatagagtgcttttgaatccagaatacaatagtgcctaccctcattcctattgtatcatggactctggtggttgctcagaccatcttcggggtagatttcatctcagatctgcaattcagaagcctaaaggtccttttaagttcactaatgttattgctgctcacccagagtttatgccaaaagttgaagatttctggaagaatacaacagaactctttccctctacatccactctctttcggttctctaagaaactgaaggaacttaagcccatactcaaggacttaagccgtaataatctatcagacttgacacgtagagctacttacgcctatgaggagctttgtagatgccaaaccaaatctctaactactctaaatcctcatgatattgtggatgaatctttggcttttgaaagatgggaaaaggtggcttgactagaagaagagtttttgcgtcagagatctaaattgcattggctacaagttggagataatatactaaggcattctacaatgtgttaaaggagagacacttgttaaatgccattcatgaggtaatggatccgcaaggtactagacctccaaatcaagatgacattaagattgaggcagtccgtttcttctcagatttactatcctctcaaccaagtgattttacagggatctctgtggacgaactaaagggtatattacagtatcgatattccttgcatgaacaaaatcttctagttgctgagatcactgaagcagaagttatgaaagtttttttctctataccgttgaataaatctcctggtccggatgggtacacagttgagtttttcagagaaacttggtcagttattggtcaagaagtcacaatggcgattaaatctttctttacctatggattcttaccgaaaggtttaaactctacgattttagctcttatccccaagagaacatatgcaaaagagatgaaagactacagacctatttcgtgttgcaatgtcttatataaagccatatctaaattgttagcaaacaggctgaaatgtcttcttccagagtttattgctcccaatcagtctgcatttatcagtgacagattgttgatggagaatcttctgctagcttcagagcttgtaaaagattatcacaaagatggtttgtcaccccgttgtgctatgaagatcgacctttccaaagcttttgactcagttcaatggccgtttttgttgaatacacttgcggctctagacattccggaaaagttcatacattggataaatctttgtatttccactgcttccttctcagttcaagtaaatggtgagttagcgggttattttcaaagtaaatgagggctacggcaagggtgttctctgtcaccgtatctgtttgtcatttgtatgaatgtgttatcggcgatgcttgataaaggagcagtagaaaagagattcggctaccaccctagatgcagaaatatgggactcactcacttatgctttgctgacgacatcatggttttctctgctggctcggctcattctttagaaggagttttggccattttcaaagattttgcagctttctcggggttgaacattagtttggagaaatcaactctttttatggctagtatttcttctgaaacttgtgcttcaatattggctagattcccttttgattcaggctctttacctgttcgctatttgggacttcctctcatgactaaaagaatgactctagcagattgtctgccacttcttgagaaaattcgatcacgtattagctcttggaagaaccgtttcctgtcatatgcagggaggctacaacttttaaactcggtaatttcaagcttaaccaaattttggatttcagcctttcgtctaccaagagcttgtatcagggaaatagagcaaataagtgcagcttttctttggtcgggaacagatttaaatcctcacaaggcaaaggtagcgtggcatgatgtgtgtaaaccaaaaagtgaaggtggtttaggtttaaggtctcttgttgacgctaacaaaatctgttgtttcaaattgatttggaggttggtatcggcgaaacattctttatgggttaactggattcaaaataatctaattcgcaccggttgattttggtctgtcaaggcaaacacaactttaggctcttggatgtggaagaagcttctaaaataccgtcacgaggcaaaggagttttttaagatggaggttttctgtggtaggcaaacctcgttttggtatgatcattggtgttccttgggtcagcttcatggtttacttggagatcgaggttttattgatctgggtatctcatcttcttgttcagtggcggaagcgctttctagtcataggaggagaagccatcgcgatgacatcttaaatgacatcgaagaagagttagaaaagcttctgtgtcgcggtatttgcacagaacaagataggtctctttgtcgaagtattgggggtcagtttaaggctaagtttttctctccggaaatttggcatcagataagagaacaaggattagttaagcaatggcacaaggcgatctggttctccggagctacgcctaaattcacgtttatatcttggcttgctgctcatgacagattaacaaccggtgataaaatggcatcttggaacaggggaatctcctctgtttgtgttctttgtaatatctcagctgagtcaagagatcatctgttcttctcctgcaatttctcttcacacatttgggatagactaacccgaagacttcttctttgccgctacacaaccaactttcctgctttgctcctccttctttcaggacaagacttctcaggtacaaagcgtttcctcttgcgctatgtatttcaagcaacgatacacacattatggagagaaagaaacaagcgtaggcatggagatctgcctataccatcagatcatatcatcaaattcattgatcggcaaactcgaaaccgtttaagcacaatcacaaagcaaggcttgcacaaatatgccgatggcctccgcatatggtttgcagcgagagacaacttaacgccaaatcattagtatttctttgtttttttccttttgattttaagtctaaatcaagttaataaatggctgcatatattgtaaaccaggttttttctttgaataaatttaacaatttttcaaaaaaaaaaaaaaagaacatctggatgtcgtacaatagcttcttgcaagatatcaagaagctgatcagcaaagaaaagctcggtaatcttcctcgcgtcttgtggcaccaatcgaaacgaaacagagccactgactccatcgtgtagcatcgcgattccattttcatcgagctttcgcttcttcaacatatccatggtcgaagatagcagccaaggaactttgtgggaagaatgagtgaagttagaagagatcacatgttcgtaggacataattaagcctagctctttttccttaaaatataactatagcattggtacaccaaaagaaattaaacgtattcgtcaaattcatagtttaattgattagagtagatgagaaaaccatttgctgtttcatacccgacttttttccaatcacgtgaaacgtaaaggtaaaacatatttgtaactaaaccatatttttctttctttctttctctcgtgtttgttttagaacctaatctgatctgaatattaacacacaaaaagatgataaatgagaacatataacaaatcatgaaatgagatgagaacatacttctctagaaaattttctaaaatatccgaatcaattgatggcgaacaactaaacagtagaatacaatatgtatattaaacagaaaatcaaacgctaaggaattaaaaatcatgaaaagattattaacacgagagatgagaacttaactctccgaaaatttgtcctaaaacatccatttcaattttctcgcaaagaattaaaacttagaacacaatatatcaaatcaaacgtgtatgaattgaacttaaaaatttacatgttacatcagcatctaaatttttataaattaattcacgacttatggattagtatgtatattcaaaaaaatagttggcacgatcaaaaaagaaacattaggtagctataatctgatagtgaattaaatgaaaagtatttataaaaaactaagaggctgctcatgatttaggattttacctttttacaatttccagaaacacacaaaataagaaaatttattttgtgaagttacattaacatttatatccaatattacacactaaaaaaacgaaaccaccatatattcattattataaacatatggcttattaatctaaatctgttaaactatatatctaaatctgttaatctaaatctgttaaattatataaatatgttattataaacatatccttttattatataaatctgttaaattatatatctaaatctgttattataaacatatccttttatcttctaaatcttactaatctaaatctgttaaattatataagggtgtttaaaaaatggatatatatgtttttgtccacaaatgaatatatacatttatatcgattttttttatatactttcgtaaatgttaattgatgacatgtccaaccgtaatttgctgtttaaaattttatgtggacggcatacgaatcaaatagcctcgacttttctatagtataaattgtatgtaacttgtaggctctctctaaggcggaacgctcccctaccgatgtattttgacatcccacagcttcggcccatgtagtctattggttatttttgtggttcagtttaaattttaaatacatgtatttatcctcaaacttttttttttgcgattctcaaactatttaattcaaatccagaaacggtttatttctccccaaaatacatgtatttatccatgttaatttttttatttctttggcttaagtaataattagatcaatacattttagaccaataaacgtttgaacgtctttttgcatcagaacgtgaaattaatgtcaaacgcaaacgcatgtacaaatcctgaacaaacataccgcttaggtgatggatggttgcgtaagaacaaaacaccttaaacggcagcgttttgtaggagcaccgcttcgcacgtttcttccatatctctgatcacgtgatagtcgtcttcttcagatcttttatcactttcttcttcccggagaaaatttggccctaaatcactttcccgggaaaatcaaactctggggaaagagttgaaacaatgtcacaaggcgatacagtaccgcttcatccatcgtctcaatcagacattgacgagatcgagaatctgattaacgaaagcgtccaatcaggtcccggaaccgttctcgccgctcgtccaccgagcccaaccagaccttcgattccagtatcttcttcttcttcttcttctccgtttatgcaatcgaatcttccaccgcttcatccgtcgtcatcagctcagaaagtgacacatgtccccgttcctccgcctcttccggcggtaagtaactccagcaatttccaaggagcgagtgcttttggatctccgcctaatacgttgacggagcctgtgtgggatactgtgaagcgagatctgtctcggatcgtgagtaatttgaagcttgtggtgtttcctaatccgtatagggaagatcctgggaaggctcttagagattgggatctttggggtccgtttttcttcattgtgttcttgggtcttactctttcatggtcagcttccgtcaagaaggttagctctcagatcagtagctagtttctctcagctttaagcttgtgtgatctaaatgtgatctggaactttagcttttaggtatctgatagagttctttagaatgtctctgttacagaaaatgagtgggattaaagatagcatttcacttcattgcattaagattgttccttcaattgtgaattgtttgattatagatggaacacgatgacgggaaacaaggattgagttacagaaaattaggagtttttaaatgggagtgaagatagcatttccacttctttgcattaagattgttctccaattgtgattttttagattatagaaggaacatgatgaagaaaaatgaggactgttcttgtggcattgcttctcacttgattcttaggctataggttatataaagcttctttcttgtacagtggatcatgtaggattttgactcacaaagtagcactttggatgcactattctgagttattagcatgtaggtctgattaaaggattgaatttgaatctgatgtaattacagcttatcttgccgatattgagtggcttttcatagaatgctatctattatctatcagaattcgtctttgtctcataccttttccctttgattccagtccgaggtatttgcagtggcatttgcactattagcagccggggcggtgatccttacactaaacgtgcttctcctggtaaaccaccactgctctctccttgtatctcgtgcagatgtttttcgtttgatcacatacttacaaccattatgttgtgtcatgaacagggtggacatataatcttcttccaaagcttgagccttctaggttactgtttatttccgctagacgttggagccgtgatctgcatgttgaaagacaatgtgatactgaagatggtggttgtgtctgtaacccttgcctggagctcatgggctgcttacccttttatgagctcagcggttaacccaagaagaaaagcactcgctctataccccgtcttcctcatgtatgtgtcagtcggttttctcatcatagccatcaattgaatccccaattttgagaagaaaaagggaatcatcacaggtattctcaggaatcagcttggatagaaatttttcatacatacacaaaccatcctgagttctgatgatcatgtataaacatgttttgttacccttttttgtgggtttggttaaaaagaagatcatcatttgtatgtgccccgctctatctgcattaagcttacatttatctttttggccataaatacaatttttttaccaaacattacttcatatggtttctcgagatagtatcgacatgcaattttgttggtcgtccacccaaccctaaacacgtgttatagtattaacatggaaatgtggaaaccagatcacaaccatgctaaaacaagggttaaattttatttagtaatcattagcataatcgaatagattatgaacatatttttgatatataataataccaaattcaatatttgctttaaatttatatttatattttggaatcgcaataaaaaaattgtttacacaatccatcattcgttattttcaaaattattctacttattttattcatttcaaaattattcgaatacattaatgaacatcattcatttttcaatttttttttgttattcaacttatttattcatttttatttatttattcaactttttaatttttattttgttgttagcttccatttgcatatgcttcgtatcgtatatcatcacttccagttttttaccggttggggggggggggggggaagaagcagagatgattcgtcaacaaacaaaaacgaatttattttgaaccaaaccggatgtatattttaaaccgaaatcaaaccgggaaaacctgtattgacgagccctcttcttcttcagctagtgagaggctgcctcacttgcttgctggtttgatactgccaagtttttcgctttctcagctcttccttcgatggtaatcttcaaattcctttcctttagacccttattaatcttattgcttttgtaatagacttggtttagtgtgttttttgtcgtagcgagtttaatcttgttgctggttattgtaaggttggtgctttgaatatcatgtcagagactggtgatttatgtgtagaacttcccaaagatgatcccttttatcaccacaaaaaggttcaatttcctaatttctctgctcttctgttatctcaatactcaaagccattagctttttttttgccttatagtctaaagatcagatttttcatgtgccaaagtcttaaaatattacactgtttagtttttctcatgttttgtttgagtttttatgaaaatgaattttcttatgattttgtgtctgtagaagttcttgagttgcaaaggtttatgcgtaaaggaaacattgaacctcagtggatcattatctcaacaactgttgaatgctgcattggaaaagttgcttcattttggacgaatagttaatctcgataaggtaagcaaacatcgtaggccattgtaatgcatgtgaagttgcttagatgatggattgagtgaaatgcaggtggaagtttactttggtgaggatgcttgcactcctgcaggaatttacagtgttagaaacgaaatctcagctctcagctggatcctttcgcttataccggtttcttgtaagatgcaaacacaagttgatacctttgaagctctacgagctgctttaaaaggtagaatcaatgaggttgttggagctgaaaaggagaaagctagagttgttgatagctatagatgcgaaaaggaaagcaaattagtagaatggggtcaggacaatggagtcaaaaccaaattgcagatagctcgtaagcttaacggtttttttctgttatgaagttatcaacagagatttaagtttatgacaatgtgttttataaatttggatagaaattgatggctatggacgaggagctatagctagcgaagacttgaaatttggcgatgttgctttagagattccagtctcaagtatcatttcggaggagtatgtgtacaactccgacatggtatatcatttgagttcatcctgatttaaagattgcgtcagtttcatcatagcaatgctatatgatgagtgttctcttgtcttcagtacccaatattggagacgtttgatggcattacatctgagacaatgctgctcttatggaccatgagggaaaagcataacctggactcgaaattcaaaccatactttgactctctgcaagagaatttttgtaccggtaaaattgtttggagaactaaatattcaattcttgtagcagtgtttgtttcaaagagacaacaaacattgattctctcattgcaggtttgagttttggggttgatgcaatcatggagcttgatggtacattgcttttagatgaaataatgcaagctaaagaggtgtgacttgatcccatctcttatcttttggttctgtgatttgtattatgttcttgattccattggcaattgtttgtatatctgcagcttttgcgtgagaggtatgatgaattgattcctcttttatcgaaccaccgggaagtatttccaccggagctctatacatgggaacattacttatgggcttgtgagttgtattactcaaatagcatgcaaatcaaattcccagatggaaagctgaagacttgcttgattcctgtcgccggttttctcaaccattctgtatgtgtcttctctcgttctgcctctggtatactaagtaattcctatcactatccggaatatgataatttggcgggttttgcagatatacccacacatagtgaaatatggaaaagtagacattgagacgagttccttgaagttcccagtctcaaggccttgcaacaaaggggaacaatgttttcttagctacggaaactactctagttcgcatctgttaacattttacggatttctaccaaaaggggataacccgtatgatgtcattcccttaggtagtttaaccttacctcattctgagatcactcaggcttacatgctttttttgctttaagttgtatctcttccttgcagattttgatgtcattgatgatgaagacatcgagaccgagttttcttggacaactcacatgttacgcgggacttggctatcgagtaatcacaacatcttccactacggcttgcctactccattgttgaactacttgcgcaaagctcatggtcttgttcatcattctgaaacagatgtatatattcttcatcaccttcgtataactacatctatatctctatgaatctaacacttaagatatttttctcatttcttgattcttttaagttatggaagaacttggaagttgagataggagtacttgagaatctccaatccacattcgacgacatgatgcaaaatcttggcgatgcagattctatcgacaggtatcagtagttgtcttgtcatgatatacaaaagctgaaacagagtgaccaattacttagtaatccgtctggttttacacttttacagagaaaacgcggattgggatgttaaactagcgatggagttcaaagagcggcagagaaagattgtctcatccattcttgattcatgttctgcaggtatcaaactagttcaagaatccataactaacccaccggtttagctaaggtagaatgagatgagaacctgatcttggattcagcttatactgtattatgaaatgtatcttcttgacaaagttaaattgtgtgagttaaaagactttagttcaattttagttacattttagttacattttagttacatacttcctctgtttaatctcattagacacctctttttttcttgcttatataattgcttcatatccacgtaatctcattagacacctctttatataatctcattagaatttataaatttatgtacttacgtacgtacgtacgtgtgcgactaaccctagacaaattaaccgaatactcttttttttgcaaatgcatcacgcatggtaccctaatagtggtgtctccatcatttgtcattactttctgaatgcaaaatgagtaatcagattcattaacatttgactaatactatattttctcatattttttgtgggcatagagaattatcagtattttgagcatattataaaagtaatctcaaatgggaaacataacaaataataaaaaagaatgaaaaagttgatgtggctgctggtggcagcaaattggcggaccccatcttccaggttacattcttgtcgttttccagcttcttaacacagagctataatctcatgcaccaaagagcatactaatatcctatgtctccgagtaataatcagccacgtttctataatagacacaagttggtgtgacactgacaagaaaataaataagatttatagaaagtgggaacagaacacaaaaaaaaagctgaaacaaagagttcgagaaaaatttcgattctcttgctcgtaaaagcttcttttgattctctttgactctgttttgtggatagctcctgaagaagaagaagatgatggtagtgaacagctttgatctatggcaaaaagatgttttcttctctgcagctgaagaggttcaaaaatctacagatatgtatggtttcttgttagattttgatcttgtaatctcttctttgagcttagcttttgatcttgcataaattaagagattgagatgtgtttaatttgctattgttctttacttggattttagaatggagtctgcttatagattgtggattagagagaagaaagatgagatttgtaaggaacttcaagcagctttaggtacagctaaatggcaggtacaataatgtttcttgaaacatttctggtttagttgtgttcttgttcttgtctagttcttgaaaagttttgaaactgtgttgaatcagttggaggagtttgagaaggcagtgagattgagtcataaacggtgtggggataatgattcttcatccacacggcataaacagtttgttaccgctattgaaaaccagattcatcgcgtagaaacttctctgcaagaagcttatagtgaaaatgggaaaaagcctctccgttgggttgatcttaatgaagaagagcgtgatgacttagcaatgtttctctctggatcttctcgaacttcacagagttttagtggtgagagcagcatcaagtcgagagagtctactaatagttctctagttgaaaacgttatggaagtttcagctaaagtaacattcaagaaagctaaagtttatggtgatggctctgagtgtgtcatagacattgaagaaagagtgacacctggccaagcagagaaatcagttgggctgagaagaatatggagttcaccaaatttcaattctttgagaattatagttcctggtggtgataatgaagaagaaaaggagacattggtggcacaaatagaagcgacgcctaaagttaaaggaactaagtctgtattgtggatgcagagacttcctgatcataatcaggtgagtgtgttgatatataagctttagtcatggtaggaggaagtaacttacttgttcagtgtttttttcagctctttgacaagaccggttgctttcaaaatccgatacgcttaccgtttaatcacccgatcaagtttattgtttccttattgctaatggtgtttctactatgtgagtcacttcagttttttttcttaatgaatcaatactttgctaaatatatagattttggtcttgagcttgttaatattgctaacgagcattgctttttcccctgtttaaaccgatgcagtacccttcgtagtgtatttgtcttgagaattttaccacggttcgaaactgtcaagaagctgctaaagagatcagctttcgcgtctaatggttaggattcataatcccacaagaacaaacagagattaaaaagctttacatatgttacttttaacttgttgctttggttcttcagggaacgtatagaaacattgaaacgtgtaagattaagtaaagggattagagtttatattacggctttggctaccgttgataaagatgtaaatgcaatattcgtttcgtagatgtttgacaatacaatgccataagaatcaagatttatgccatgtttttatgaacaatttcttaactacatttcaaaagagtttgctctctaaaccaacaacttggaatcttggtacttggattttgtccctaactttatattgggcctctaactttatgaccaaagaaggtccaagttttgttagtacaaaaaaaaaacagtttacatacatctctcagtcacctccattgattatgcagtagaatctgccttgtacactcacaaaaaaatataataaattttactttttaaataaaataaacgtctttgttatgataaaatttacatcttttctatagaatcctttcaatattttatattttaaagacagtaaatttatataaacttatcataaataattagtatgattttataatttaagagattattatacctaactcagaaattggatttcaaataataatatactcaaataaacgtttgtatgctatattatacagtaaaacctctataaattaataacgttgggactacaaaattttattaatttaaagaggtattaatttattgataaattaatattttattaatttatagagagatttttccaaatttagtaattttttacaaatttttataagatttctttcattatagaaaatatctttctaaaacaagttacaaataaaacataataataatgtataaaacataataacaccaaaagttttaatacagtaaaatatgaaaattatagtcaaacaaagaacaaatatgaatttaagcaaaaaattattataaatctattttaaagaatttttatacataatatatatatatatataattgatacatttatataattattaacttatgatattgatgggaccatatatttacatagaactttcaaaaaaattattatcttattgatttatcgatttgtgtcactttttacattagtcctaactcgtgactggaaaaatttattaattttttgaggttctactgtatataatacttaaactgattaatgagatatatccatttaataaatttataaataaatttaaattaaaaataaaatggaatgataaagattttttttaacagagttttctagcacttaatcttctttgcttccctttatttaccataaccacaattctcatctaattgtcaaaccttgatcttcaactcaaattgaagctaaaccatgttcttaaacttgacatgtgttttaaataaataccactttgttaacacagtttttaatcaacactatattctgccagactgccatcatatcatttttgcaaggaaattttctcaatatgattatctacctaaatgatactatattttaacatataaggttacgttttgattctgtagtttatggaagaatccttataatattattcctaaactaccttccctgttttatttctactcaaaaaccctttttttttttttttttttttgtaaatctcactttcttcttctctcttcaggctgtgaatattctgatttctgactaagctctctacaattctctctcatggcctcttctctcgacggtaattttctttttgggacagtttttagaaatttagtgctttcgctttaagatgaagccttggacttgttagagatttttttttctttttcaactcttgatgatcggcttatatatagtgatgcttttactcataatttactagtgaatttttattatcgtgttttacttttcaagatcaatttgttgtttgcttaatttggtaatggaaaagtcttttgtcaaaaaaaaaagctattggtgggtcattttactattagctattggtgggtcattttacttcacgcaggagctgcaagtaactctaatttgagtgatgataaaaagaaacgaaggaaaaaccctaagcctcggcacttaagttcgtatgggaagcgtaataacactccagttcaaccctcaggtaaaaacatgtttcacacaagttatttttcatttacactatttttcagtttctcacacattatattgcaacaattttttcattagaaactgaaaccaagagccaaggcaaaagagtttgcttcaacaactctgatgtaagacagatgaagcaaaacacttcttctagagaaaatcagtttggcataaaagaaactgtcttggagaatttccccaacgtcactcctcagtttatgtcagaccaaatcaatggccatcaagataaacctgagaaggcgaagaagaatccggaaagctatggtttagggcttgagcaatgtgtgaagatcataagaaagcttgagtgttcaggttatgttgagagcacttttagacaaaagtttttgacttggtttagcctacgagctacgagtcaggagagaaatactgtcacgacattcatgaatgctttcaatgatgattcaatggctctggctgagcagctcgttgacacattctctgattgtatatggagcaagggttctgtgattggcgatcgcgatggaggtggcagtagtggtgtctcatgtaagaagccgcgacattgattagaagagattatgtaggcattctttgcagtttcagtcttttttttttttttctttgggatc

SEQ ID NO: 248 - DNA, 99359 bp, Arabidopsis thaliana
gaattcaccaagatcacatccgctcctttgtcactgtcacttatctttttgtaatgtctatctattttttctaactcttcctcgtttaagaagtccatatctagtatctgttccagggcatcaagagacgtgtctgaagttcgtcgacatcactatcgggaagaaccttcacaaatatcagctttgcatccacaccgttcacttctctcatcacgttaatcagtcattccgtcggtgtcctatcttcatccgtcactataactttaagcggctttctttttcttaccggtttgtttgaaacccctttttgaggcctcttggactctacatggcacaaacttggagaagaagcaacacgattagggttttgttccgggtcttgattcttgcactcatcaatcttcagtcatttgcttaagctggaaatcatcgttgtgctccttagattgtaattaattactcttttcgttctctctctcttattatcctcgagacgtacaatatctaacgctctgttgtctccctgcaaaccattgaattgatcatcagctctcaccatggttatcaaaaaatagatagacaagaagaaaagagttaagcggcagagaggacttatatattattctgatggtcaattcctttctcgaacggacaaaggtatatatatatatataactctctattaatttttttttgttataatatctttatatttttgtattagttttagataatcactaaattacttgcttcttttctatgtcataactacaggcttgtattgtgttggttattcttttgtttgttgttcggtttaaactttaaatacatgtatttaccttcaaactttttttttttggtgagattctcaaactatttaatttaagtccagaaaaacgatttatttctccccaaaatatttgtatttcttactggtttgtttgaaacccctttttgaggcctcttggactttacatggcacaaacttggagaagaagcaacacgattagggttttgttccgggtcttgattcttgcactcatcaatcttcaatcgtttgctcaagctggaaatcatcgttgtgctccttagattgtaattaattactcttctcgttctatctctcttattatcctcgacactagcatgagcttcagtggatgtttctcctatttcctcatatgcaaaagctctaaccattctctccctcgctacacgtacaatatctaacgctctcttgtctccctgcaaaccattgaattccctttttcgaacggacaaaggtatatataactctctattaaatatatttttttgttagtgataatctctatatatttttgtattagatttagataatcactaaattacttgcttcttttttagcgtgggaatattttattttttaatttttagtaattttttgtgtgactaataatatttaaattttttgaaatatatgtttttatatgtctacttattgttaataatttaataatttaaatttctttaattttaaaattaccatggcaaataaattcaatttatatacacaactgtttttaaaaactctaatacaacttttaagtttttacaacattttatcaaaacaacatatttttctttataaggaaacacccataaaaagtggacctatccagttccaaaataataagaaaaccaccagaaaataaatatgaaaacaataatattcaaatccaaataaaattacaaaattaaattaaatacccaagatttggccttctcacatgcacatgcaaacgtgatatttgcggttcaataccctctccttggacatcattatattcttgattagagtcaaatataaagagaaacgtgattgctgatgatagacacgattcattattgtttgctcaacttgatccgttaatttcagtttcgtatcaccacactattgccaaaatctcaagtatccaatccatctattctctctcgcaatctcttgtatcttcaactacaaatccctaataaaatctcgttctcacaaatatattttcacctctttagtattgattttcgatttgagttgtgatccaaagagtatacatgagtttaaaggttctatgcttcccatgaatggatgatccttttggttgttagttgaatatttttccattctattgtttagtcctagttttttctcatcatttagttattgatgattatgtatagttaggaataagccgttatattttaagtgaaattaagttaaaaaatatatataaaaattattatcccataatacgagactaattattatactatttttttttattctaacaattaattttgtttttcatatgttattttttcaaagtttatatttctatctttacatatatatatatatatatatatatatatatatatatatatatatattatttatatgtttctgtttcataagccaaaaactgattcactaacttatccgccggcatatcaaacggcacattcgccacataaatcttcatcatcgatatatccgaaacatgtgaatttgttgtaccttgattccaagcagcagcgagctgcataaccgtcccacccctatcaatcttctaacggtttctagaacatctggatgtcacgtcagcaaagtagggcgatttcgagagtgattagggttttttcgtccgccgcaagtcttttctgccaaggcggctagccgccactgccaccatgtcgaaggaggtgggagcgacccctgggttggtaccaactcattctccagaagttcagggtccgaaatcttacgcaaacgttgttagcagtcgcccaagtcttaccaagttcaatgttgatgtttcagtagtagatgggaaatctatggttgtggttccagatgtggtgcttgaggattcagttccgctatgggatgatttcctagtcggtcgttttccaagctctgccccccatattgccaagatccatgttattgttaacaaaatatggaacttaggtgataaatcaattcggatcgatgtttttgcggttaatgataacacagtcaagttcagaatcaggaatgcatctgctagattaagggctctccgtagaggtatgtggaacatttgtgatctccctatgatcgtctcgaaatggacaccgatcgtagaagatgctcagccggaaattaaatctatgccaatgtgggtggtcataaaaaatgttccctactcaatgttcacatggcctggacttggttttcttgctagtcctgtgggggaaccgcaaagattacatcaagaaacaaagtaagtaacaagcttcgaggaagcaaaaatttttgttgatgtggatttatcaaaaccgctaccaaaaacctattttttcaacattaagggagaagagttctgtgtcgagtttgaatatccatggttgcctccaaggtgtggtgtctgtgggaagtggggtcaccctgaaaatggttgtttggctagcttgggtacaacaaaggtttttacgggtcctctgttttgctcagaacaggtaattgttaaatcaacatcggcccaagtgtttctctaccggttgcagtggcggtgggtaatgaccttgtggagtctgtaccgttggttgattctcaagctttggaggtagtaaagggagatattgcagaagaagttgaggagggagaaatagcttcaaattcaaaccaaaagtcagttcagggggaaaaaatacaagaggaaggggattggttaacagtctctagttcaggggggaaaaagtacatatcaaaagtcaggaaggactttaacctatggtcaagtttgtatcgcttcaccctcacgttatgctattcttagcaatattgaggatgattcagttcttgaggaagtgcaaaacgaagactcggtggggaaggaaacagaagactcagttaagggggttttagaagtagtagtagtggagggaaaagaggaaatggctctcaataaaactcaacaggtgaagtcttgttttgatggagcttcaactcgagtttccatccccagatcatctaagaaggctcataaatttgtctcagtccccaatcaaaaggccacggacgttctcccaagacaagtcagcaagaagaataataaacgctttccttaatgtctggttttttctggaacatacgggggtttaataagcataataaacagaaggttgttcgagaatggattaaaaaaacttctttgcagtttgggtgtgttctagaaacaagagttattgaaagtaaagttccggtaatttttgcgaaggtgtttaaggattggcaaatggtttcaaactatgagttcaatcggttagggagaatatgggttgtgtggagttccagtgttcaattgcaggttatttttaaaagtagtcaaatgatagtgtgtttggtgcgggtggagcattatgatgttgagttcatatgctctttcatctatgcctcaaattttgtggaggagaggaagaagctttggcaggatcttcataatctccaaaattcagtggcttttcgaaataagccatggctcttgtttggtgattttaatgaaactcttaagatggaagagcattcaagctatgcagtatcgcctatggttacgccgggtatgagagactttcagattgtggtgagatattgttctttggaggatatgagaacccatggtccgttgttcacatggggaaataagcgaaatgaaggactgatctgcaaaaaattagatagagtgcttttgaatccagaatacaatagtgcctaccctcattcctattgtatcatggactctggtggttgctcagaccatcttcggggtagatttcatctcagatctgcaattcagaagcctaaaggtccttttaagttcactaatgttattgctgctcacccagagtttatgccaaaagttgaagatttctggaagaatacaacagaactctttccctctacatccactctctttcggttctctaagaaactgaaggaacttaagcccatactcaaggacttaagccgtaataatctatcagacttgacacgtagagctacttacgcctatgaggagctttgtagatgccaaaccaaatctctaactactctaaatcctcatgatattgtggatgaatctttggcttttgaaagatgggaaaaggtggcttgactagaagaagagtttttgcgtcagagatctaaattgcattggctacaagttggagataatatactaaggcattctacaatgtgttaaaggagagacacttgttaaatgccattcatgaggtaatggatccgcaaggtactagacctccaaatcaagatgacattaagattgaggcagtccgtttcttctcagatttactatcctctcaaccaagtgattttacagggatctctgtggacgaactaaagggtatattacagtatcgatattccttgcatgaacaaaatcttctagttgctgagatcactgaagcagaagttatgaaagtttttttctctataccgttgaataaatctcctggtccggatgggtacacagttgagtttttcagagaaacttggtcagttattggtcaagaagtcacaatggcgattaaatctttctttacctatggattcttaccgaaaggtttaaactctacgattttagctcttatccccaagagaacatatgcaaaagagatgaaagactacagacctatttcgtgttgcaatgtcttatataaagccatatctaaattgttagcaaacaggctgaaatgtcttcttccagagtttattgctcccaatcagtctgcatttatcagtgacagattgttgatggagaatcttctgctagcttcagagcttgtaaaagattatcacaaagatggtttgtcaccccgttgtgctatgaagatcgacctttccaaagcttttgactcagttcaatggccgtttttgttgaatacacttgcggctctagacattccggaaaagttcatacattggataaatctttgtatttccactgcttccttctcagttcaagtaaatggtgagttagcgggttattttcaaagtaaatgagggctacggcaagggtgttctctgtcaccgtatctgtttgtcatttgtatgaatgtgttatcggcgatgcttgataaaggagcagtagaaaagagattcggctaccaccctagatgcagaaatatgggactcactcacttatgctttgctgacgacatcatggttttctctgctggctcggctcattctttagaaggagttttggccattttcaaagattttgcagctttctcggggttgaacattagtttggagaaatcaactctttttatggctagtatttcttctgaaacttgtgcttcaatattggctagattcccttttgattcaggctctttacctgttcgctatttgggacttcctctcatgactaaaagaatgactctagcagattgtctgccacttcttgagaaaattcgatcacgtattagctcttggaagaaccgtttcctgtcatatgcagggaggctacaacttttaaactcggtaatttcaagcttaaccaaattttggatttcagcctttcgtctaccaagagcttgtatcagggaaatagagcaaataagtgcagcttttctttggtcgggaacagatttaaatcctcacaaggcaaaggtagcgtggcatgatgtgtgtaaaccaaaaagtgaaggtggtttaggtttaaggtctcttgttgacgctaacaaaatctgttgtttcaaattgatttggaggttggtatcggcgaaacattctttatgggttaactggattcaaaataatctaattcgcaccggttgattttggtctgtcaaggcaaacacaactttaggctcttggatgtggaagaagcttctaaaataccgtcacgaggcaaaggagttttttaagatggaggttttctgtggtaggcaaacctcgttttggtatgatcattggtgttccttgggtcagcttcatggtttacttggagatcgaggttttattgatctgggtatctcatcttcttgttcagtggcggaagcgctttctagtcataggaggagaagccatcgcgatgacatcttaaatgacatcgaagaagagttagaaaagcttctgtgtcgcggtatttgcacagaacaagataggtctctttgtcgaagtattgggggtcagtttaaggctaagtttttctctccggaaatttggcatcagataagagaacaaggattagttaagcaatggcacaaggcgatctggttctccggagctacgcctaaattcacgtttatatcttggcttgctgctcatgacagattaacaaccggtgataaaatggcatcttggaacaggggaatctcctctgtttgtgttctttgtaatatctcagctgagtcaagagatcatctgttcttctcctgcaatttctcttcacacatttgggatagactaacccgaagacttcttctttgccgctacacaaccaactttcctgctttgctcctccttctttcaggacaagacttctcaggtacaaagcgtttcctcttgcgctatgtatttcaagcaacgatacacacattatggagagaaagaaacaagcgtaggcatggagatctgcctataccatcagatcatatcatcaaattcattgatcggcaaactcgaaaccgtttaagcacaatcacaaagcaaggcttgcacaaatatgccgatggcctccgcatatggtttgcagcgagagacaacttaacgccaaatcattagtatttctttgtttttttccttttgattttaagtctaaatcaagttaataaatggctgcatatattgtaaaccaggttttttctttgaataaatttaacaatttttcaaaaaaaaaaaaaaagaacatctggatgtcgtacaatagcttcttgcaagatatcaagaagctgatcagcaaagaaaagctcggtaatcttcctcgcgtcttgtggcaccaatcgaaacgaaacagagccactgactccatcgtgtagcatcgcgattccattttcatcgagctttcgcttcttcaacatatccatggtcgaagatagcagccaaggaactttgtgggaagaatgagtgaagttagaagagatcacatgttcgtaggacataattaagcctagctctttttccttaaaatataactatagcattggtacaccaaaagaaattaaacgtattcgtcaaattcatagtttaattgattagagtagatgagaaaaccatttgctgtttcatacccgacttttttccaatcacgtgaaacgtaaaggtaaaacatatttgtaactaaaccatatttttctttctttctttctctcgtgtttgttttagaacctaatctgatctgaatattaacacacaaaaagatgataaatgagaacatataacaaatcatgaaatgagatgagaacatacttctctagaaaattttctaaaatatccgaatcaattgatggcgaacaactaaacagtagaatacaatatgtatattaaacagaaaatcaaacgctaaggaattaaaaatcatgaaaagattattaacacgagagatgagaacttaactctccgaaaatttgtcctaaaacatccatttcaattttctcgcaaagaattaaaacttagaacacaatatatcaaatcaaacgtgtatgaattgaacttaaaaatttacatgttacatcagcatctaaatttttataaattaattcacgacttatggattagtatgtatattcaaaaaaatagttggcacgatcaaaaaagaaacattaggtagctataatctgatagtgaattaaatgaaaagtatttataaaaaactaagaggctgctcatgatttaggattttacctttttacaatttccagaaacacacaaaataagaaaatttattttgtgaagttacattaacatttatatccaatattacacactaaaaaaacgaaaccaccatatattcattattataaacatatggcttattaatctaaatctgttaaactatatatctaaatctgttaatctaaatctgttaaattatataaatatgttattataaacatatccttttattatataaatctgttaaattatatatctaaatctgttattataaacatatccttttatcttctaaatcttactaatctaaatctgttaaattatataagggtgtttaaaaaatggatatatatgtttttgtccacaaatgaatatatacatttatatcgattttttttatatactttcgtaaatgttaattgatgacatgtccaaccgtaatttgctgtttaaaattttatgtggacggcatacgaatcaaatagcctcgacttttctatagtataaattgtatgtaacttgtaggctctctctaaggcggaacgctcccctaccgatgtattttgacatcccacagcttcggcccatgtagtctattggttatttttgtggttcagtttaaattttaaatacatgtatttatcctcaaacttttttttttgcgattctcaaactatttaattcaaatccagaaacggtttatttctccccaaaatacatgtatttatccatgttaattttttttatttctttggcttaagtaataattagatcaatacattttagaccaataaacgtttgaacgtctttttgcatcagaacgtgaaattaatgtcaaacgcaaacgcatgtacaaatcctgaacaaacataccgcttaggtgatggatggttgcgtaagaacaaaacaccttaaacggcagcgttttgtaggagcaccgcttcgcacgtttcttccatatctctgatcacgtgatagtcgtcttcttcagatcttttatcactttcttcttcccggagaaaatttggccctaaatcactttcccgggaaaatcaaactctggggaaagagttgaaacaatgtcacaaggcgatacagtaccgcttcatccatcgtctcaatcagacattgacgagatcgagaatctgattaacgaaagcgtccaatcaggtcccggaaccgttctcgccgctcgtccaccgagcccaaccagaccttcgattccagtatcttcttcttcttcttcttctccgtttatgcaatcgaatcttccaccgcttcatccgtcgtcatcagctcagaaagtgacacatgtccccgttcctccgcctcttccggcggtaagtaactccagcaatttccaaggagcgagtgcttttggatctccgcctaatacgttgacggagcctgtgtgggatactgtgaagcgagatctgtctcggatcgtgagtaatttgaagcttgtggtgtttcctaatccgtatagggaagatcctgggaaggctcttagagattgggatctttggggtccgtttttcttcattgtgttcttgggtcttactctttcatggtcagcttccgtcaagaaggttagctctcagatcagtagctagtttctctcagctttaagcttgtgtgatctaaatgtgatctggaactttagcttttaggtatctgatagagttctttagaatgtctctgttacagaaaatgagtgggattaaagatagcatttcacttcattgcattaagattgttccttcaattgtgaattgtttgattatagatggaacacgatgacgggaaacaaggattgagttacagaaaattaggagtttttaaatgggagtgaagatagcatttccacttctttgcattaagattgttctccaattgtgattttttagattatagaaggaacatgatgaagaaaaatgaggactgttcttgtggcattgcttctcacttgattcttaggctataggttatataaagcttctttcttgtacagtggatcatgtaggattttgactcacaaagtagcactttggatgcactattctgagttattagcatgtaggtctgattaaaggattgaatttgaatctgatgtaattacagcttatcttgccgatattgagtggcttttcatagaatgctatctattatctatcagaattcgtctttgtctcataccttttccctttgattccagtccgaggtatttgcagtggcatttgcactattagcagccggggcggtgatccttacactaaacgtgcttctcctggtaaaccaccactgctctctccttgtatctcgtgcagatgtttttcgtttgatcacatacttacaaccattatgttgtgtcatgaacagggtggacatataatcttcttccaaagcttgagccttctaggttactgtttatttccgctagacgttggagccgtgatctgcatgttgaaagacaatgtgatactgaagatggtggttgtgtctgtaacccttgcctggagctcatgggctgcttacccttttatgagctcagcggttaacccaagaagaaaagcactcgctctataccccgtcttcctcatgtatgtgtcagtcggttttctcatcatagccatcaattgaatccccaattttgagaagaaaaagggaatcatcacaggtattctcaggaatcagcttggatagaaatttttcatacatacacaaaccatcctgagttctgatgatcatgtataaacatgttttgttacccttttttgtgggtttggttaaaaagaagatcatcatttgtatgtgccccgctctatctgcattaagcttacatttatctttttggccataaatacaatttttttaccaaacattacttcatatggtttctcgagatagtatcgacatgcaattttgttggtcgtccacccaaccctaaacacgtgttatagtattaacatggaaatgtggaaaccagatcacaaccatgctaaaacaagggttaaattttatttagtaatcattagcataatcgaatagattatgaacatatttttgatatataataataccaaattcaatatttgctttaaatttatatttatattttggaatcgcaataaaaaaattgtttacacaatccatcattcgttattttcaaaattattctacttattttattcatttcaaaattattcgaatacattaatgaacatcattcatttttcaatttttttttgttattcaacttatttattcatttttatttatttattcaactttttaatttttattttgttgttagcttccatttgcatatgcttcgtatcgtatatcatcacttccagttttttaccggttggggggggggggggggaagaagcagagatgattcgtcaacaaacaaaaacgaatttattttgaaccaaaccggatgtatattttaaaccgaaatcaaaccgggaaaacctgtattgacgagccctcttcttcttcagctagtgagaggctgcctcacttgcttgctggtttgatactgccaagtttttcgctttctcagctcttccttcgatggtaatcttcaaattcctttcctttagacccttattaatcttattgcttttgtaatagacttggtttagtgtgttttttgtcgtagcgagtttaatcttgttgctggttattgtaaggttggtgctttgaatatcatgtcagagactggtgatttatgtgtagaacttcccaaagatgatcccttttatcaccacaaaaaggttcaatttcctaatttctctgctcttctgttatctcaatactcaaagccattagctttttttttgccttatagtctaaagatcagatttttcatgtgccaaagtcttaaaatattacactgtttagtttttctcatgttttgtttgagtttttatgaaaatgaattttcttatgattttgtgtctgtagaagttcttgagttgcaaaggtttatgcgtaaaggaaacattgaacctcagtggatcattatctcaacaactgttgaatgctgcattggaaaagttgcttcattttggacgaatagttaatctcgataaggtaagcaaacatcgtaggccattgtaatgcatgtgaagttgcttagatgatggattgagtgaaatgcaggtggaagtttactttggtgaggatgcttgcactcctgcaggaatttacagtgttagaaacgaaatctcagctctcagctggatcctttcgcttataccggtttcttgtaagatgcaaacacaagttgatacctttgaagctctacgagctgctttaaaaggtagaatcaatgaggttgttggagctgaaaaggagaaagctagagttgttgatagctatagatgcgaaaaggaaagcaaattagtagaatggggtcaggacaatggagtcaaaaccaaattgcagatagctcgtaagcttaacggtttttttctgttatgaagttatcaacagagatttaagtttatgacaatgtgttttataaatttggatagaaattgatggctatggacgaggagctatagctagcgaagacttgaaatttggcgatgttgctttagagattccagtctcaagtatcatttcggaggagtatgtgtacaactccgacatggtatatcatttgagttcatcctgatttaaagattgcgtcagtttcatcatagcaatgctatatgatgagtgttctcttgtcttcagtacccaatattggagacgtttgatggcattacatctgagacaatgctgctcttatggaccatgagggaaaagcataacctggactcgaaattcaaaccatactttgactctctgcaagagaatttttgtaccggtaaaattgtttggagaactaaatattcaattcttgtagcagtgtttgtttcaaagagacaacaaacattgattctctcattgcaggtttgagttttggggttgatgcaatcatggagcttgatggtacattgcttttagatgaaataatgcaagctaaagaggtgtgacttgatcccatctcttatcttttggttctgtgatttgtattatgttcttgattccattggcaattgtttgtatatctgcagcttttgcgtgagaggtatgatgaattgattcctcttttatcgaaccaccgggaagtatttccaccggagctctatacatgggaacattacttatgggcttgtgagttgtattactcaaatagcatgcaaatcaaattcccagatggaaagctgaagacttgcttgattcctgtcgccggttttctcaaccattctgtatgtgtcttctctcgttctgcctctggtatactaagtaattcctatcactatccggaatatgataatttggcgggttttgcagatatacccacacatagtgaaatatggaaaagtagacattgagacgagttccttgaagttcccagtctcaaggccttgcaacaaaggggaacaatgttttcttagctacggaaactactctagttcgcatctgttaacattttacggatttctaccaaaaggggataacccgtatgatgtcattcccttaggtagtttaaccttacctcattctgagatcactcaggcttacatgctttttttgctttaagttgtatctcttccttgcagattttgatgtcattgatgatgaagacatcgagaccgagttttcttggacaactcacatgttacgcgggacttggctatcgagtaatcacaacatcttccactacggcttgcctactccattgttgaactacttgcgcaaagctcatggtcttgttcatcattctgaaacagatgtatatattcttcatcaccttcgtataactacatctatatctctatgaatctaacacttaagatatttttctcatttcttgattcttttaagttatggaagaacttggaagttgagataggagtacttgagaatctccaatccacattcgacgacatgatgcaaaatcttggcgatgcagattctatcgacaggtatcagtagttgtcttgtcatgatatacaaaagctgaaacagagtgaccaattacttagtaatccgtctggttttacacttttacagagaaaacgcggattgggatgttaaactagcgatggagttcaaagagcggcagagaaagattgtctcatccattcttgattcatgttctgcaggtatcaaactagttcaagaatccataactaacccaccggtttagctaaggtagaatgagatgagaacctgatcttggattcagcttatactgtattatgaaatgtatcttcttgacaaagttaaattgtgtgagttaaaagactttagttcaattttagttacattttagttacattttagttacatacttcctctgtttaatctcattagacacctctttttttcttgcttatataattgcttcatatccacgtaatctcattagacacctctttatataatctcattagaatttataaatttatgtacttacgtacgtacgtacgtgtgcgactaaccctagacaaattaaccgaatactcttttttttgcaaatgcatcacgcatggtaccctaatagtggtgtctccatcatttgtcattactttctgaatgcaaaatgagtaatcagattcattaacatttgactaatactatattttctcatattttttgtgggcatagagaattatcagtattttgagcatattataaaagtaatctcaaatgggaaacataacaaataataaaaaagaatgaaaaagttgatgtggctgctggtggcagcaaattggcggaccccatcttccaggttacattcttgtcgttttccagcttcttaacacagagctataatctcatgcaccaaagagcatactaatatcctatgtctccgagtaataatcagccacgtttctataatagacacaagttggtgtgacactgacaagaaaataaataagatttatagaaagtgggaacagaacacaaaaaaaaagctgaaacaaagagttcgagaaaaatttcgattctcttgctcgtaaaagcttcttttgattctctttgactctgttttgtggatagctcctgaagaagaagaagatgatggtagtgaacagctttgatctatggcaaaaagatgttttcttctctgcagctgaagaggttcaaaaatctacagatatgtatggtttcttgttagattttgatcttgtaatctcttctttgagcttagcttttgatcttgcataaattaagagattgagatgtgtttaatttgctattgttctttacttggattttagaatggagtctgcttatagattgtggattagagagaagaaagatgagatttgtaaggaacttcaagcagctttaggtacagctaaatggcaggtacaataatgtttcttgaaacatttctggtttagttgtgttcttgttcttgtctagttcttgaaaagttttgaaactgtgttgaatcagttggaggagtttgagaaggcagtgagattgagtcataaacggtgtggggataatgattcttcatccacacggcataaacagtttgttaccgctattgaaaaccagattcatcgcgtagaaacttctctgcaagaagcttatagtgaaaatgggaaaaagcctctccgttgggttgatcttaatgaagaagagcgtgatgacttagcaatgtttctctctggatcttctcgaacttcacagagttttagtggtgagagcagcatcaagtcgagagagtctactaatagttctctagttgaaaacgttatggaagtttcagctaaagtaacattcaagaaagctaaagtttatggtgatggctctgagtgtgtcatagacattgaagaaagagtgacacctggccaagcagagaaatcagttgggctgagaagaatatggagttcaccaaatttcaattctttgagaattatagttcctggtggtgataatgaagaagaaaaggagacattggtggcacaaatagaagcgacgcctaaagttaaaggaactaagtctgtattgtggatgcagagacttcctgatcataatcaggtgagtgtgttgatatataagctttagtcatggtaggaggaagtaacttacttgttcagtgtttttttcagctctttgacaagaccggttgctttcaaaatccgatacgcttaccgtttaatcacccgatcaagtttattgtttccttattgctaatggtgtttctactatgtgagtcacttcagttttttttcttaatgaatcaatactttgctaaatatatagattttggtcttgagcttgttaatattgctaacgagcattgctttttcccctgtttaaaccgatgcagtacccttcgtagtgtatttgtcttgagaattttaccacggttcgaaactgtcaagaagctgctaaagagatcagctttcgcgtctaatggttaggattcataatcccacaagaacaaacagagattaaaaagctttacatatgttacttttaacttgttgctttggttcttcagggaacgtatagaaacattgaaacgtgtaagattaagtaaagggattagagtttatattacggctttggctaccgttgataaagatgtaaatgcaatattcgtttcgtagatgtttgacaatacaatgccataagaatcaagatttatgccatgtttttatgaacaatttcttaactacatttcaaaagagtttgctctctaaaccaacaacttggaatcttggtacttggattttgtccctaactttatattgggcctctaactttatgaccaaagaaggtccaagttttgttagtacaaaaaaaaaacagtttacatacatctctcagtcacctccattgattatgcagtagaatctgccttgtacactcacaaaaaaatataataaattttactttttaaataaaataaacgtctttgttatgataaaatttacatcttttctatagaatcctttcaatattttatattttaaagacagtaaatttatataaacttatcataaataattagtatgattttataatttaagagattattatacctaactcagaaattggatttcaaataataatatactcaaataaacgtttgtatgctatattatacagtaaaacctctataaattaataacgttgggactacaaaattttattaatttaaagaggtattaatttattgataaattaatattttattaatttatagagagatttttccaaatttagtaattttttacaaatttttataagatttctttcattatagaaaatatctttctaaaacaagttacaaataaaacataataataatgtataaaacataataacaccaaaagttttaatacagtaaaatatgaaaattatagtcaaacaaagaacaaatatgaatttaagcaaaaaattattataaatctattttaaagaatttttatacataatatatatatatatataattgatacatttatataattattaacttatgatattgatgggaccatatatttacatagaactttcaaaaaaattattatcttattgatttatcgatttgtgtcactttttacattagtcctaactcgtgactggaaaaatttattaattttttgaggttctactgtatataatacttaaactgattaatgagatatatccatttaataaatttataaataaatttaaattaaaaataaaatggaatgataaagattttttttaacagagttttctagcacttaatcttctttgcttccctttatttaccataaccacaattctcatctaattgtcaaaccttgatcttcaactcaaattgaagctaaaccatgttcttaaacttgacatgtgttttaaataaataccactttgttaacacagtttttaatcaacactatattctgccagactgccatcatatcatttttgcaaggaaattttctcaatatgattatctacctaaatgatactatattttaacatataaggttacgttttgattctgtagtttatggaagaatccttataatattattcctaaactaccttccctgttttatttctactcaaaaaccctttttttttttttttttttttgtaaatctcactttcttcttctctcttcaggctgtgaatattctgatttctgactaagctctctacaattctctctcatggcctcttctctcgacggtaattttctttttgggacagtttttagaaatttagtgctttcgctttaagatgaagccttggacttgttagagatttttttttctttttcaactcttgatgatcggcttatatatagtgatgcttttactcataatttactagtgaatttttattatcgtgttttacttttcaagatcaatttgttgtttgcttaatttggtaatggaaaagtcttttgtcaaaaaaaaaagctattggtgggtcattttactattagctattggtgggtcattttacttcacgcaggagctgcaagtaactctaatttgagtgatgataaaaagaaacgaaggaaaaaccctaagcctcggcacttaagttcgtatgggaagcgtaataacactccagttcaaccctcaggtaaaaacatgtttcacacaagttatttttcatttacactatttttcagtttctcacacattatattgcaacaattttttcattagaaactgaaaccaagagccaaggcaaaagagtttgcttcaacaactctgatgtaagacagatgaagcaaaacacttcttctagagaaaatcagtttggcataaaagaaactgtcttggagaatttccccaacgtcactcctcagtttatgtcagaccaaatcaatggccatcaagataaacctgagaaggcgaagaagaatccggaaagctatggtttagggcttgagcaatgtgtgaagatcataagaaagcttgagtgttcaggttatgttgagagcacttttagacaaaagtttttgacttggtttagcctacgagctacgagtcaggagagaaatactgtcacgacattcatgaatgctttcaatgatgattcaatggctctggctgagcagctcgttgacacattctctgattgtatatggagcaagggttctgtgattggcgatcgcgatggaggtggcagtagtggtgtctcatgtaagaagccgcgacattgattagaagagattatgtaggcattctttgcagtttcagtcttttttttttttttctttgggatcacgtaaaaagaattcaactttttttttaaaatttttcattagcattttcatggacatcacaatttggtgctggatatggattttctctttttctagtgtgttgtattttttttcttcccgattgttgaaagttcaagataataaccatatcaaaacaagctatttgtaaagaaggatttcttaccaatatatccctcgcaaattggctataactagctaaggagttgtaaaaggaaaaacaatcctcgcaaatcagttctttcaaactaaagaaactcacaaagctctttcaaaatttgcaaaagtgttaattagcaaatctcttgcaaattttgactagcaaatccccatgaatattgtgaaggatttacgacttttatataatttcaatttctttttaaaagagtttggttttggatttggatgagtttagaattgatcggttgctttatcaaaattgtgttgatcatctttagaatcttggaaaatgttataaaaaattattaacgaggttttgaaaattatgttgctatctttattacgccacataaatatcaaaatgtgcgatgtcgagtataccaatgcccaatttcacatttagcatatatacaaatagtataatatttgtataatgttacatatactacaattttcaaaaaatgatacataatttaatttataatacacaacgagtcacgacgaagatattgctctgcacgactccaacgaactagctagagtaaaaaacgttgctaagtcttacgtggcatctcccgcccaacaattcagcaaagttagttattgaatgctgtttagttattctcagtaatgcgatagacccaacgaaactatagacgaccactaataataatacacgtaagcaaaaatcgaaccactaaacaatcacgtgaagaaacacggatacattgagtgcaccgttacgtacacaatcaaaccaattataaatgatttaatttaattgtctgttcactccccaagatagatctatccaagagagacacacattcactgcttttgactcacttttttaatctttttggattttggtgaaaaagtttaatttgtctctttctctatttatctccggcgtcaatttcacggcggctacacgacggttatcgatgtcattgactgtaccggagttcgatttcagagtaattcttctctctttatctatcattctctctcactgcttcacgaaatctctcttaagcttcatttgttgtgtttgcttcttttatagttgacgccacagtttggtttctcacagtcaccgatcgggtgagttttctcgtcatttctaggttttttgttctccgattggattcgatttttactctgtgtatccatcagggagcgtaatttcgcggatgttgataatctggagaactgtattaagtatttgaatcagagcttagtcacctctggattctctgcttcgcttgacctcttcgctaccgatcctgtgcgttttaatcattctctaattgttttttttcgtttatcgatttgtttgatgaagctgattcgatgaacttgtattaggtttcgattgctagaacttgcaattgcgtatacgctttgattcaacagaggcaacgagatgtggaatttagagaatctgctaatgatcagagacaacggtgactattttgttttttttatctgaatgttgatttttctatgtgcattgtgaattaatggatgttgttaaactaatttagtagcttcattatgatagtgttcattcttaagcatgagattgactctgtgagatagatcatgctatgaatatgtttttggtttagatttagacatgaaacccctgtgatctagattttgttactgtttttggttttatgtgtgtttagaatatagttatagtgaacttcttttgggagcaaagaagaagacaaaaatgcttgagataaagttactgaaattgccatttttgttgcatctatgaagctttctgcatgtgatatgtcattgtttttaccaagttcttgtttacttcagacttttatccgatatggcgagactcgaagcaaaagttgaaaggcttgagactcaattgcaagctaaagaaagggaacttggttcggtgacaagaacggtaagagatatatatccgaggttggaatatggacaacatgtaatgatggatcatgacatactttttttggtcaggaagcaaaaaatacagcggctttaaagacgcagaatgagaagcttcaaaaagagagagatgagtttcaacgaatggtgattgctaaccaggtttgaatcgttgcttaataccagctcgaattctcagtttttttgtgatgcggatcatgtttcaaagaatttgggaatgctgatgcaatgctttttgaacattttgttattgtttgtgtatgaaagcaagtcaagacccaacaattacatgaaacaaaaaagaaagaaaaagagtacataaagttacaggtatgggttcacatagcaagttcagagtgtttgtaatataggttcaatcttaattaattaaaaattgatcttgttttaggagaggttaaaccaagtgttgatggagaaaaagaaggaaacgagatcaggcatggagattatgaatctactccaggtactatatgcgatttgaaataactattatcgagttttcttagactatcctctttcgctaatgaacattttcctgtaaatatatgcacagaaagaagggagacagcgtggaacatggagtgggaagaaaactgactctgatttctacaaaaaaattgtaaccaccatgacaatttagctttctcaggccttatatttcattgaatcaatgtgttactgacacatatggcgcaatatgatattttcaggtggatgcatatgaggcgaaaaatcaagaactgatggcagagaacactgatctgagagcgttactacgatcaacgcaggttagtttgcttattcttgtctgagaaaacttttgtgaaagaatcttttatgatctttgtattgaagactatgctacgttttgacagggtgacatgcgttctttcttgaatgcttctggtggattaaccaaccaatctttggtagctaatggaagacacggtgcagacccttctcagtctcctttgggcgggaagacggtacataaatctcattataagctaattcaattttcaatcgattcctgttgtatatacacagccaaaacaccagtacatatcaacaagaatgaatatcggtattgacaggacgtttttgacctaccttttcgtatggcacgaggtcaaatagaagatagtttacgctctaagatggtttccatcaaggtaagaaacagtctaacccgagtttacaccttttaatctgttatagctgctcatatactaacctgttccgtttttttgtttgcttcgattactgaaggaacgtatgggtcagttagtagatgcacaaaaagaagtatccattacttcagaagcgtcagagagggaacttgaacttgaagcacaactcgtcgaggcacgcagcattattcaagaacaggtattttaaaacatatccttctttgatttctctgttcttatgattatctctagaaacattacaaatttacaaaatcttctgatgcaggaatctataatgtccaaacatttacctaagacagatcggagaaggaactcagctcctccacattcttctgtcaacggactgcgtggctgactaattagattgtgaatctcaggttcaaaatatcaaatctcttcctgtaatttgatcttgctaaacaaagaaatgttttatgaacttataaaaaaatttaaatgaatgtggattcgtatttgtaacgttgtacagaacacttgcagacagcaagctgcaagctgtagagtattatagatggagagatatgttttatatcataatatagatgcctttctttataaaagaaatcgaattatttcatgtgtgttcccaaatcccaaatgcaagcaatcttaatgatagactgattgtagacagactcaactatgttagtacaagtagtacaaaagtttatgtaaaaaaaaaaaataattaaattttggagactttgatgacaaagttatatactacaccataatacgatggtctgaaaaaacaacacacaacaaaaattggttgatacaataaaaattagattaataaatatatacatatatgattattcaaattaatgatactaaattaaaattgataggggcatattgttagagtttttcatcaccatatctatatatacatttttgcaaccattttaacaaataaatcttagagttggacttatttacaacccaatgccattagcattaaatctttttttcaaaataattagttttactttaaattcttaatttaaattgtcaatcacattatcaatcaaatttaatccaaacaaacttcacatcaatcccttaaaattagcataaaagtattttgttaacaatattttaaaacaaagttttttgtttaaataaatattgttcttactaaactttttttgtttaaataaacaaatcatgtatttgaacttatttacaatgtcatgctactgacattaattatttaggcatgaaaatatttaattaaagatttaaatcttctaaattcttgcttttagagttattatatcattacctaaaagacaaaaaatattaattttttaattattattatttatatatttaaaattcataaaacattattaataattaaatttataaaaagtttaatatatcaaaaaaaattaacatcattatataatatatagagtttaaaaaatctcaaaaacaaattcgtcatattttgtgattcgaaattttaagaatgaacatatattaactaactggcgaaaaatgtgtgggttcaacgtcccacaacgaataaaatattttgacaatgattcataaacatattataaataagatcaacattgataaaataaataatttttttttgtggacgggtttggcgggacgggtttggcaggacgttacttagtaacaattgtaaactataaaataatttacaaattttatatatattaatttaaaaaaatgaattgtcttcgcggtgtaccgcgggttaaaatctagttattattataaacctagcatgcatacttagccctgatgcatgtcataagcttgctttagcaacacgaaagctaaaaggcataatgctttcttgagataagaatatgttttgtttcataaatatagatatttttcaaaataaaataatcggattgtttcatgattttcagataacttattcgacccaagatcaattcagtacccaaatatggaaggtggaaggaggtaagttctacaaatacattcgtaaccccaagttctccaacaatgacaagatctgagaaagatatcatcaacaaatctatgtaaaataacatacttaatcatgatataaacatttttatacttggattatccacacgaaagaaagagttttgcttgagcaacaaaatgtgttcagaaggtacccccaccggtatttcttacaaaattaagggtacattttagtaatacttattaagttacatttcagtttctgaatttttttaaagatcatgagagtaatcgttgaatacaaatccaaaaatccttcaataagacttaacaattgtagttcttttgtttaaacttttacttcttttttttatcattcttaaggaaaaattacaaaattatcaaaaacaaatcagagataaattatttctagataaccactaatatggattatattctagagtttcatgtaaattatgtaatacaaatatttttggatgatctagataaccactaaaatggattatattctagagttttgaggatacaccttttttgtaatatatatatagtctggattcaaatatacttatatagacaggtgcaaacaaaaaaaaaaatctattcatggtcaataagtgaaagactacaaatctaaaacttattaagaaaagaaatctacattttgatatcatactgaatttgattatatttcatttaattaaaaaaagtttttaatagtgtatgattaagaagtaaagttaaaattaattataatttaggggtcacattttaaaaaattgttttagaccaccaattattgagaggtcccgcttaaatgttgaaactaaatctcatatatctagagttttgaggatacacatttttataatatatacagtctggactcaaatatacttacttatatagacatgcacaaacgaaaagaaaatatctatccatggccacaccaaccgaatagctaaaagtttaaaacttattaaggaaagaaatctacattttgatatcatactgaatttgattatatttcaattaattaaaaaagctttcaacaatgtataattaagaaataaagttcaaattaataaaaaaattaagggccacattttaaaaaattgttttagaccgccaactatttcagaggccgcgcttgaaactaaaatctcgtatcttctagggttttgaggtgcacctaattttcctatataaagaatttttacatacattttcgaaatcgccgaaaaataggagagagcgagagttcatggtttacatcaaccgaaactcgaattcttattaaggagaaattcattgtagttttgttgatctatatcttgtttcgcatacggatagatcttctgcggaccacaccattttttccgctcatcaacttcaaggggataattttacaccatttcaatctcataaggtatcttcacatccctatttgatttgtttcactacatagcgagcataatacttttgaataagttgtaaattttcatgtaataattgtttttaaagtgttagagacaaagggcatgaacttgttaatgttccagatttgattttcgtatgaaaactattttacataaccatcatgtgtagtgaatcttttatgtattcaattcaacgagatcttcatattaagattttgaagaaaagaagaataaatctatacatcataatttaaatatctacatctaatatatactaacaatttggtcacttggagttcattgccaaaagttatgtttttcaaagaaagttcactgccatcctagtgattctaaactcttaggatatgaatggtagacaataggaggaaaaggataaggtaaaaacttttaatgaaattgttttgactaatattttgggggtgaaaaaatatcactactctaggacactatttcgattaagacaactattaaaagaaaatcattttcatttttaaatgaatagttaacttacaatattcttagcaacaacaagtttcactaacataaaacaaagctcaatctcgtctttaagtcaagtaaaactttgatttattttattcatcaacctaaattaccattcaacaaattttcataacctaatgtaaaatgtaattctaaaaaaaaatacgaatgacatgcaaagtatcatgtgtccctacatttataaaaactctcttgtttcgtcttcttcttctccagtctctccgttcaacaaaaattgaatctttttgacatagtttgtataagaatcattgtatttggtattcttcttcttctttttcgcgaacgattactctagtcacaatcttattttctctgtttgagttcatatatacccacaagttttcttttcaaagtctcagttttttttttgctttttctatttcattgcaggttttcaagattccgagtatatactttgggtttgatcaagctctctactactttctttcatggcttcttttcataaaggtaacgtttttatttggattctgcatttcatagttttagaaagttttagacttttttctgactcgtgaagatgaacgtagcgtaacgattgttttaatcttgattttacatcctagagttgttttatttggaaagttacatgattgtgagtgctaattatattggttgatgtgttgtaccataaaagaggaaactttctttgtctaagatgttcttggaacttatagtaatgaatgtggattcactacttgctttgtctttgtgaatgaatgtggaaacatgtatcttgttctcttctgggttttgtgagcttttgtattgttgtttctagttctctggctcgttgatgtctcagcaacatgtagaatttgagttgttttgttctgcggttgtagttgaggtttctttgtgttactgtacaaggtaccaaattagattttctagttgcataaattttgatctgaaatgaagtttggtaaacaagctcatgtagcttttatttttgttgatacattgttattttaggacacaataagcttgttttttcttcttcatccaggagctgcaggtgactcaatgggaagcagtaaaatgagttttgatcaaagaagacaacttgtcttgaagctgtcgaaagaatccgagagagaatttaaagaagtcttgaaggactggagctgcaacgagattcgagagctcttacgtgcagaatcaaagaaagatataaagtacaccggtttgacgaaagatgagatcatcacaaggcttttcaacattgtatcaaagaaaaacactagagatcatgaggtagaagagataattccatcaccaaaaagacagaaaagagatcttgtgactccattagctaaagctaaaggtaacgaaacatgttctttagtagtaattctccatttatagcattcttctgtttctatatcctaacatgaacatagcataatttgatcaggcaagggtaaaatgtattgtcagaacttggcttgccagaataaactaagagaggaagccactttttgcaaaaggtgctcttgttgtatctgctttaagtatgatgacaataaagatcctagtctctggttaacctgcaattcagattctcaattcgacggtgaatcttgtggattatcttgccatttaaactgcgctttcgacagtgagaaatcgggtctgaaagaggatacgccgagtagtgatattgatggatgcttcaactgtgtttcctgtgggaaaacaaatagcaaaatagagtaacttcaatcaaactatcttcttccattatgatacaatctttgatggttattaagtttctaacttttgttttcttctcagatgtttgaagaagcaactgatcattgcaaatgaagaaagaagagtaggcgtgttttgttaccgcattctcttggctcataagcttctcaagggcacaaagaagtacataatagtatctgaagaggtggagaaagctgtgatgcatctgaaaaatgaatttggtgttcccatttcttgtcttccatcgaagatgagtagagggctcgttaacagactttgctgcgctgagaaagtcaagaaacattgctcttctgctttgaaagagcttgatggtcttccactgccttctactatccaaggtaagatcaacaaacacttatgatcacaaaacactatacttgtggtttcttctttcagtgcttgattcgatataaatcacaggatcaatgaagatcagaattgagtctgtacttgcaacttctgtgactttcgatattgaagccgaagaatctttctcatggggagataccaatcattaccgcatggtgtatcgtaaggtctcagagaaacattcctcaaaggatttgactcgtgagttgttcagtacatcaagtcaccaaaggtttacagtcatggaacttactccagctacagagtattggttcaaaatagtttcctttagcggcgtcgaagaattgagcgtagatgaattcatagtctctacaaaaaccctccaagacgaagaagtggcagcagttttattgaatatgtcaaactgcaacaatgccaacaaaatggagaaatcaggaagctgcagttttgggtttgaggaatgtgtgaatctcattaggcagctagagtgctcaggtcaggtcaagagtgatttcagaaagaagtttctgacgtggtattgcttaaaggcaacggataaggagaaacatgttgtagagatctttgtggatactttcaaagacgataaagaagctttggctaagcagctcattgatacattctctgattgcataacaaggaagcatcctgagattggtggtggcagtgagtctgctggagtgtctttgattctgctgcaggattgattagaggagatctgatgagaagcattgactcaagttttaagtctttttttcgttctttcaaaactctcttttggaccatttagaaaggattcaactttgtttttcttcttcagttgggattttttagcattattgagaaacctcagagtttgatgatttgttttgttttttggatatttatgagttagtaacttttcttgaagcacaagtttgtggtattttttttgttattacttattaggatgtttcggtagtcttggaaatatcatccgttttgttttgttgtgaaaccgaacacaacccggaaaccctacgtttctctaccatctaattcaaattgaaaggtttggtctaaaactttaactaaaagaaaagtgaaacgacgtcggttcaagttagtggtgaacctggatcttgttgttgaagtgggctctcggtggatgaagcccaactagacccactgaactagacccactcatcaaaattcttgtgttcattgatagtttagattctggttcgaaactaaaacttagaggcaagtcgtttccaaaagacattcaataaaaattataatgatctcttgcatttttcaaaaaacattaagttaaatgattcacaccttcatttaaccattatcagcgacccaatttgtactctttctgttcttagaaaaaatgtttttttttggttttcatttagtctatagttgctttgtactacatagtctatggttaacatactttctagtttccacactttaatagattgcaattcactattgttagctttcaagttaacataattaccctcatttgtcgccgatagaaaaactaagagttaaatattttcttagtaaatctacgtgaaagaaaaaaaaagaaaaaaaaagtcattattttatgaacatagagtatatgattagcattggtccttggacgactagattttgacgaccaaataagtcctaacttagttaaatttggctcaaaccgaaacctcattaaaagggcactgtttttctagcgttgcttcttcaccatctcgtgaagaatgcaaagaccaactttattgcatgcatgcgtacttcggtatcagtaaatttttacaaatctctctttttcactatgacaaaactggccaaactctttactatatcgacttttgggagttgggaccatttcctcgtccaattatataagtattttttatagctaaaactcgaacctctataacttttctttcttttttcgtattagtcaattatttctccccataaagtaatcaaacttctcgagtatataaattttaactgaaattactcgttttagctttttacgaaaacaaaattagtagtgcagatagtttaatgtatttgttaaaatttccatctatgaatgatttcatataagaatcaggtcgttctgtataaacatctatttcttcctttaatctatgttaagttatagagagaaaaaaaacaaatatttctgatatttatactttccctatagcattggaaatttacaagatgaactaatgatttagaaaaagaaagagagtatgtatagtattcaaatgattttggggacccagagatctataacaaaagagctaataagccaaacgttctagtcaagtctgaaataatggatcctgattggtaatgagtaatgactaatgttgataagccactactaatttttcatttacatgttgttcaaactataatggcagatatcaaacgatgatattattttgatatatcattaaattatatgaaaaatgtttcaaagttttgtggacaatttatctttggattctaatgttcaacaagtaagatataataactatatatgtgagtatgtctaaacaaggtctatcaaaaatcacgggttaacgtaatgttgatatatgacatcaaacaaaaatacatatataatccaaaaataaaaccaatatgaaataacaaaacacagctgagctgacaataaaatgtaaggttgttgtcactgtctaatataaagaatcaaggtctctaaatggagaatggttgggttctcgtgaataaaaagtaaaatgtcgacgtcttgatagctttggttacatgtactcttcagtcttcactctgatattttttattttatggccatcgaccgacggtctaatatttcttccttaaataaattaaatatatgtaaataaatttgtgagaaaagagttttggtcgtagaagtttcgctgaaaaaaaaataatcatatttctatttcagtttccttttcatctctatatatatcaatccacttcaattaagcttcctttgtaataaaacagataaaaacccaattcaacttgcatgtgtgatggaaatgtgatgttggatctaaggaaaattgtgtaactatcctacatctccaagttctacttctcttatataataaactatccgcagagattatttgattgtactagaatttcgggatcaaatgttttatatttggtagatttgtggaaacttcttctttttttgtcgtctgaaataattattgttcaaaaaagtcatttctgaggaatattgtttacaaacgtgatatgatgcggttcgatacttttcctcaagatttttatatatactcttgaaattagttaagtgtgttactcaaatttggatattcgatttaaattttaagaaacatatttaaataatctcttgtatcatatcaaaattctcaaatcaatacactaacatttgtacatctccataaataactaaggttcgtcaagtaaacttatatattacaaacaactcgatcactaataatgtacgacttctttcaatttgtttagtaaaatataaatttaattagcaacgtcgctttaaaacaaaacattatctcagtagacattaagtaaactgttccattcacagagatcaatcctgtccaagtaagtaagtgccatgcgtcgtccaactaatataatatctattcaggccaataacctttagacactcaattaataatgaagtaaagaagacaatcagaagaggatgaaacattcagttgaactgaacatgttttgcttcttcacttgttatggtagttagatcaacatacttatattaatatatataaattaaaagttaagtagtggctaaaatgttaattattctcaattttctttcttataatcgtaaaaagataaagccatacattgataagaaaatgaaaattgtgatcttatgcttttatagtattccaaatttaaggaaaacgatttataatcttcaaatgaacgctagagagttgaccttattatgttctacctatgtttaagtctaagctagtccttttttatacgaacattggtgtaatcataattgtagctaaaagattctccattgcaatttaagcaactccgctttaaatgaaagcagagccataactttataacttgagcataagatagtccatacacaaaaaataacgatggtcgatgagtatgtaatttcacaaatttatacatacctgcatagtggttctctaggattggcgcaaataaaagtgacgagagttaggccgatgggaatgcaaatttggacaacctaacaatagttcacttaaataagtaaaaatgttaggcttgacttctaaaactataaagagagttttagaagaatcaattatatctctgtcaaagtggcatgcattgttttttttacttcattaactactcgacaatattctgaccacaattatttgacgtatccaaatacaccaatagactcacctgtatatctaaacgccattaactcaatcgatttaagaatttgtatatgcatgtttctattgcaggctttgcagccaaattcaaatacgatgtttacacttcaaaaataaacttggcatggtactatataactcattttgtccctatccacgacatatataatgacaggagaaaatattacattatatcttttttttatttatgcattttgctatattatccatttattaatttacagcgatattttcctaattttctatttaaaaaaaatataacataagattttttcattatttaaaatatttttatagaacaaattataagtaaaatacaattatcatgttttgaagacaacatcagaagtttttgatacaataaaaatatgagaaaaaattaaaacaagaactaatgagaatttaagccaacagtaaataatagtattatatttcattgaaggtgtcttacataatatatatatagttgatatatttataaagttattaatttatgatattgatgggcttagatgttaatatatataaaaaaattaaaaagtagaattttattattttgtcgattaatgtcattttttacattggtctttactcggaaccaacataatttatttaatttatagagattactaattttccgagtttaattatagagattttactgaataatggcgggagaaaatatcacattatatccttttcttatttatgcattttgctatattacccatcctcagttttttttgaatattcgtaaatttatagagcaaactttaaaactatactatctacactatttacataacaaaatggtattggcatacctccaaaactgatacaagatacttgataaaaaggagttatcgattcaaaacaaatggaacagatcacatatatgaaaatgtgatatctactctgggtattgccgtaaaatatatttttctgtataattccctaactcgcaaatatgttaaaaaaaactataataaaagcatattgaaaagaagagaagagaaaaaaagaaagtaaaattgagaacatggatatcctccagcgaagctacctgccttgtgggataaaaaaagcataagaaaccattaaagtctcacccacacaacacaaagttccttcattcatcctttttgtgtaacaaacataactccaatcgccaaacgccaaacgtgaaaatcccatcaacgcgaaaactctgtttttttcgttacctaattctctgtggtcgacctcaccgtaaaccttcaccaacccaaattaaattcttctgtgtttttattcacaaagtacaaaaaaaaacagacagataataataatctctctcccttctctgcctgtctcttcttcttcttcctccttccttctttctctctgtgatttgcataaaacctcgagctccttcttcttctgttccattccaaaagaatgaagtacattcgaagcaacagcttgaaacgtctcttctccttcaaacgacgcagtttcgactccgactcctcagaaaactcttctcctctcgctgcttcttccaccaaatgcgtcgagggttttcaagaaacagaccagtttcaaagacccaaatggaaatgtttctcctttcaagaaatctatgacgcaaccaacggttttagctcaggttctgctctcttctataaacttcaaatcctaaaatgcctctttttgactaaaagggtttggtattgcagagaatttggtaggtagaggtggatttgcagaggtgtataaagggatattgggtaaaaacggtgaagagatagcagtgaagaggataacaagaggaggaagagatgatgagaggagagagaaagagtttttaatggagattggaacaataggacatgtctcacatcctaatgtcttgtctcttcttggttgttgtattgacaatggtctctatcttgttttcatcttctcttctagaggctcccttgcttctctccttcatggtaaacataaccttccttccttctttcaagatttatcaaaactttgcttttaatttctaaccatttttatgagtaaaattgttggttttttacttcttgagttatgtgtttggtattttaaagatttgttattattgtttttgtgtagatttgaatcaagcaccattggagtgggagacaaggtataagattgcaattgggacagcaaaagggcttcattatttacacaaaggttgtcagagaaggatcatacacagagacattaaatcctccaatgttctcttaaaccaagattttgaaccacaggtcctctgtttttatcatcttattatttatttttactgtttcattgtttattcattttctctatttttgtaataatattaaaagaaacaattatctttgttttttttagatatctgattttggattggcaaaatggctgccttctcaatggtctcatcattccattgctccaattgaaggcacatttgggtactatttactcaaaattttatttccattattaatagaatatgttttgtttttgaaaataatgatttacaaaaataaaccaaacaggcacttagcaccagagtactatacacatgggattgtggatgagaagactgatgtgtttgcctttggagtgttcttgcttgaactcatttctggtaaaaaacctgttgatgcttctcaccaaagcctacacagctgggtaaatccaaattaacttgaatttttatcttaatttttggtttgactaatctccaatttttttattattataaataaatcatattatctaaagtgtgattggtaaaactggtagaaatttcatacatctgtttaatcacttttacaccatagttttaccaatcaaacgtatactctaccaatagctaacaacatttagatggtttaggttgtttttgtacacctaaaaatcggttcaactattttcttattcagtcatatggatttgaagtgttaatagatatttttataaacaaaatatgatgagtttattcgatatatctccatgttacttatacttataaattgtaatccaggcaaaactgataatcaaagatggagagattgagaagctggtggatccgaggatcggtgaagaatttgatctgcaacaacttcatcgcattgctttcgccgcgtctctctgcatccgatcttcttctctatgtcgaccttccatgatcgaggtacgtccattaaactcactaatggttaacttgtagagtgcatcatttgtttgtttacttctcttcatttttacaagtgaaaacttatctaggcaacaaaagaataatttagtgtcacggaattataggttttttattagtaaagagaaagttatttatgattggttcatgatgagacgtaatcgtgtcgatatgttactcaacgatcgcttttcagttagctcatcggctgcgtgactgaaaaaatgtctttggtcattaactataaccatctttatttaatgcgacatatacatcaaacgttaagcttatgttgctttttctttgttattgaataaagaatagtagtacctttcaactttttgatttaattaaaaaattgtactatatataatatatgggaaaagctcaattaccgacacctaatcttaatcacagtcacatactacaaaacaaaacaagcactatatttctgttgtgattattgaggataatgaagaaaagtggctcatttaccgacacttaactttaatcaatatatgtaattaaaaacaaaacaagaactattaaaccggatttgcaagatcaaaacttggcttacaagaaaatgttactacattcttaattacaaaaattgataatacgatttgttcttgattactattgttttatgaatctttatgtttatgtgttgatttatggtacatttaggtcttagaagtactacaaggagaagatatagagaaagagaaatggaaaatggaagaggaagaagaagttaaagaagagttttggggatatgaagatcttgaggattgtgaatgtgattcttcaatctcactttctcctcctgactctatctctaatagaagttcttcgcatcgtagtcgctagatctaaatttagttgtaaaatgttgaaaaatcaattttgttttgttgtatatatttgtttagagttgtctatttcataaacaattgtagtattcaatgaggtgttttatttattttttggatgtcgactgtttataatattataaccaaactctatccagagtttgcaaagtcatgatatcatctcactaaaagccacattaagagctagggtccttgttgatttgcatttactagttaaattgttacttattaaagtaacacaattattttaataatttctcatcaaatgtcttttggaaattgtaatgcaaataaaataatgagtggtcaaatcagcgaataaaatgcctttttcattagcccttgattttattaatctcatgtatgcaatcagtggagtcgacttcagtgttaaaagagaatagctgaatgccatgatttaaaacattcaatataagaattgtctataaaaactaagtcattttttataaacataatgccatgatcaaagagtcttcaagatccctgactcaaccaatttgagcatgccacgccctaggataccatttgatgatcaatgattctatctaaaactaaaaacattaatcattatatatacataatttgtttttaataataatgcagtcttggatcaatacaacaataataagttaaatatgtggatacttatttggtgtgggagcccatgccaggtgtacgacacagaaaattatcgtagtaccactctacaattaaatatcccgtaagtataaagtctggtattaattatgttcataggtactaaatacaacatcatttgatgtttatgtcgatcgtcttcgtcacttagctacttaacttgattgttacaaaagatttacgtatcttattttgtgtggttgattaataaagtttcctctgcaaagttgggtagccaattcaaccacatttgtagaattttaaacaaaccttttatttagctaagataaataatttgttgtttgaaggaaaaacaatgatctttttgcaaaagtagaaagcttttcgaagacgtaacacaaaccttgcaaactattgtcctacatgcatgtggaaataaaaataaaaaggtaagtgtccccaaagcaattacctttttcatgtacttaaagaataatttgctcaacatattggaccaccaaaagagctaaatatataatagatgaacctcgaatcacgaaatatgaaatatctatttgtattcccattttccaacttaataatgcaaaatgttatcaagcaaagttcaaataaaataatgcaaggtgttagttgaaatatttggattttggaataatttcttttggtgggttaggagcacctgactcgtttcacaattattgagaatctattagcaaaagtaaaaagtccccaaattattttgcttatttccactaaggatatataacgatttcatgaacatttttcaaatttaaaaacgaagcaccctcagtataataaatctcattatgatttcaagaacaatttgcattaaaatatataaatgcatgccgtattttagaaacgaaaaaaaaaaaggcaggtcgtgatatttcatttcgtttttgggtcaaacatggcacaattggttagaatcctgtattttttgagtagcaacaacataaataaactggaccgaatctcacaacaaagagctacaaaatttcctgaacaaactcaacaactttgctcaccaaagatggctgcaaaaatgagctcttcttctgtataataaaccttacaaaaaactttttgtgtaaggtctcattccacaacggccgttcttttctccattagggactcaaagaactcagcacataatttctgaagtggcgggaaatttagtgtggagccgctgaatattgtttcccacggtctttctgatgatacaaacggtgttcccaacgactcaacatcctccattctcttcttgtcataatcaggtaactgcccgtataaggatgtgtacccggcgtctcctaaaaggttgagactttttcgattagtaacatggtataatcaacaaaggttctttcaaatatgttttaagttttaactacctgtctcttccagaccagcaagaccatcgtagtcaacagcgctacgctcatgtgactcatcactattgggatcaaagacaacatattcatggcttccatttacatatgcaaggcgaagctgagacttatctccttctaaaaatgagattgatcctcccctagcctgcaatttagacattgtttaactcgttggattctttcctgtctctccaaggttaaatactaacgggctatttcttatgtcataccttcatcacagtccatatagataccggcttgggatctgatccgttaaacaaaagaatggcaccatctctaccacggaagatgttctccttagattcatctgttttaaaagtttttgggatcacagccaagactgcaaatgctgacgaatccactgcagaggtgacagctatagaacgagaacaagcattttctaagtaaaccacagcaagagttttcatggggaaatcaaagaagcattataatactgaccttctatgcgtaacccatatgaccatgataaagataactttgatgtattccaaacagatagttcaggtcttggaatatgggatgcagcaacaaggaactcagactttccagcgaaacagagcttcgtgataggctgtaataatatatagagaggtttaaacattggtctttatggaaaaaggttccagcttttttagggataacttcataggttttaccgtgagtgtcgatcctagaacagacaagagaatgttcttatctggattccacagtgtaataacattctcagccgcaacagccataacagtgccatccccagagaaagcagcagcagtcattggtttcttcctggaaaatattcaaaggcaagagaatataaatttgatcgccaaggcgaataatttgtgaatgttgaaatttcctagcgcgtagagaagctattacttataagagccaacagcgtgacatatccagctagagtctttatccgtctggttcttgtcactgttgcatacccaaatctgaaacagcaaaagtgatatcagtaagacaataataacaaacaaaaaacacagagagaaaaatgtaaaatcagtttaagaactaccttgaagtcaccaccgaatgatgtactcactgccatggagcgggtagggtggaacacaatggctgagacaccggcatccctgtaagatatacaggaaaataaaatttactctctgcaaaggatataacagtttgtagactaaataagagaaattgaaatctatgtttgcaaggtttacaagaaataaaacatgacaagaaaattgggtaatggtgaaaaataaagctttatccattagcagagggtgaaatattaacctatgaggttcatatacgattgtggataaggtgaaagttttgctgtctggttcagacgcccaaaacttgagggacactaagcctcctattccatcttccggaagtttcacctcggttgtactcatcactgagccatccagggagagagcaaccgctgtcaccacaacctattaccgtttactcaaattatcacccaaacgaaaataatcttagatatactatcaaataaacagcaaggaaatgtacttactgtgatctcatctcctggttgatggtttctctcacaaacttgaatctgcaaaagcattgattaaagaagttagagatttcatagacaggagaaagtggcatagagtttcttaaggatatattggagccaaattctaacctctgaaattccccggtcattgagaagattatatagctgtacacaataattctctgtgcacaaagcagctatgccagaagatcgatcaaaggcaacagtactagccaagccttcatacatcctaggcaatgatgggggaggctgtaacaaaataacacacattgaagtaaacaccaagaaaaaggtaaagcggttgcgagagtttctagaatcctagaatcgttgacaaaactgacgagaatgattacaggtccttaattattaagtttccaagacgaaccttgattccagaaatggtccttaagatctccatggaaggcattttaagcaaatggatctgattatctgcacaaaccacctgcagctctcattcgtagtcaaatcagtaaaacattcccttttgctttcagcagttgtgtgttagattagaatgaaagagtaagctccgacttacagaagaaagagttggatctggagaccacatgaaatacagcaagggggatcctatccttggtaagaatttctttttccctgtgtctagctgccaaacgacaagtaccccttcccttccccctaaagagtcagaaaacagacgcaatatggagtaagaagtcaggacattactttcaaacagtaaatttgctcatgacctattagtctatgtcggttcataaatccaatggatatcagaatataactcggccgcacctgaatacaaatatgctccatcggaagagaaattaaggacattaacttcagcagaatgccagtgccatgtagtgcaagattcagcatcatcttcacctctcactccagcattgtccaaatcaaccatggctctcacttttttcttttgattacccaaggcaagttttctattaccaaatcctctccaaatcaacactcttccagttacatctccagcagctataactctctccgtgggatgaaaagcaaaagcattgataacctttgtgtgatgtaatgtcatcttccttgaaaccgcatgccttgatcctccagaaggaacatcccatatatgaattttacacttgtgacggattccgaaaaattctcccgagggactaataacaatagattctggttctgccgtctacacaaagaaataagcaaataacttgagcttacacaattcaacttcaagacaacattaaagacaaacctctttcaaataagtccattaaaaaaactaacctcttttaaagtatctccacgaggaatacgcgacttagcgaggttaaatcttcggatatgtccacgcaactctttagacccttggttaaccacacttatatcctcaacggaaacataagcaaccaacttaccagacaactcacgacgtttatcaatttgttgaggttcgctcaaaagagatggtataacctaaaacacacaaaacacatagattcatttcatcaaacaaaacactcacaaaacctaatcaaagtatcaaactttttttatactcaccatagagtaaatcggaagctgagcatcaatagttttcaatagctcaggtccagagaaatcccaatgacgaatagtaccatcaagagaagcagtccaacaataacaaaggattttttgagcaggacttgatgcaggaacaacaattagagttgttactggagctgtatgaccttcaagcgaagtaatctaaaacagaaatgtatcaatcaatgattcgaatagaaaccctaacaaaatcgaagaagaattaaatttttggtacctgtaagccagtggcggcgctgaaaacagagacagtgtttcctgtgcagacgagaagctttttagcgtcgttggagaatgatggaggtgaagttacgtagcttcttccgccgcgtttcatggttaatttccggcgatagagagaggcggtgaaattgggaagagaagaagaaaagggagacgcacaaaattggtttacttcaaaagccctaacttaaacccttcttcgtctcttttgtttttttttctgctcaattacatttcagtttttatctatttatttaatcggaaaatattaaacaataatgtttttgggcctttgtaatgggccttgttaggtttgatgaagataattattgaagttttgagaggtatctagcaaaagttttcatgtatgacaacaatcaaaagaaaaacactgagcaaacttttttgaattgagacaatatatagattataacgatacaattaaaaagtaaataatgtgattaaacttacaacaaaccaaatgaccaatgacatctctccattttgctttggagatttcaccattgttagatgaaactagaaagagctactacataggttttgaaatataccaaaagaaatctctaagattaaatatcatctgaagagaactttcctcaagactcaagcttttttgaactctctcagaaaaacagattttagaattggccaaaggggaaatgagtttatacatggttgcttatacactctgtactttccccggcatctcctttgctttcacggtcttcatatcctgcgttcgattcaaaagatatgtgttaactacaagatttacttgaggaacataagcaaatcaatgactaaagagagtagtaactctaaaaccaatcaatgacatttttgactaccaaataccaatgaacaatttttacaactgatattgagtgaatatcaagcttcaaatatgttgtatcaatttcattggttgtatattgttatgttcattagcctagaagcaaagagcaaaaaaacacttaaactagctttacttctaagcttacgcaaaatgtacatgaaacaaaaagctgatgaatcaatcggactaaaggaatcgattatcgatagaaactagtacaaagaacgatacaggacccgcaagaacaagaaactaaacatatagagactcaaaggaaacatatagagactcaaaaaaaaacttactgattctttgctttcgtagtactcatccaaagcccactgatacttagattggtttaacccaaaccacctcaccaaatgatcatccacacttgaatgtgctgtagtcaaatggattagaacacacacacacaacatgaatgtcaaattcacaatctaattgcttttaggaccaaatcacataaacagtatgaaaagctagaattcatgtaacattagtactttccaatcacttcacaaagatagaaactttacaacgatttatatcatttttgagttcaatttcctaatcaatcaatcaaagggtatcggaaaaatcaatctcaaattcaagatctaaaaatgaggaaactttgagctgaaaatcagttaattgtttatcagatttctcaccattttgaacctttgtgacggcgtttttaaagaaccccaaaactgagccgtcctggtcagaagaagccaccgatttaaactgctgcggcggaggaagaaccggtggtgccatcacaggcttctgagacacagcggagggagattcaggtggtttaggagtcgcaggaggagtcataaagacagtgtaaggaccgatttttccgataacaggaggaggtgttgatgggtctttgttgatcggcatcttgaaagtgttaaattgagagaaaatgaaagagaaagttttcagacaagaatctgagattaagaagaagaagaagaaaggttcttgcttgctagttgtagttgcaagttgcagacagtgaaaaagtggaagattagtttcaggggagagagtgaggttttggttcgtctctgtgttttttttcttgcaagtgtaaatgtactttacttttcacactgaccaatgaaagagtcaaacacacttcacatttcttgcattcttttttttttcctgctttttccgacgaatctttcttttcttttttttggtccttttttttcttaataattcttcaaaaaaaaaaacaattattatatgatccgtggagaaaagatctaaaccctaaacacaataattttgatttcaatcagacatgaaacattttgggaggacaaaaaaaaaggtttggatttagatcatttggccacttgcactacaaaagacgttatgtacaatccaattcgtaatattgcatatacaaaaaaaaaacattaagtcaacagatgaacaaaacatggacgtatcaaactcaccatgtacagacaatatgaacatgtttttgatcaatgtatagatcttttgtccaacacatctaaatgcctttttaacttcatcacttgatcaagtacttgcagtggtagaagttgctagtaacagttcatgtgcttcatttaacatccactcttcaccggtctgaccacctaatacgaccaatcgagttcctccgaccacacatgttgtgtgtccccatgcaaacctcggcggacctccctgaacattcagtattctccatgccggtttctcctcatttggatcaagaagataaagctgagaagccgagtcaagccctgcaaccgaaccaccaaagatcaagattctaccaccgggaaggctgattgccacatggtccagccttggtggtggagctgccatgcctccggggaggctagatccatacccaatcacaggtctccaactcggttcatcctcgctaagatccatcgtgtatacatcgttagagcggaatctcaaagtaccgtttttagctagaccgccaaacataagaatcttgcggtcaccatagacagttagagtatgcccgaggcgagatgggggagtccatggaaccggtatctccctccaagcaggtatatccatcgataggtcaagcaggaatgtatcgctgagtagagctcctgaatcagcacaaccaccagatacaatcagcttagtgccatcaagtgtgcacgaactgtgccatgatcttggtattggaggggccaatccggatacttccctccagcttggtgggtctgcatcaaggtctaataagaacacatcattgagtaatccgtggctcccgtaacctccaaacactactaaacgggaaccgttgacacaagaaagtgtgtgaccccagcgacccggaggaggagagctgaccagaacagatttccactcgggactactcgagccaaggtccaacacaaatgtatcattcatcggctgcatattcacaccttccccgccaaagataacaatcctgttcccaactgcacatgcgctgaaattacaccgagaaggctcaacagtacctccaactgaaaacttcctccatgctgttgcttcgtgagtggtgaactctcgggccagtcgcacccaaccaatcctttttgcaccgggaacactctcaagaacacgtgttgcctcggtaccccatgtgttttgacagaccattctccacacatcatcattctttgtcaactcattgagccgcctacatacacaaccaaccgatgcaatatcaccaggagtcaactgtgacaatatcttgatagctattacttcatcactcagttcgaatatcccacagagtccacgagaaacattacgctctccgattggtaaagcagaagtaaatgagcgagatattctaggaatttcttttgcagataaatcaggagatgggccaagatcaatttttgcatctgtaaataagagaacgcctatgaaatgagtgatttcgtcttcttcacggatagggactagacgcagcttgttcatcaagggagatccatctttccgaaagttgagcaactcgccttgaaactcgatgccattttctagacattgtcgcatcttcgctacaattgtagaatctaccattggatgccttcttttagtaaatggccctctacattgcaagaaacggctgccaaataaaaaacaacagcacaaatcagatacaagaccctcctattcaattcatcgaatagataactaacaactaaacagatacagtactttggcgaacaattcctcacacacaagtattgaacaaagactaaactatatgcataattaacatggaataccagatcaaaagccgctaaaacccaagagaaacatattcaacagaaacatatatacttagacaaaaacgcattacaattcaatattacaaaaatcaataatcccaaggctttcataaaccaatcaagacatgtgaaaaactatcaaagttcgagttcctaaacactaatccacagacataggaaacattacaaactgaacctcacattatagcttagttcctccacaacaaacttctaattcaataaccaacccatgattccaaaatggttctagctaataatacctaacataatcaacaagaaccataataatgaatcgaaatataaatttctttctgtcaaaacagctttcaacaaagctttctagtaacatcgtaccaataccacaaatgagacaaaattcgctacagtaaaacaaaatcaacaccacaaatttagggtaaaagtcaagaagagcaaactcaccaatttcgaccaataacttcttcagctcgataaccagtaacaatctcaaaaacagtgttaacataaatgatagggttgtcaggttcaagagcatcgctgaccacaaacccacacggcgccgtgccaggaagactacctaccggaaacggaatcgctccgttatctccaccgaaccatccatcctccgccacttcatctccaccgctgagatcggaatcactatcccactccatttgattttgcatacacacccacaaaataaagcttaagcccactaatcttcttcctcagcaacaggagaagagacccagaagaacaaagtttgattttgaatcgaggaatctgatatctgtaggtaatcgaagtctccacaggaaaaaagttccaaactttagacaaacccagaaatcgtcttcttcaggaacaggagatagaagaacagattttgaaatggaatcgagcgaagaaaagaggaatctgatatttgtaggtaatggaagtctccaccgcccacttctaagaggaggagaagaagaagaagagagatgattcggtcggtcgatgactcggctcttctcagtgcctctccttttccatctttaaccagaccggtttcttaattttaccttaccggtttagtttatctatccggtttacacaaaatatcctgtaagtttcttatgagatttttttggttttaccaaatgagtgtattagaatcagttttattgatttaaaaacattagaaacttgaatttatcatgaaaccattgcatccaaaacccaattcttgctcatcgaaacgttctccgtctttgctgaatccagtaatagcttcaagccaatcaatattttcctcttcttctagagcaacaaaagccgatgcatagttggcttgagcaagacatcgtactgcagcccgccagaatggtgtacgcttcgggacatcaagacgtctaagagcgttaataacatcttgatacaaaagtacaacaccccgtctttcacgatactccgtaataaagtttccactattttcgatcacgctttcaatgatagaccttcttcgaggttgccttgcacgtctagaagaagtttgtacactgttacgtgtttgtgttacgccttggttttgggtggtgtctgccatataatcttgtgtgtttagagggtagacatcatcttcaactatcctaaaagacgctttatgcaaatggaagaaggcttttactaaaggtcaaaccacatttttctgcggttttgtctttgctctgcaagtaaagtttttatgtgaaacaaaaactaattatgttgatgttgattatttgtataatgttaattgttttttattttttcgtgtaggtatttgcattagagcgatttactatctttcaacaactatttccatccagttttcctttaatggttgagtgggcaaagatatataaaccgtataccaaaaattgtgccaacagaagtgggggacactatcaagagatgcttgtagacatgaaggaagatgaggtacctaacaaaatttcatctctttgtcatatgcatttgttctatattaaatacttagattatattttttcagattaagtggcagccatatagcaaagttatattgcccaaggaatacacctctcaattgagtatggtatttgcacatgttccatgcatctgctttaacaccatcgcatacaaccgaactatttgggagagccactaaatagttttccgattaggaatgacgagaccttggagatgggagagccaccaaacaagtggaatgaaagcaatagatgggttgaccattcacatgtcactgaggtggtcgagactttgccggagaaaaccagtaaatcggctgatgcaaatgtgaattgtcttttttttttttttctaatacaaatgaatttggttctcactttacttgatttaacagctggagtccttggatgaaaatcacaaggaagcgaatgaagaggagggagcgaatgaaacgatgggagtgaatgaacaagagggagcgaatgaaacagttagtcattctcaataatacaaatgaatttggttttgtaacatatactctaggatattagaaaactaaatattaataactggcaggaaagaagtgatcttcgacttcttaaaagaggaagagacgaactacttagaagtgaaggaaaattaaaaccaaccgatagatgtactccatctttttcgcaccagaaacatgcaggggaacaagaaacaaaaattccgcttgatagcctcgtttcctccaaaatcgataggccacgcttgtttcttgatagcctccaaaatctatcatctcctcgattttggaggaaacgaggctatcaagcgtaatttttgtttcttgttcccctccatgtttctggtgcgagaagatggagtaaatctatctgttagtattttatctcttcctcttttaagaagtcaaagatcgcttctttcctgccagttattaatatttagtttcctaatatcttagagtatatgttacaaaaccaaattcatttgcattattgagaatgacatactgattcattcgctccctcttcttcattcgctcccaccgtttcattcgctccctcctcttcatttgcttccttgtgattttcatccgaggactccaactgttaaatcaagtaaagtgagaaccaaattcatttgtgttagaaaaaaaaaaaaaatcacatttgcatcaaccgatctactggtttcttctggcaaggtctcgaccagctcagtgacatgtgaatggtcaacccacctactgctttcatgccacttgtttggaggctctctcattccaaggtctcgtcattcctaatcggagaactatttggtggcttttccaaatagttcggttgtatgcgatggtgttaaaacagatgcatggaacatgtgcaaataccatactcaattgagaggtgtattcctcgagaaattcaactttgctataaggctgccatttaatctgaaaaaatataatctaaatatttaatataaaacaaatgcataatgacagagatgagattttgttaggtacctcatcttccttcatgtttagaagaatctcttgatagtgtcccacactccctttggcacaatttttggtatacggtttatatacctttgcccactcaaccattaaagaaaaactggatggagatggttgttaaaagacagtaaattgctctaatgcaaatacctacacggaaaactaaagaatagttaacattatacgcataatcaacatcaacataattaatcaaccaatctattggtgactggaccgatttatctccaattttacaatttctcaacacactttgcatgagatcgcaacacactagaggatgtttctttatacgcacggcgtcggtgatctcctatattaacatcattttatcaaaacagttagtttgaaattatcactacaaactctaaacaatatatattgaaaatcaagattttaatcactacgtaaccatccaattttagctcacgatcatatatctctagccatacttgatgcatgtgatccgaccattgattagaggactacagtatttcacatattaaattcaaaaaaataaatactacatatttgaagcttctaaaaatagtacaacttgcatgcaataatatagatggagaatccatgatacttacctctctggttttggatgtgttggaaggagatggggttgcaagtggagaatccataacaagtgattttatttttttaataaatgctttgtattttttttttttatgatgaactacaacctacaaatatgaatgcttaatttacgtttgtgaacaaataaattttgtaactaatgaaataaataaaatatattaacgttttatatgtaacaataactattggccataaaagtagaattaatgactattaaaacagttgacaaaaatggagttaatgacttgttgccgttggtaagaaaccattaattgttggttaatacttgtttgagttgtttctcttattcaattaaatactgatgattgatagttttatattgagaaaataaaaaaaattaatgtattacgcaaaaaaacaggtgaaaactagtttatttgtctaataaagattcatgtgtatttttattagggtcaatttaattgatatgctcagaagaatgaaaaataaagaatataaccatgaagatttgttatttagttctctttcatctgactcatagtaatgccaaaaatacccttcgtcacatatacatgttaacaagaaaaatactaagataaaatatttatatgcaacaataaaagatgagttttggcggtaacaagtttaggtagttaattatttgattagtatgataaacatgtctttaaaaacagtaacaacgtgaaagcactattcattttacgtcaaaaacatgtttctcgtgttaaatcttgtattatataatatatattatataataacatatttatttattttgataatttaattattattgtttttttacattaacaatttagttatcaccctaacatgtcttttaaagtggtaaattgtatgctattatagataactattatacataaccagtttttttttatatatatcatgttaacaatcggtaactaatagattaacaattatctattctcgtaacatgttaatttatgcattagtttttttatttatcatgctaatttgtttatcaccggtaacttatgagttatcataaacgttgaacttcttcttttttttttcttctctttcattttcaactctttctctttgacaagggcaaaattctaaaaacattactctctctcttacccacccaattaagaaaaatgcatgcatagatacttaattcttcattcttttatgcatatccactataatttcttttttattatgcaaaagggaaaaaactcgaaaaaaccgcgatctatttgaaatttggccgtttaatacctctagtattaaatttggaataaaaatacctaacttaattttgattgccttttaaaaccttcatttaataaaaattgataaaataacattcccgagttaacgcctgttaacattgctaacgtaaacactaactgtggttaaaactttaaccatggtttttgcgtatatatataagatatcttttcaaaaaattaaaaatggtgtctaagtcgagtggtttaacgttgcctgacttttctattcacctgggttcgagttcccctttacgtacatacaaaagttttttaatttttttcttttttcttttttttttctttgatcttggatcgaaactgacctttgattttttctttttttttcttttttttttctttgatcttggatcgaaactggtggatctgcaagagacatttgggttcgtatcgagaatcaattttgcaataacaaagaggcgagagcaatccagctcgataatgaactccgctcaactgaaattggtgaccaatccattcaagcttactgccaaaagctcaagtcaatttcagatctgcttgccattctgagcgcaatcttgtcatatacatgctcaacgacctcaatgaaaaatttgataacattaattatgttatcaaacacaaagatccgtttcccagttttgagactgcaaagtcaatgcttcaattggaggaaacaaggttgaaaagccccataaacatggctggtctaccgatctcagcgttttaagaattacccagaacgtgtaatggtctttttgtgtttccaaaagaaaacggaaaaaaaattaaaatagccaacagaggttatggagaatagatgggctacacagcctacattcaaccactagactaagacaaaatacttgtaaagttgtgaaagagatcttatatatttacgcaaaaaccatgagttaagttttaaccgcagttagtgtttccgttagcaaaattaacagccgttaactcgggaatggtattttatcaaattttatcaaatgaaggttttaaaaggcaaccaaaattaagttaggtatttttattccaaatttaataatagagatattaaacggccaaatttaaaatagatcgcggttttttcgggttttttcctttatgcaaaaacttaaatttatgtttttgcgttttctagagcattaggcaaaaaattatgattggtaaaattcttgcagaaatgcattagaaaacaccattagacgattttgcacgttaccaatcaaaacctataactaaaagtgaaacaatcggtttttgactttttttgaacttgagcatgttggtaatgaaccaaaacacactgttgtcggtttcaagtgtctttttagacatggactctcgttcttacaagtacaaaaaaatcaagtgtgcaaattgaagattcatagcttcttcttttaagatattaaatcaaaatatagaattagtccatagcaaatatataaggtgaaaatccaaaacggaaacagagagcaaaaaggaacgaaagtaaaaatctggtcccgaggaatgtaagagagacacgatcggtagttatcgccaaacactacatgatttccttgcgggcgagagcttgaggttttagggtttcgggagagtttttttcacaaaatataatagtctttttctactttcgatctcaaaaactactaaaaagtgaagccttgtaaatcttctttaaagagtagaaacatgtattattatcttttagttattcatcttcaaagttttgattaatttaaagtgaatgaaatataaattcaatacaaaaaaagaagaaacccaaatctacaaaagaaaaaaagaaaaatatataattgatttaggattctaaattctcacgtactcggagagcaagccgttgaatagactgatcatcgaagcaaggatcaaaggtcttaatcttggacacaaaatccatagcttcactatacttccctgctctgcaataaccatctactaccattttaaaagtcagctcatttggtctgcaatcattcttcgccatgcactcaatcacatcttctatctctgcaaacattcccatcgccgtgtaacccgaaacaaacgtgttgtaagtgaaaatgcacggtctgattccccgctctgtcatctcagacagcatcctaaccgcttcttgcatcaaccctcttctgcagaaacctttgatcaccgtgttgtaagagaccaggtccggttttaactgcgatttttctagagtcttgaggatttcttcggctttccaacactctcctcttcttacgtacatgtccatcaggctgttgtaggttacaagatccgggcttagcccatcctcgcggatagactcgagaatcccctctgcttgatcgtacatgttgttcctcgtgaaaatggagagcattgagttgaaaatcaccatgtcgggtttgtatccgtgctttttaaacaatgtgaatgctctctctgatcctgctagtgctcggcatttaaagtttgcgaggagtaatgttctcaaaagcatccagctcgggaatatttggccctcctttatcctattctcgattctctctatccctagatagttccctcctttagcataacactgaagcatcaaggaataagatgtttcagtaggtttgaaacctttacttttcatgtcggaaatcacattttcgcctgatctccaatctccttttcttgccaaggcattaagtaacgcgttgtaagtcgtaacgcaagcgttgaaccctgctcttgtcatctcaccatacattttcgatgcatcaacctctgaaccacatcgcccataggcactgatcagcgtgttgaatgtgtccctatcaggttcaaatccgcagctcttcatttcacggaacacccggttcacaaacttatccatacccttattcccacacagagcaagcattgtgttccaagtggcacgattaggggaacatccattagacttcatatcacataacatctttatcatttcgttggatctcgacttcttccccaacagactaagcactgcattgtaggtgcaagtattcggaacacaaccagcttctttcatactataaaacagcttcaaagcctcgtcctcctttcccgcctttccatatgcatctatcactgtagtataagtgattgcgttcggcattacaccctttttcgtcatcatctcaatgacaccagcagcttccttgctaaaaccagctctaacataagcagcaacaagctcattatatgtcacagaatctgctgggcagctattttcctccatctctttcaaaacactcaacgcttctgtataaactcctgctttaccaaaaacttgcaacaaagcattgtacgtaacagtaccaggttcatagccgcatgacttaagttcagcgaaaaactccttggcctctcttaacaaaccttctcttgcacaagcagagagcacagtactacaagtaaactcatcaaacttcaatcctttgcttctcatttcatctaaaacccctagaattttccgccaagatcgacccattttcccgaaaacatcgagaatcacattgtaagtcaccaaagtaggtgaaggacccatctctttcatcctctcaaacaaatcgatagccttttcatacttcccagtccgtgaatacgcatgtaagatcgtcgtgtaagcccgaacatcgaggagatattcttgtagaggaattttatcgagcaacttagctgcaacagagtactgagattctctacctaaaatcctaacaaagatttcgataacttgatgatctagcttcaaagctccagaatttgaagacaaaactaaccattcaaacaaaaaaacagctctttcccaatgcccagaatcatctagacccttaaccaaactaaccaaatcagttctaagcaattccgatttcacagaatcaaaaaacctactcaaaccagtcaaaggctgttcaacaatggaattaaccaagacaacttctttcttacacaagagtttcaaagacccatttctctcgttctcaatttcaatacccagaatgggtttcgacgatgatgaatcagtcgagacttcgagagaagggaaacgagcggcggcggagttggagtgtctaggaggcggggaagagaggtgaacgagatggtgaagaagagaatcgagagggaaagaaggaggagaaggaggaggtaagtgaagagtagcggaactgaatttgatagattggttagaggattgagatggtggaggtctcttggattgaattgggtatggaggtttgtgagggaagagtgctccgtccattgaaagacgttatccgaaattgggattgaaggagaagaagagtgagtgaaagttagcgcctttgggttgaagttgagattttgaatggccgtaaaagggactcgtccctatcggcacaagattggcctttccagatgatgcgttacgaacatttttgttctaatccgtatgactgaatatcttaactaaaccgaaccgaaccgaatttgaactaaccggaatgtatacacgaagtaaaaacaatagataaaatgtgaaaaaaaaattaaaatccccaaactgtaaaaaatacaaaaaaccataatcagattttgaaatttgaaatatttttgcgattttattgagttcatgtgtattttaaacgaaaaaaattacttgattagaccaaattggttcagacaaccttaaatctataaattggtttgttagattttacaccaatttgatcacttaactaaattaattaaattagatgattatcccaccatatttttgagcattaaaccataaaaccatagttataagtaactgttttaatcgaatatgactcgattaagattaggaaaaatttataaccggtaattaagaaaacattaaccgtagtaaccgtaaatgccgattcctcccttgtctaaaagacagaaaacatatattttattttgccccatatgtttcactctatttaatttcaggcacaatacttttggttggtaacaaaactaaaaaggacaacacgtgatacttttcctcgtccgtcagtcagattttttttaaactagaaacaagtggcaaatctacaccacattttttgcttaatctattaacttgtaagttttaaattcctaaaaaagtctaactaattcttctaatataagtacattccctaaatttcccaaaaagtcaaattaataattttcaaaatctaatctaaatatctaataattcaaaatcattaaaaagacacgcaacaatgacaccaattaatcatcctcgacccacacaattctacagttctcatgctaaaccatattttttgctctctgttccttcaaaatcatttctttctcttctttgattcccaaagatcacttctttgtctttgatttttgattttttttctctctggcgtgaaggaagaagctttatttcatggagtctctgctctctagttcttctcttgtttccgctggtaaatctcgtccttttctggtttcaggttttatttgttgtttaggtttcgtttttgtgattcagaaccatacaaaaagtttgaacttttctgaatataaaataaggaaaaagtttcgatttttataatgaattgtttactagatcgaagtaggtgacaaaggttattgtgtggagaagcataatttctgggcttgactttgaattttgtttctcatgcatgcaacttatcaatcagctggtgggttttgttggaagaagcagaatctaaagctccactctttatcaggttcgttagggttttatgggtttttgaaattaaatactcaatcatcttagtctcattattctattggttgaatcacattttctaatttggaatttatgagacaatgtatgttggacttagttgaagttcttctctttggttatagttgaagtgttactgatgttgtttagctctttacaccaatatatacacccaattttgcagaaatccgagttctgcgttgtgattcgagtaaagttgtcgcaaaaccgaagtttaggaacaatcttgttaggcctgatggtcaaggatcttcattgttgttgtatccaaaacataagtcgagatttcgggttaatgccactgcgggtcagcctgaggctttcgactcgaatagcaaacagaagtcttttagagactcgttagatgcgttttacaggttttctaggcctcatacagttattggcacagttaagtttctctttaaaaatgtaactcttttaaaacgcaatctttcagggttttcaaggagataacattagctctgtgattggatttgcaggtgcttagcattttatctgtatctttcttagcagtagagaaggtttctgatatatctcctttacttttcactggcatcttggaggtaatgaatatataacacataatgaccgatgaagaagatacatttttttcgtctctctgtttaaacaattgggttttgttttcaggctgttgttgcagctctcatgatgaacatttacatagttgggctaaatcagttgtctgatgttgaaatagataaggtaacatgcaaattttcttcatatgagttcgagagactgatgagattaatagcagctagtgcctagatcatctctatgtgggtttttgcaggttaacaagccctatcttccattggcatcaggagaatattctgttaacaccggcattgcaatagtagcttccttctccatcatggtatggtgccattttcacaaaatttcaacttttagaattctataagttactgaaatagtttgttataaatcgttatagagtttctggcttgggtggattgttggttcatggccattgttctgggctctttttgtgagtttcatgctcggtactgcatactctatcaatgtaagtaagtttctcaatactagaatttggctcaaatcaaaatctgcagtttctagttttaggttaatgaggttttaataacttacttctactacaaacagttgccacttttacggtggaaaagatttgcattggttgcagcaatgtgtatcctcgctgtccgagctattattgttcaaatcgccttttatctacatattcaggtactaaaccattttccttatgttttgtagttgttttcatcaaaatcacttttatattactaaagctgtgaaactttgttgcagacacatgtgtttggaagaccaatcttgttcactaggcctcttattttcgccactgcgtttatgagctttttctctgtcgttattgcattgtttaaggtaaacaaagatggaaaaagattaaatctatgtatacttaaagtaaagcattctactgttattgatgagaagttttcttttttggttggatgcaggatatacctgatatcgaaggggataagatattcggaatccgatcattctctgtaactctgggtcagaaacgggtacgatatctaaactaaagaaattgttttgactcaagtgttggattaagattacagaagaaagaaaactgtttttgtttcttgcaaaattcaggtgttttggacatgtgttacactacttcaaatggcttacgctgttgcaattctagttggagccacatctccattcatatggagcaaagtcatctcggtaacaatctttctttacccatcgaaaactcgctaattcatcgtttgagtggtactggtttcattttgttccgttctgttgattttttttcaggttgtgggtcatgttatactcgcaacaactttgtgggctcgagctaagtccgttgatctgagtagcaaaaccgaaataacttcatgttatatgttcatatggaaggttagattcgtttataaatagagtctttactgcctttttatgcgctccaatttggaattaaaatagcctttcagtttcatcgaatcaccattatactgataaattctcatttctgcatcagctcttttatgcagagtacttgctgttaccttttttgaagtgactgacattagaagagaagaagatggagataaaagaataagtcatcactatgcttctgtttttattacaagttcatgaaattaggtagtgaactagtgaattagagttttattctgaaacatggcagactgcaaaaatatgtcaaagatatgaatttctgttgggtaaagaagtctctgcttgggcaaaatcttaaggttcggtgtgttgatataatgctaagcgaagaaatcgattctatgtagaaatttccgaaactatgtgtaaacatgtcagaacatctccattctatatcttcttctgcaagaaagctctgtttttatcacctaaactctttatctctgtgtagttaagatatgtatatgtacgtgactacatttttttgttgatgtaatttgcagaacgtatggatttttgttagaaagcatgagttcgaaagtatatgtttatatatatggataattcagacctaacgtcgaagctcacaagcataaattcactactatagtttgctctgtaatagatagttccattgatgtcttgaaactgtacgtaactgcctgggcgttttgtggttgatactgactactgagtgttctttgtgagtgttgtaagtatacaagaagaagaatataggctcacgggaacgactgtggtggaagatgaaatggagatcatcacgtagcggctttgccaaagaccgagtcacgatcgagtctatgaagtctttacagctgctgattatgattgaccattgcttagagacgcattggaatcttactagggacttgcctgggagtttcttcaagtacgtgtcagatcatacgatgtaggagatttcacggctttgatgtgtttgtttggagtcacaatgcttaatgggcttattggcccaataatagctagctcttttgctttagccgtttcgtttgtcccctggtggtgagtattattagggtatggtgtgaccaaagtcaccagacctagagtgaatctagtagagtcctagaccatggtccatggcttttatttgtaatttgaaaaatgaacaattctttttgtaaggaaaacttttatatagtagacgtttactatatagaaactagttgaactaacttcgtgcaattgcataataatggtgtgaaatagagggtgcaaaactcaataaacatttcgacgtaccaagagttcgaaacaataagcaaaatagatttttttgcttcagactaatttgtacaatgaatggttaataaaccattgaagcttttattaattcaaatcatgggatgggaggaaaaagcaatcgaagtgcagagataaaggataagaagaaagctagtccaatgaaagttggagcaaatggacaaaagaatgttatgattattcctctatcatagaaacctttgaagaatatatgcgttttctgagagaactttcatcatgatcaaaggaaataaataaaataatgtaaaataaaaacaagaaactcaccaataattcaacaaaaagtttcgaaagtgagaagtgggcacaaaagtgcccatctttggttacaatcaaagaatccaacataaaatcaaagttctcaagatgctccatatagcatatatacataacctccttttttttaagagccaataatttcttataagataaataaaacatattattccatttgctttttgcttacaattttttctccttttgggtccattgatacatatttttctttcaagctccaacatacaatgaggctaaggtctatagtaataatcttttttagccgagtcacttcaatctattccaatctcaaagttttgttctctgtttaaaagctggtttatgtggtctttaaacatctaacacttttacttaaaacaaatgattatttaggtttcatattatttttttctttcaaaactcaatcataaacaatggcccccgactaattaggaatgtattgaataaacttataaaattagaattagaattagcacaacccacgttagccagatagctagcaatatatatgctaaataagcaaatcgagaaatgaagatttcaaagaaatatatttaaaaaatatagaaaaataaaactggaataagtccttagcgtcttagaatctcacctaaagacataaggttggcaacaaccggtacattactcagcaagcctaaaaagaaaaatctaacacttttaaaggtttatcaacactttcacaaaatgtgccaaagagacacgtctaaagaataaagagttaatgaagttgacagaaacaacgagcattaattttcttatattgtatatcattgtcattttcgtgagctttatcttaaattcatttttgtattcatgttccgtagcatctgagtatttttggactgaacatttcttttcagtagagggatatatttcaaatagattcgttggattaaatagaatggaagtttcgaattttaaaataatctgccagtgtgggtaaagaatgtcatacaagatttttttcttcttaattttatacataaaacgatgatggtttaacatgtagattagtgctagattgtgtttcatattatgttgcctaagtgctgtacaaatccaaaccattttaattaattaaactttatttacaaaaaaataggaagaactaattattaacgtgaaatgaacacaaaattctttaatacatcaatatatatatatatatatatatatatatatatatatatatttggctcacataatctaccatctaccatagtagatcttctactctctgttttgtttttttgtttactctaatttgatagataattggaatcttgaaaaaatgaaagaagaatttatttttaacaagcatgggcaaattatattttgattataatgaaatgcgagaaatcggtaggtacataagcagatgcacaagcatggttcagtggccacctaataaattcaagaagactacacatgtctcatataccacaattgaattacttatatagaaagaatgaaaaaataacaaagcaaaatatatatatatatatatatatatatatatatataacaaaaataaaattaggtctatgtagtggtgtcaattgtattttaattatagatgtttcttaatatgtgtctacttactcgatggatttatacatacacacacatatacattaaaacggcatgttaggtcctttagctatttattttatcacccaaaatatattcttatgaatgaatatcacatgagcacatgtttatcattggaaaactttacctgaaaaattatagctgatatctcaacttcatttaagaaaattggctatatttatatatatattcttttccattcattcttaaagcaatcccacgatagtttacttgttattagcattacattattttggcttttcaaatacggtatgtataatttgaggtaaaataataataatggagtccaaaccagattttaatttgattcaactttgtttgacctaatagaatataagtgtataactattaattttcgtcaaatctaaatcgacctatttctcttctgtaaaaaaatgtgctgttaattttttttctttaaaacaataataataataaagtagagttttgagaatttatgttaatatatgtaaagtttgataatatttaattgatttttttatttttaatgtaatttttaatgccatccattactattcgcaaccataaacgctcgtggaaaagaacttttaaaatttagcaatatcaaataaacagtttaaaacaatttttatgattggttttaacctctaaaaaattgcaacccctcgtaaacgtaagtttgcaagtgatatcaagagaaccaatcaaactctaaagctctgaaacaatatgccatgtctttttagattttctttttgaaataacatttttttaataaggtaaaagttagacccaaaaacatctcccctaatcaggactaatatttaataaattatgccttccaaagagaatcaaattcgtgtttaatacttacctgaattaatacggccattacaccaactctacgttggtaaaaaataatactttctctatttctaatcaaaatttatcaactatttatgcaaataaattggaagaagaatgatagcattttttgaaaactatgcacaaattgttggtaaatttacggattccccaattcttattggaatattataaatagaatcgttgtcctatgttttatggatcagctgacaaaacttaaaagtacacaaaggtgcatagtttataattgaatagtactagttaccaacataaacattttaagcaaaatgcaaatcttatttttcattgatcaaccaaatcaatgcaaatcctaatatacgttatcataactattgtaaggtataaatattttgcatatttaggtcacaacatatatgaaaatgtttattatagtcgtgatcatatatatcataagagaatttctgttgagagcaaattatttcttaataattccaaattaatcgggaggttcaatagatttgcaaaattaaaccaacatagctttgtgttaagtctactaaagattaataaagataaaacaactgattaatgttacgttgtgcgcgtaattcaactcttacattttagttaacgaaatcacaaagattcatgtttggaatatagtaggaaatctggggatgtctatcttttctattttgttgtttcaaatgttactctcttactttttctaatagagttaatttttgggttataatttcttttcagttctttttttttctttctttctagtcgttctggttgacttggaaataaataaataaagaaagaaagtatacgtaagatcgatcacgtgtttgattaaaattttgacaccaacagttgacatgttatctaccttatgaaatatgaattgatatactatttcaccaaataatgtgttaccaacaaaacaagagtttgattgattctatttacactcaattagtttttattaattttaataatccagagttgccggatcaaagcccaaacatatctccaaaatctatgtattgaacttgtaaatgaaaagaacatatctaaaaaagaattggtaattttatttataggatggaaaaattggaagaacttggactttttaagtttcaatccaaagaacttggactttttaataccctgctactagtttccaacatataacttgtaatcaaaataatcactaataaaatactttgcgttattgacgtgctgatgtacatatataagtacattacatacacacatatagttgcacatgtcatcttattattggactcttattgttccacaattaaatattttctacatatatatgcgggtgtgggtataactattaactactacatacatatacatgtgtagaacaaataacaaagtaaagggtacacatatcatatgtcacatggtctctttcattaagccaaaagatgggacaaattggcttagatttctctattattttatgtctttttatcttaatgacccatcttcaatttagacttagttctattttgccccatctctctctccttggccaacctttacacacagcacataattctttggtttttttttctaaaatcttaattcgtcattaatccatgaagaagattcgcccaaaaaagatatgacaagaaatgatacaaaaaggttaaaatgaaggtacatacataaacggtaaaagtgaatttcttgtcttttgttccggttcgtccataaataaaataacataaagtcaacgaaagtttgtctccacattttttcccaaaaaaaaaatatattaggtttttttttgtgtacacaacatatattagttttcataattgagacgtttttggttgtattataacaagaccttcacatattgattacacgattacacaccaataattttacttaactattttgcattttataattgattagtagaaaaaaagattgggtcaagtgggttcacacatcacgagattcagtggatgttaaatcacagaagctagtaccacggatccatccacctagcttttttcttcatttcacgtctgtgactgatgagtttttttcagaaagtggaccgtacacgtggtaagattcgattggatatatgtgtctgtcatctacgtaaatgacagatccttaaaagctagttatttggtaaaaaaatcagattcttcttctcttcttcgtaacggtcccgttagatttacagtcatgtggaagtccccactctaaaactctactagtatatcgtatttaaagctttatcacgacaatcaataaaaactgacgcttgtttcgtatattcgtatctatgttacggccgttggattctttcaacggtaaaataggtttacgggataaaccaaacaaaacaattttatgaccgatgatttagtccatctttagaatttgataagtactagatttgattgtaggaaataattttgtggttgaaaatattaaataataacaaactttttgcatataaataaatcaaacaagaagttagtatatttgatatatgtgattatgcattaactaatactttgtgtagatgacaatctttttatatgttacttttttcctgttcaatatagacttttattattcaatagacgtatgctatgcattcaagttgtttagaaaaaacaacagagaaattaatgtgtgaaaaatatatttgaagtcaattatatactttgaattttggggaatggtgttttctttgaatattataaacacggagctattgatcaatgaaagatgcatgtgagtccaataacaattataacatacgtacaaaacaaatcggaatttcttgacccagatggtttcagaaaatttcacaatcggtttttaagaagtaacaaaataaaataaataaataattaaagaacaatggaaacatatagcaactaagtttggactgtatgtcgagtttgatggatgccgtacatattgcaaaattctcaaggtacacatatgggaaatttcctgtttgacaaaatatgattcaaatatataaaacaaagttcatctcacataagtcgagtgtaatacaacacatgttcaacttactgtgcaacatagttctgacaccaaaaccatttgtttgtttattcacacagattatgttaatgttactagttaatccgtttgtattagttttgctttgtcaaagaatccgtttgtattttgtgttcggttttataattttacaactatttcgaacatatgtctagattattttcgatagtgcttttcttgttgtttttcctgttgattagtagtttttagttgtacatttttattttgttcttttataattgctatcgtaatttcgaaaagggtataaatacataacattgatataaaagtgtgtttaatatgaattgaatttgaaataattcttggaaatagttgttggtaaaaaaaacatttgttgctgggtttcgttgagtaaaattatgtaccaaggtgactaacgtttgcacacaaaaaaaggtgactaacgtaacatgttcgtttagtttttataaagtgttagttttacttaaaattttactactacacatacatgagtcttaaatcaaaaatttataagtaatatacatattaatctacgttgataacaaaacaaactattaaaatatatcccacatcaaaactttgataatttataaaacaatatataagtatgtggtaaatctttatttttgagctagcttttatgtatgagttaggctcatactaatacaaacaataattaaaacgggttatttgttggtcgttggtcgttagtgttaaagaaatgaataacaaaacacgttgcttattgttatcggtaatcatttttcgttagtaaaataaacaatacttaaatataacttctttttttttttttcttttttttttttgaatatcaggaggttctgggccggagcccgtaatccccaggcccgaaaccacaacatgtaatattagtttcgttgtcactcaaaccggcgacctctaaatttcgcttaaagtatttatcaattgagctaacgacacttgattaaatataactcttcccatcacctcttccaaaaaaaggaataagtaagactataacattacttttcctgataacgatatatcgcgaaccttcacgaaagtatcattaggttcagtggcagagagatagtttatatttttgattcatatttgttaatttgtgattcagttatgaaatcttgctgggtcttaaaaaagagaagaatcgtgttgttttcatatgtttataaaattgaaaatacaattgtcaatttatttttaattatgtgaccatttctacgacgaatgatctaatcacaagcgtagttgaaaacttatcgccctcgctatattgatgtcagtgtattaacaaaattatcattatgctagtacttataattatatgaataaataataaacacttggattctaatatgttcgcatgaggatgaaagtaaacttttatgcaaaacaaacttattatatattattggtgttctatttggattctgtctgctgaactgtatggttgtattaaaacatatatacaatcttttacttgtgtttgtggtagaaatggaaaatagaaaaaagaagtgatagaaacaaaagtaatttggggtattgtagtactagcgttagttttctaaaaaataccacttaaaattagtatttacagataacagtttagcgagcataacttactgaatagtttcaaaattgtttttaacagacctctgtaaaaatttaattagcgaccttttctatgctaaaatatttttcaagtgtttatatataatcaattgatatatcaaacagaatcaaaagcaagggttaatttgcaaaatggctaattttttttatagttgctaaaaatataattttaaataactaactaaaagcaaatgaaaaagtactttaatagttgaccttcaaaaatatttcatttaatattcacgtagagctactcgttttattcattggtaaaatttaagaaaacgtggtaacaaatgattttcttttttggaggctaatataataatgaatactattaagtacgagagaaaaaaaagattaggctaagaactaataataatggaatgatggaatataaaaattctattttgtttggatgatctaacctttcatttaacctaaatgggtgattttcttttctgtaatatatcacttttatattatatgattttaatgttaacagattttattaaatagagttgaagctatatgatttcaggatgccatatcatactaatattctacgtacaaaacaatttagcacagaaatagttttaccgaaaactaattgatggcaagaaatcacatgattattattttttgtaatttgttttgtatattttccattaatattttgctaattaactcagctaaaaatgtttcaaaaaatagatctgattatttggatgttggttttatatttccttgttataaaaacaaagaatatgacgaataaatttaactttttgaaatcctaaaaaaaaaagcatacacatttaaataaatacttttatgtatttacctatgaaagttaaattgattttgtctatcagatacataaatgatcaaataataaatgagaaaaacctgcccatatgtgccgatatatatccagttgaattaaaccatcatcttcttgtttctttgtttttaaaattctcttatgaaatcgatcttttagataaaatacaatcgaatttatggaagcaagaaaaaaaaattacgtaggggaggtgtattattgggggacccagcacgatcaaaaagtcaatattcatcagccaatttgctgaataaataaataaataaccttgaaaacaatttttggttaaattacaaaaataatgatatccacaaacatgtgaattgttccagcaattgctgaccttgccatgaggcaccttggaagagccattgcttcattacaatcctttaaagccataaatatgagattaggattaccaaaatttcacatataacaaattgttttatatcattactagcttaatatgtgttttattatagttttagatcgacgtcatctgaatattttcccccaaactcctaaattttataatctgtgtctaaacctaattttatatttcaaaacatccctttttctggaagaaacttgtcttttaattttttttttttttttcacacttgtcttttaatttccttaagagaccaaatcaagttaatttagtgtactcaccacctttaaaacaggtcaagttaatttatttgaacatcagtaataaatttatgaacatctcttttcaacatcggtattcttaaatagtgttttagaatcgtcattttaactttatgtttcactaaacttagaaaatatttagttttttttatctcaattagtaattatcatttaaatttttattttctcggtttctacttcgccactattatttaacatattattaaacaaattagtattatacgggttgattttaattttccaattacaaattaattaaaattcaactttttgattggttgtataatccgaaggaaaaatgtttacatacgaattgttttaaaaacactttgatttaaaagtccgacctaaacaatcaacatgaaaattaaacttatgagcaaattaggttgatctagaaaataacttttgcatttgtctcatagggaattataaagttagtatctacacacatatatcaaatatacatgttatatctatattactctctctctctctctctctctctctctatatatatatatatatatatatatgtatattcacaaatccatgtatgtattttaaattttgtttgttttttttttccttcaaaatgagtaacttatatagaagtcattaagattagctttgcacaactctttgggaacaaaaaagaacccaaattttaagcattattcaatgttcatataattattatgtatattatttttccttattgattatcaattttatatacacaaaaagatatcagtgaagaacttatgattgtgcatattttctgtccatacataaccacaatattaatcaaaaatttaaatttatcttagatatttttcttatgataattcaatactgtataattttttaaaatctatacattacagttttgtcttttaaatcatattctaatatgcataaatatctagaaaaatactaactccatagaattaaatttcttatgtaagtttagtatattatcctaaatttgtgttaatgttaagatttctactaaatttgatactcaaaagtaaaaagtttctcttaatagaaaaaaataaatatagattctcttacattacaggatcagagtataaaaccagtttaagtaaacaatgtttcaaaaaacagtatgatatctgaaattttaattataaaaccaaaaatccaaagtcaaatatacgttttccaagtgagaaaggacccataaacaattaacaaccattgatgatcaccaaatcataatcaacggtcgaaatgaatgaaaaataaaagtctgaaacggtggagagtttcgtcgttttgagtggttataaaaagagaaggcgtatatctcctctgcaacagaagctcgctttctctctctctctctcgtgtgtgtgtgtgtgatcgagtggtgaaacgacagagaggggcgtcgttttgttgatttcttctgggtgaagatgtcaggtctcgaagatatcaagaacgagaccgttgatctggtattatttcgattctcttctcgcttaaattcttcgagtttttaatttcatttttagtgtttattcatcatgcccacaaagtgttcgatgatttgcttgaatgagaaatagatctgtttcgttgttgttccttgcatggtttcacgtttgattcttttacccttttttcttcaaatcattttccgatgattctactccttttttctttgatcgaaaactgaatcttaattcctcaagaacccgaaaaatccgcaaaaaaaaaaaaaaccgatttttccccccaattgtatctgcctcattttcgatgattctatcatggatcctatacaaaacccaaatcaagattccaactttattaattttggtctaaaattagggtaaaataacagatgtcttttaaaggttttaggtattaagccaaaaataagtagattttgatactgttcatcagaaaaagtagatctacccaaaaactacacacatgtgaaacgctgaataaaaagataagtctttttagtggtggagctaagcttaagctacgtctcaacaaaagtctctttcacatatttattaaaagagaaaaaaatcgcaaaaagtttgattttgcttgtgatatataactttctttctctaaaaaaaatcatcttttttttgtaaagataacgtttttgatgttaaagcagttcataatattcttctatcttccacccatgaaaaataccagagtttttaataaatttaagttttcaacttttttttaaattgttgttgatgttcgaatttttttgatgtacctttccgtagtacgttttttttttttttgaacttctttgtccttttgtaaaacatctatcagtagaagcaacttgtgaattcctctattgtaattgattttgtttagtgaaattgttttatgaccgaaatacccttaaccggactttggctttcacgccggaaagtagccacctttcatggagggaatcccgcaggcgcgtgtgttacacgttccataacacgtgcattgaagtagtagtagtagtggtggtggtggtggtggtccctctatcctccactgccagattcttttcacctttcattgtcacaacttgagtcaacgccactcttcatcttccgagtcgccgagttggatcgtttctgacatttgtaaaaagatttcaaaactagaaaagtttttgtcttttttacccttttgttcttgtttgatgtttgagttactattgtttgggttctgatcaaaacttttgctttgattctcaggaaaaaattccgattgaggaagttttccagcagctaaaatgtacaagggaaggattgacaacgcaggaaggggaagacaggattgtgatatttggccccaacaagctcgaagagaagaaggtttgagtttgacttagcattgttgttttatcatcattgaaagctttggttttgtttaactcacgaggttgatctttcgtaaaaaaatatcaggaaagcaaaattctgaagtttctggggttcatgtggaatccgctttcatgggttatggaagctgcagctctcatggccattgctttggctaatggtgataatcgacctccggattggcaagattttgtgggtattatctgtctgcttgttatcaactccacaatcagtttcattgaagaaaacaacgccggaaatgctgcagctgctctcatggctggtcttgctcctaaaaccaaggtaatatgttggtggatgctgtgacattactgtacaagatatttcgagacttctagagagcttaacctgtttctctgttttcaggttcttagggatggaaaatggagtgaacaagaggctgctatccttgtcccaggtgatattgttagcattaaacttggagacattatcccagccgatgcccgtcttcttgaaggagatcctttaaaggttgatcagtctgctctaactggagagtcccttcctgtgaccaagcaccctggtcaagaagttttctctggttcaacttgtaaacaaggagaaatcgaagcggttgttatagccactggagttcacaccttctttggtaaagctgctcaccttgtggacagcactaaccaagttgggcacttccagaaagttcttacatccattggaaacttctgtatctgttctattgctattggtatagcgattgaaatagtcgtcatgtaccctatccaacaccgaaagtacagagatggaattgacaatctcttggtcctcttgatcggtggtatccccattgctatgcccacggtcttgtctgtgactatggctatcgggtctcacaggttgtctcagcaaggtgctatcaccaaacgtatgacagccattgaagaaatggcgggaatggatgtcctttgcagtgacaaaaccgggacactaacccttaataaattgagtgtggataaaaacttggttgaggttttctgcaagggtgtggagaaagatcaagttctactatttgcagctatggcttctagggtggagaaccaggacgctattgatgcagccatggttggaatgcttgctgatccgaaagaggtataactctaatcattttgaattacttctttagtttagtgaaaggtcgagaaaacaagttcttaatttcttatgtttcacttggattttcataggcccgagctggaatcagagaggttcacttccttccattcaaccctgtggataagagaactgctttgacttacatcgactctgatggtaactggcacagagtcagcaaaggtgctcccgagcaggtgatgaatcttcaactttctcctaaagatgttgcgtttttcctttattctgtgtactaattcgattctcccacacagatccttgaccttgccaatgccaggcctgaccttaggaagaaggtactctcttgtattgacaagtacgctgagcgcggtcttaggtcgttggcagtagctcgtcaggtacttttttacaagcaatttttacattggtcttatttgggttttttttttggcctgtaaatcaactgtttaattgcatattcctttttaggtggtacccgagaaaacaaaagaaagcccaggtggaccatgggaatttgttggcttgttgcctctttttgaccctccaagacacgacagtgccgaaaccattcgtagggcgttgaatctaggtgttaatgtgaagatgatcactggtaactattcttattcatcatttttttcccatgaaatccatggttatttagatgttttcccctaacttgcgctctaactacgttgccaggtgatcaacttgctattggtaaggaaaccggtcgcaggcttggaatgggaaccaatatgtatccatctgcggctcttctcggtaccgacaaggactcgaacattgcatccatccctgttgaggagttgatcgagaaggctgatgggtttgccggcgtctttccaggttatgccttgctttcagtttcaaacctcatcacatgttcattataaagttttgttatattgatccaaggttcttatggttactgattgcagagcacaaatatgaaattgtgaaaaagctgcaggagaggaagcacattgttggtatgaccggtgatggtgttaatgatgcacccgctttgaagaaagcagatatcggtattgctgtggccgatgctacagatgctgctcgtggtgcttcagatatcgtcctcacggaacctgggctgagtgtcatcatcagtgccgttctcactagcagagctatcttccagagaatgaagaactacaccgtgcgtattcttaatctcactctaatatattatgcccaccacttgtgttcgtttgcgctggaaactaataattttagtttcctgcttgtgacagatttatgcagtctcaatcacaatccgtattgtggtaagtagaaacccgttttacaaatctatcacttgtttagcatgattttactttttgtatactgatcatattgcgttgtaactcttgcagtttggtttcatgcttattgctttgatatgggaatttgacttctcagcgttcatggttctgattattgccatccttaatgatggtgagcaaataacatcctacttttctagacagcgtcctcactcgttatcagctatatcttatggtattatgtgttactaccttttaggtactatcatgacaatctcaaaggacagagtcaagccatctcccacacctgatagctggaagctcaaagaaattttcgccactggaattgtgctgggaggctaccaagccattatgagtgttattttcttctgggctgctcacaagaccgactttttctcggtacatcatcagtttattttcatttcttttctcttttttttggtacaggtgcttcagggactatatagatatatatggccaggccttttgctctgagtcttaaaaaattgtctcaccttcgatttgcaggacaagttcggtgtgaggtcaatcagggacaataacgatgaactaatgggtgctgtgtatctacaagttagtatcatcagtcaagctctaatctttgtcaccaggtcaaggagttggtcatttgtcgaacgtcctggggcgcttctgatgattgcattcgtcattgcacaactggtaaggacatcaagcacacatattttctgaacttcgattaggttaaagaaacccactgaattcattcactccttccaaatgcaggttgcaactttgatcgcagtgtatgccgactggacatttgcaaaggtgaagggtatcggttggggatgggcaggtgtgatttggatttacagtatcgtaacatacttcccacaggacattttgaagtttgccattcggtatatcttgagtggaaaggcttgggccagcttgtttgacaacagggtacatacaagtctatctaccactatagagacctcttttacaagctgatggtaacatactaatcacatcttcttctatgttaacagaccgctttcacaaccaagaaagattacggtattggagaaagagaagctcaatgggcacaagctcaaaggacattgcacggtctgcagccaaaagaagatgttaatatcttcccagagaaaggaagttacagagagctgtctgagatcgcagagcaagccaagagaagggccgagatagctaggtaagtagtgtgattaaaacgaatctcaacggaaagatgccatttgatagaggttctgattggtgaatgatttaatattatgttgtgacaggcttagggagcttcacacattgaagggacatgtggaatcagtcgcaaagctaaagggattggacattgatacagcaggacatcactacactgtgtagttggagttgcacaacaacacaaacatttaccgaaaaccaaccccatcatgactcatcttttgttttgtcttcacaaatctctctttaaaagtcattacagtagagggaagagaactcttgtgtattgccataactcttccaaaactcttttttctttttgttattgttagtcattgttcttaaaactcctactcgatatgagctttgcaaatttgcctttgaagaaacaaggccctttgcctttgaagagacaaggcactttgctttttaatggcctaatgtgattattctatcactcttttgtctgtttgatcaatttcatcttgaagataatatttaaatttaattctaaaacaagaacattcttggttttcgtatagttttggttttcataaatcaagatatttacaatgttgtaaattcgagcgaaagagagtgattagctagcaatgcgaactcacattcgagggatgtgttgttctcgaaagattatcatataatccagtcccgaaagactctatctcaaaagactctatcatagaaagaagatgaagccaacaacaagacatttacaatgagagagcgtttcagcgaagatgaagacaacacaatatttacaatgagagggcttctcagtgctacggctcttcttcatgggcagacactcaagaaaacatgttatttgcaagttgccagataattacgagaaaagacattctctcgtaattcggtttttgcaaattcgaatacttcgtaaatatcatgtaaattttgggaagaaagattttcgtaatagatccttcacaaaatatgtctagtaaatcattggcaagtattgctatggatttgcaataactcttttaaataatttgatttgacacaaaataataatatacatccttgcaaatccgtagtaatttgctatagggaaacttaagaaattataataaaataatattaaaattatttacgataataatataatacatgtaaattgtattgttatttgtaattgcagatgatcatttggctgtttgcactactataaaactttatgcaaaaccaaaagcaaagaatgactctgcgagtcacgtccaaagatatggatgatgacttcaaatcatatatatcaccattcctctaaaaataagaattatttcaactttctctaagctgaaagtaaatactcttctttcaagttgctcgtgtaatccaaataatattgatggtgatgatgaatacatcaattcaaagcagtgacaaattcatccactgtgttaattatgacgaacattatatcgttatgttttgtgcaaagacgaaaatttataatatgaaataaaaatatgtgcacaaaaaataatttaaagtcagtcggcgtgaaatgacaaaattatcatttttttttttttttgttggtatactctcacgtagtaacttataaaataaaataatgaacttaagaaaaaagaaacaagacaaaacaaggttctgggtaacacatgctatccttggatacatcacaaccaacaactacttctcatcaaaatgtgtaaacattaacaaataaataaaaattattgaccagactttcacactttatttacatgtttaacataattacattatatattgttgggcaaaagtcagcttctaaatttcaactttcaacaaatttcttttgacgtcaatataacaaatttaaatttatagtttttgctttgtgattgtattcgccttatcatattgaagagaagaaacaatgaattatattatattcaagaagtattatcttgtacaatagattttaaaacaatcatctgcaattcaagacatacaatgtagcttccaatctcactcaaaatctcctccatgttcatctcttctccacctggcaaaagcttctgcaattccttcaatctcttcttgatctctcctccttcttcttcttcgtcgctgtcttggtgtttttctccaccttgtctcttgctcgatctttctagaatctcggaaggagaactactagtgctaattggatcatcataaggggaagataatagcttctgttgcaagaaacggctccacgcgaattcttgagcagacaatgcgaaagccatgtctacttcatgtttcacggtttgttctaaactttgtttgttggtttttgaagaggatttgttcatgttgatctttttaagagctggaaccaagtgactcacgtatcttcttgcgaaaactgccttagggttcttgtttggttggagagaaaagactcgctttctcttgtttataatttgcctctccatgtgaaatttgtttgcttcgtcggaactctaacagggagatacttatatagagcaaaaactcacgagagagagaaagagaaagagatggtttggtaatgtatgtgaaaggagtaatgatatatatattaactcatgtgatatttgacacgatcgatcacactttatgaagttatttcttttgacataaatgactaatatgtgtgtgggcattgcacaagtatatgaaaaagggtaaaacagaaatatagataatatatttcaatagggttttaactttatggtaaactatgttggcaagtactctcataacaaatgaaatcttatatgattcatgagatctttttctttattagcaaacaaaaaaacgaaagaaagaatcacatacgtttgttgatctagtttcttaatattttacttgacggttgcaaatctttaatgaacaaaaaaaccttgatcaataaccaaatttcgatctaatatgtaagaaaattttatatagttcctctcagacaacgtttgaaattaaatagattttaacaaaaaatcagaagcatacaaatgtaacaaaatgaaatgccattagtttgaattaacatcaacaatattcggtataagaccttggaagcaaattgagcaagattgagattaaagagcggaaagaaaaaaatgaataatgggtgatggaagaaaaaaacacatggagtcacatggaagagctctaaatttggatgaatcatacctaccctaaagagagggggcttgagttccctgtttaccatgtggctccattgcaagaatatgaagacatcaacactcaaaccccacctcctattaatgccttcacatgcccgatctctctctctatacacatcatccacacatatgcttgtatattgtatgagaatatgaatgcatattttgtatgtatgcatgtgtgcatgtgtttgtgtccttgattttacccatttgttcaatctttgtcctttacctctactttaccctcctcatcaattattcttcttttgatcattctattggccgcacttgtgatgactttggaattattagtttcaccacccacaaaaatacaagaaactagataaaactttgttcgtattgataacgtgacaaagatttgtaaccgttatcttgagaattacacacaatcgaatacaaagtttaccgctcgcagatagatcatttctcacatctctcacgaaattcttttgaactcgtgaacttaatttacctaaattgttttactcatatgcatgtcccattggccagctagatcctttgctttttccgttcaaccatcttcacgtggagaaatttcctctttttcctcactgaattttatctctaactaatatatgtatgatggaaagaattttcagattttagacgatgcacttaagtagtctaagtctcggtaatttaatatatacacaaaataaggttccgatgggatcttttactccgatgacaatgttcttacgtgcattaaccattcaaacaaacctaaaacccaaaaaaaaattcggccagtacaaatgaaaacaaaatacggatcaagcagaataaatatgattagtggagattaacaagtacagtggctatgtatcaagtagagtggcacgagtgttaaatgataactataagtttgatcggctaaaatactccactaattttttctataatgtttcgagtaaccaaccttaattaaaacagaaactgtattattaattagttgataaaattaactaatatgatatgtttaggatcctttttagtttttccaaattaaaatcttctttctaatggcacataaacgctaatttaagtgtaataaaaaatgattaaacataccgtatataaatcacacttttgtgaaaattgacatttcacattttcttcataccaaaccgcactttttcggctcatcattcacaagaaagttaaggacttaattacaaagtgttcttctttccttctttgtctttttaatttaatgtttctgtggtattttaatgcagaaggttcaatgtttgacttgcaaaatataaatataaatgtatctgtttaatgtttatagctaactattaatcaaattgaagtactcatgtcaactactattacatttgtggaaaaaggaaaagagctcgcacataaatacatcataaaaaaaacacccaccactcgaactgatataatatcgtcaaactttagaacataataatcaaattaccctatactcgttttcgatagaaaatgtgaaattcgaaattatatgtataattatggtattcacaaagaatttactattttgctaagttttataaactgtccattttttcctgttaatatcaatgtactgtttcaagatcagacgcactgagataaacgggatttaaacctgatatatcatagtgtcacttaaaatctaaaccacttttgaacaatttcagatatgtcagattcagaatatttagcttgttaagcacaactgtaactctttttccgtacattgttctaaacaaacgaataaatttttatatcataagaatctaattccgctcatataattataaccagtagtataataaaatacattgaactatatttgtcggtttgaatgatgaaaaaattcgtacaaggctgtcagaaaatctgtacaaattaaagtctgtgattggtaaatggcatgttatgattttatatattttgtcacgattatattactgaatactatttgactaaatgtaatttggaaaaatagggacccacagatatggttttggattgaagaggagcatgtggattgtgttaagtacattgttttatacttcatttggatgcattccacaaatgtctccacgtgcatttactttacaactttacattcctaaacccctcatttatttccttcatataccatacaattcgttaattatcaaaacacattagttaagaatttattaaaaacaatttgattaatgattagtagtatcttgtaatagttaaacgatctaactacaagatatcaacaatgttaaagaggtcgtcaatgaagttttagaatgttattctaaattgaaagtagatcaattttggttttagtgcaaatatctaactattttagtttagatttggatatgttaaaagttggtgtctttcaaagaatgaatgatgttgtcttccatgccaaaaagtcattaatgtttgtaatactttagggagactgaagagtttgaccagattttctaggttttggttagaattgcaacgacgagtctcatcctccttcacatattttttttctctttatttttcttcttttgattttgacaattcaaaatcttttatcaaaaaaggaaagaaagtctaaaacgtccgtagaaaaaataattgagtttccaagaaagttatataatcgagaattgatttcaataaatttgtaacccatcagtgggcttataagttcatatagacaaaatggatcaaaatgacttgcaaaatggatagcccattttggaaaatatactcaaactctaaaaaagaatcactaacctatgagaaggtataataaaactttgagagctcatttaagccaagagtcttggccatttttctctcaatgtaagtactttccaccttacgttgtatatgttgtaaattgtggtaacccttagcaatattgagaatttgtgttcgaaataagaataagagtggtgaaacaattcttctttttttctttttttttcgtcaaagaaccatacaattcagaaaacaaatcttaaaaaagaagaagcaaaatttcttaaataaaagaaacaacaaatcactaattaacacgtgaacaatcccgtcttatctcacccgcgttaccggttttaactccaacccgacccaacttcgttatagccgaaataaaagcttgtctaaaagttgcttcactagaagcaaatgaattgacagttgatctagatcgttcatcagagaacaaaacttgatctgacgtgaacaaacccatccctttttggaggtttttgaaataagcattgtcaaatgtatttggagaagtaggatccatgttaattgcgatcctcaagtcgacccgaatggggcacatttgtctcaattgtaaggcgtaacgaatattcaaagtcggatcaattggacgtttaggactaaaattgtaaattcttttcgaaaacttgccacaatgtgcgaatcctatagtatgtgctcctgcatatcataaaaattatctgttagacttggttataatatatgaaattaaaatccgtctactccggttttgcttcggtttaaatacctgagagtgcaatcatatcggtttgggatagaccgtgacgagcgaacatagtgttaagttggtccaatttgaaactaggctggggtagactgtgttgaacgctagccactgtcgatagtctgccgtctctcctccctagctctaccggatagttcggtcctccggtctacaatatattattatctttaatttcacaagtcttttagtaataatgacacaaaatgaaaaagaatataatcacacaaaaagggaataataaccaaatcgttaggacacgttagctaaataatcctactatatttacttaattaggtaatgaacattttttcacgggttgatcaacacgtacgtgttccatgattttgtttcttcatagtaaacgaaacagtaatgaattcaagttacttaattagtgtagatattccttcaagcctagatttttctttcgggacatttcattttagcctacattaataatagaattttgaagagatgaataaggtgtcaaggaaattagataaagatcaatataagaattgaaatgtaccaaaacgacgacgtcacgagtggcgagagccaaaatgtcagcgcatgagactttgttacggcagttggggtccctatcaagggcctgctttgcctttgccaccgtatcaaacccgtctccggctagtgacttgtcatcagggtgatccttctcagatggtgatgccagcaatatcgaagcatcacatccctgtatataacgttaaatagtcaaacaatatatacttttttttttgaacacgggccaaacattatactaatatataggagagatttctttattttttcataagtttttaaaacattatgataacttcgtagtattttgaatgtttagtttttagtttataaatttaaaatctttattttaacaacattcaaaattcatagaactacaaaatcattatagaatccatagacaaaaagtaataaaatctatttaattatttttttttgcaaatgaaattaccaataacactttatttaaaacaaatatattcatatttatgttttttatttacttatttaatatttatatttacattaaaaacacgtacaatatgctttttctacccattatcgtttacaaaatgtaaactaatatatcgatttaaaaaaaacttacacggacgaagcaatcatggaagaaaaggcggagggtggccggagccgtaacaaaagtctgctggaacttttggcggacggcattgcggacaatagtttccacgttaggacatgacttccggtaaaaatttgtctgcagctgagcaaagacagatgaggaaaagaaaatgagaagaagagcaacaatggagaagctgctttggttcttcatggcttagaatgttaaggttttgatcattgtgtgtgtttttgtctccatttatagagttgatcaaatttacaattacgggttacgtatggtacatgcaatttagtttattttataatttgaagaatacaattatgataatgactttgttacactctgtaatgtccaatcatatattttgcgagtttgatgtgaggctaggttgaggctcacatagtgatttgtataatattttattttattatactgttgttatatataggctataattgcttaattgaggacttttgattatgtatgtttctttgagagtgttattcaaccatgtattttgggtacaatataattcaaccctcaatatatggctgtttttttttatgatgcattaaagagtagtatactagtattgactgaaattataattatgaagaaattagttacagttataaaaacaaatgtatattttgtgtcattaatcagattttcttaatcaaaggcaaaatctaaaccagtctcggtgtcaagtttaaattgatcttaatcttatctttgccaactcaaagccatgttaccacttcttagcaactacttgaacaagagggactaagaagaagaactcatgtgatttgatccatcttaccagattacatccttctcaagatctaagtttacaacgaggataggatttaaagttgactctagtgatggaaagtaagtttttgtgtatgtggaatacattatttttgatgatatacaatataagttgacaagtcatgcaagtttgcaaaataatgaacgtggaccatactaaagtataaaaagatcaaacattactatatttctgtgcaattaagtgaatgatcacttgaaaaaaccttatgaaattggagatcatcacgagggatgagatataggcagtaatcaagttgattagtctttatgtgtaaatttctccaattgactaatataaatcatatatatgaaagttggccaactctctccaaatgaatgacacatcatcacaaaaaaaaatgacatgtgtcattctatattttttaaattaaaatattaatcaaattaaataagcaaattaaatatatcatcaatcctactcttaattgatttctttaaaataaaaaaaaataaaaaaaattaatgataataaattaagcactacttttactatactctttttattatactatttttttgtgttgtacttgttcgttaccaaacctcttattagtttagtaattttattttgagtctttgataacattgacattcaagtttttttaaataataaacctttaaaacattagacctatcaaataatttaatacacgatcatttctgttatatggatatatgcaatgagagaagatctaaaagtattgacttaaatgctgctttaatttttgtttttttttaaattcttttcatatgaatacttttgaaatcttgttcagtttatatcaattctatatatttaatcatgagtcgataacactgttgttggagtattatatcaagtgaacacatcaaactagaaatagtttatttataatcaagttagacaaatttcaaatcattcaagacatgatcatttctctaatattgatatatgcaatgacagaagatcaaaaaatattgacttaaatgacatttaatttttgttatctttttattttttcatacgaatacttttcaaatcttgttcagttgatgtcaatccaaattttaatcatgagcctatcacaatgttgttgaagtacataaaataagatttagtttaaaattgagttaggcaaattttaaatcacacaagtaacatagttgctcataattttttcagaatatcatatattattgttatatatatttatgaagtgaaaatattaaaattttataaataatcagctttatacatgaaatatataaattgatatttcgagttacaaatgaatctaaccataaaatataactacatattattgatttcattttattaacaatacaaaaataaataaagaataaatataaattagcaaaaaaaactatcaatgtaaatatttttttaacaattttcaaaataaacctacgcgtagcgtgggtactcatctagtattaatataaatcttgagagctctaaacaatgacaactcatcacatggcatgaaaccttgattcaaggaagaaactacgcagcctgtgacatactctcttggctgttcttagttttcgtgtattgaccaataaacacattaaaaaaaaaaaaatgcaaagcctacccctcattgaatatgataatataagaaattagttaatgtcaaaatgttttatgttaaaatttaaataaaagaaggaagatttatttaggtaaatgaaaattcttataagaaaaaaaaaaaaaattgggtgaaaaactgaaaatataacatgttattttcttaaacatatacattattcatgtacatattcactattccttgtttggggaaaataatgttgtgtaaggttaaatctgtgtagagaaaacatcttttgtactacacactgatgggatatgtgcaagaggggaaaataggacgaaagaatgtgaaactaagtgtcgaggcccaagaaaagcttgaaggagtaagagaacgagagaaaaaaaagagtcgttcttggaagtaagtgtgttcgagactaacgatcagaaatctgatatttcccttcttggtgagaatgtggttgtattttattcaatgacgtcaatgcaaaacactcgaatactttcacctatttttttttttctcttgtaacaattggccaacaagttagtctagagtaagatggttgctcgaggtcgaagaagttggcttgatcaatccagtcctatcacttccacagcagataagatagcttgaatcacaagggttcgtatgcggataaactaagatagctttagagtatgggtaaactacgacatcataaatataccatctacatggatcattgatgtactctctctctctctctttttgctttgaagtaggaatggagtgtttcgaaattaattttgatgttaagaatatattgggcttgggactaacagggactgcaaaagatgactgatggaagttgaccaattggtttcgtttgtttatgtttttgggagtacaaatatggactcttcattcaacactaggtactatctccttcatttgaaacatcaagttaagatccaagacaattttagttcaacacaggaaagatgtgcgcgttcataagcaatcgaggagacttcatttgttcgatgtatggaatcatccatcatactaatatggacacagacgttttgaatgacttttgcctctaaatatctggttctgactctaaacactaactactatcaaggttaaaaactcatcaaatatgcatataagatcatctcctactttgtattacacatcacaactgaattcgcacaatacaaactcacaccaaaaaagggctgaagatagagtgaagatcatgaacataccaacaaacgtttgctgaaaaacccgagagtctattcggagtctgaatctgaacgagcactctgcctcacattccttctaacttgtgttgtcgactttggtttaagcgacgatgactctccatcgtaatgaatcacttgcgctctagctattctctcttccaaatcctcagtgctgaaatcatctttccctccaagctcattgaacccaacctatcatcaacaacaacattgatcatccactaaatcatatcctaaagaaactaacaaaatgttctcgtttaaccaataattattgttaccacataatcatcgactttagtgttcttaataagtgcaagagtaggtagaacaacaatcttgagcctctcagccaagaacggacttttctcagcttggatcttcacaaaacgtgtctcaatgtgttgctttgccaatatactcatgtgcttatccatcacctacacaaacatcaatcattcacaaatcaccaaatcatccaaaaaccgttacaccgatcaaaacacatcacttccacaagctctaagaatcaagcaatgcaaacacatccacaaggtctagtggctatgaacaagaagcaccattatttgattcctaacatctctaatcaaagagaattcattgaactacgcaatcgaactctattgaaaccacacaaaaaattcgaaaatgttgaagcaagagattaagaatccatactttacatggccaattctcgcggtagaaatggcagacgacgcgttcgctggctttaacgacggagaagaagtctttctcagaatggatctcagagtattcaccatgtccaagactaatccaacgtttcttcttctctgccattttcttcatttgctttaaccttctctctctcaaaacctctagatcgtcctcgtcaagcttttctaaagaggcgatctcgtcgtctatcttatcttccatagctttagccaccgttagaacttgcttctccagaatctgccatggaaaaatccaaattacaaaatcaattcactgaaaaatttatacattgcgaaattgaagattgaattagaagtgcgttttcgaaatggtacctcttgaataggattcgccatggttgttctttgctctgcaattctgaggatttcaaattttctgaagttttttttttttggtttagatcttgcagattaggtttttggtttctatgaagaagatgattagcacgtgacattccacgtgacttaaaaaatattaagaagtttggcccaatcgattattaacgaggcccatttaatcaaggaaatcatggaaattgaatttaccaaatttgggcctatgaatcatggaaattgaatttatcaaatttacgattgcattttttttttcttttatatttttttttttatataagaaaagaaaacgattgtatttgtaactaatgtaaattaaatatttgaatatcaaaatatactgtaatactatgatatttcactattgtcattaatattgttttttttctttgttgtgtgtttcgaccacaaatgacagatattgttttattctatatgaacgtatgatgtctagtaaacgtgctggtaaagatatttgggtaatattggcatatgtatgtttgtcctaagtttttcatttatataattgtagtagtcacctatgttatatcatcgaagtatagaggtagagttagagattgagagaacttgtatcctccgaattttttcgatattagtgaaatctgcagcagaagaaagtggacgtaactctttttgagtaaaaccactatatatcttgtgtgcacattattttttctactttaatttcgtgttcttgaaaaaaaaattagatccttaattcctgacatatatatgcaacaaatgctaagccacattagtcacctagtgggacataaaattaatacatcaataggggcattattagcaaaccttataaaattacttttaatttttaaaaaaaaatcatgtgtacaagtgaccctcccaaaacctatgtacgtcggccaatgtgcataatattacggacacgcttgcaagaaattttacacaatttcttagttgcataaaactactccgaccaattatctagctagtcctctacaattaatctaaaattagagagctttctcaaataattgtagtctacctaaattttctcattgcctctttctttaaatagcttaacaaaaatcactggtcacatatgtagtcagagtatgttatatatatgcatatattgaaacatcatcctattcaatctcacaacaaccaatctacacacaaaacaataacaacaacaacaacaacaacaacaaacaacaacaaacaacaacaaaatgtttacaaaatcaatccttttaccttttcttctggtaatcatcttcgtctcagcatctcaagctagtcgtcaactctgggatagtggaatcagcgagatgtttggttccaaatccgggtttcatcatggattttccgggttttcggggtcctctggaggtgctggaggtgctggaggatcattcggagatatgatgaatgctggaggtgcacatacatgctcggcgcaaggagcttgtagcggtaagaagctgacatgtcccgaggagtgctacaaatcaaccaacgttaacaaggatggttataaaagcaccagccgcagtggaggatgttcatttgactgtacgaccaagtgtgccgcgacttgttcaaattaacatgttaatttgcacatatatattatatgttcgtatagtatgttgttatgttatgttatagcattatatagtctatatatatgtcaatataataaaaccggcaaggtatatgggaggtttgtgtctccctttgtaattttgtatggatcttgattagaagctttctatgaatctatgtacataatatgattttgaataaaagaaaatttagtgtttcttataattgtgtgagtaaatctctatgccttatacatgccaggaaatttgagaccgtactaatgtacatagcgcgatcaaggaattttggcactatctatatagagttttagttcatgtctttttaagatcaacaagacattagcatcacatggctataatacttcagattattaaaataattcatctaatactttagattggtaagcatataatactaacgttttatgaatgttaaaacttaaatcccccaaaactttaaagaatcaaaacaactaacttatctgtataattataaacatcaattaggttcatttagagatcccaatgattataatcgatataatcaaattgaaaggaataaacatagatcttggtaatagttatagctagtattttaattcacattacggattggtgtttatctggcatctgtgatctactataatttcatttcattcgttatgcttattctaaactcattgcattcctttcttctccaattaaaatttatcatatgaataacatgcctttttcaccaatttaaaaataatgattacttgttatatttagatgtattataaagtaaaatatttttattttatttacataacccatattaattattccaaaatatatgatgaataaatgatgcatagtataaataattgtgatttgaatgattttgtcagcggtaaatgtcactagatcactatttgtgtttggtgaaagacgaattatactttttttgttgttcaaaaaagtacccttttcccccaaaacacatttttagactaagattataatttatcatttatcaaaaagtaataaacttaaatttgaatcatcgttgtaatattagtattatatatatcgaataagaagctatttaaattcttaaaattatattttttttttaaaaatcagatttttcatagcaacactttaagatagggggtactagtagtatgctttgatgatacaaatagcttaaacaaaatatttgcaaagaaattaaaatacaatcttagtagcatgattcgctatcacaaattctcaggttaactaaaattaaagatcctccccacatacaaaaagattgtagtctcccttattttgctcattaccctttcttttaaatagccttttaatattcttcatagaatcaatttcaaatctaaacttaaactctggcctctcttatatgacaactttaatgaataagatcttacttcttttcttcaataaatatttcctctgttcaatttcttgttttattttatttttgaagaatatggttgaaagaatgtctaaagcttgttggttagttgctgccatcatatttacagcggccacggtggtttacggacaacaagcgccgtgtttcttcgtttttggagactcaatgtccgataatggcaataataataacttgaaatccgaggcaaaagtcaacttttcaccttatggtaatgactttcctaaaggcccgaccggccgtttttcaaatggccgcactatccctgatattatcggttagttcccgattaatttcctctagttactcgacatttgtatatcctttatatattttgaaaattaaaaaagaaaaggtttaaaatattatgaacaaatgaaaaaaaaattgtatgagagacttgagaatcaaaatgatactttatagtatcattttattggtaaaccatttttacacttatgtcactagatccaaaatattaacatatctttaatatgttaaaaactatattcaaatatcatttagtaaagtatttaagattttatttttacatattaaaagctaaaattgtgacatcaatagctagtctctccattttgtaccttatgtgttcattcatatgcctaataattacgtattttgaaagatatatatactacatgcatagtccactcaattgtttcttggtcgtacgaaattttattaatggtatattagacgtgttttttttccccttaaaattataggtctcaaattatatgcatgtatattctactttcttacagatcttttccctttatagagcttcgttcgaatgctgtaattgtactttagaaaagacgactgtgtatatggtaacatacatgaatttaatttgtgatgtttttatcgtcaggtgaattatccggttttaaggattttataccgccattcgccgaagcatcacctgaacaagctcacaccgggatgaactacgcttccggtggaagtggacttcgtgaagaaactagcgaacacttggtaagaagtaagaactagaaaaacaacttataaatagactttgtttggtgataaatgattgggctttaatatctcataaagtatagttagttacttagctctaacctctcactttgatggagaaaatgatgtgaaccgtgtatatatatatatatacttaaattgtttccttggaaactgttttagtttcttttgttaacgtttcaaaaattcatacaataacaggatttattcctataggttatgcatcatagccaatgttatacacgcttagaacgtccgagttttggtgggatgttttagtttcagtagctctaatgttttaaataacaaaaccttaaaatatgtatatagggagatagaatcagtataagaaagcaactacaaaatcacaagacgtccataacgaaagcgaatgtaccagcagaaagattgcaacaatgtctctacatgatcaacattggaagcaacgattacatcaacaattacttcatgtcaaagccgtacaacactaaacgacgctacactcctaaacaatacgcatattctctcattattatttaccgttcccacttaaaggtaaagtggaaccatttggtgtgacatatatttaggataatcattcattgtttttatttttactagttatttaaattagtttggtttttagggttatctaacggtgttcaggttatcaagttttcttctaaataaccaaattatgtgcatgcttgtagaatttgcaccgtctaggagcgaggaaggtggcagttttcggactcagccagattgggtgcacaccaaagataatgaagtcacacagtgacggtaaaatctgttcccgcgaagtgaatgaagcagtgaagatttttaataagaaccttgacgaccttgtcatggatttcaataagaaggtcagaggtgcaaagtttacctacgtcgatcttttctccggtggagatccccaagccttcattttcctaggtaaacatattgaactcatgacttataacaagttaactttgatccaataactatgtatgcaaagtacaagaatattttaattcttaaataacaattgaactcaccacgctttcgtaatttcataggatttaaggttggaggtaagagttgttgcacagtaaacccgggggaagaactttgtgtcccaaaccagccggtttgtgcaaacaggactgaatatgtcttttgggatgatcttcacagcacggaagccactaatatggtagtggcgaagggctcgttcgacggaatcataagtaaaccgtatagtatcgcccagcttgcgaaggaatagaggctagccccaacatatagacatgaaaaatgatgacattttgagtttagtagatctttaacagggaaaataaatttgcatgtatattcaatgaaccaaaattttgcgagattaattaatctctcttttagtggaaaatggaaagtaaataaattaatcataattgtaaataaattagtaaattactatagttgctaatcattgcctaaaaaaacggaaaaactaaaataaaacttttaactccgagcaagccgctaactaagcaagtccacggtcctaagcaggtgacaggaccattgatagatcgtctgtactcaataaaaataatctatttatagatatttaagaaaaacgttatgattaattaaggagtatttttagattaatgcaatcatgactatctatatttggaaaacaatacaaaaaatattaaagagaaacctattatcataactatgaacgccaaagttatgggaagagatcaagcttttttttaagcattaaatgtttagatacgttgttatttacatttggactgaaatttgtaactaatttagctaaatattaaggtaacgtcaatttggtcaattggaaaacaaaaattttatatagggcaagagggatatttttatggggggcaatgaaattaattccttacaactcttagaagatttcagaaaattaagggtggcaactctccccccatcttaactaaggtagatccgcccctgcttctaacctctaattgtatatataaagtagcccatttttcttcatttttacaacaaacaaaaacaaaaagaagaagtactatcaacaatatctctataaacaaagaaatatgaaggcattggtgatatgtttgctagtgattttcgccgcggtgattgcggtaccagtggagagtcgtcggaagcatctagactatggtgtgattaccaagtgcgctggtcctaatcctcctccaggatgctatcctcccggagcccaacagaagaatcctactcctgctaacgagtatagacgtggctgcagcaaaattactcggtgcaagcgcgattgaaccgaagtgacgttcatcatttaaactgattcttcatatctatgagctccgtacgtatatgctttaacatgcatatacatacactcatatatgcgtatatgcaaggtgttttatttgtttcaaattagttattaatggattaatcctcagatcattgtatcaaaagatatcaaatatatattttgatattagaaaataaaattattataataattatatagtatcactctccttaatgcatattcaatttttatttatcggctttgattcgatttgtaacactataaagttataaattggaaaattcgtaagaaacaataataactagacgcaaaaggactagcagaataattaagcagacgaaaaaaacaaacattatttggtcactaacctgtaagatgattaatggaatatttgaaaagtggcaagaatatggaccaacgaaaacaaagctctatgccattaatgcaatatcataaaacactataaacattgttctggtagacgacttattacactttataatataaccgtttcttggaaatacagtgaaaactggatttataatcatgctgcattttttttttcctccttactttaaccatcatgcaatttaatttattaacagattttttcccctcttagtagtccccaagttttctctggtttatgagttcatccttatccgaaggtcggtaattcggtatgctacgtccccaaaattttaaggacttgtttatccattctacaaattaccacatactttttttgtgattgtataatttcgacattcactttttagaatgcaacatatcttgaaattgctccaacataaatacgtttaactgtaaaattctttcagaaaatttaaccaaagaaataaatgtattgtgatgacatatatgaccaaaacaaattggaagtcaaaaccagagaagtagaatttcactgcttttacgaaatacaaaacatatttctttgtttttaatgcaaacaatatctcagtcataacatggaaaataacgaaatcctgattatatttttgttatttcttgactaagtattggttaactagtcaatatagacggttgtaacaatttacagcaatcgaagaaatctttctcatcttctttgcacttcgtctcaataaaaaaatatgaaagcaaacctaaaaataactcagaattc

SEQ ID NO: 249 - DNA, 105528 bp, Arabidopsis thaliana
aagcttttctaaagaggcgatctcgtcgtctatcttatcttccatagctttagccaccgttagaacttgcttctccagaatctgccatggaaaaatccaaattacaaaatcaattcactgaaaaatttatacattgcgaaattgaagattgaattagaagtgcgttttcgaaatggtacctcttgaataggattcgccatggttgttctttgctctgcaattctgaggatttcaaattttctgaagttttttttttttggtttagatcttgcagattaggtttttggtttctatgaagaagatgattagcacgtgacattccacgtgacttaaaaaatattaagaagtttggcccaatcgattattaacgaggcccatttaatcaaggaaatcatggaaattgaatttaccaaatttgggcctatgaatcatggaaattgaatttatcaaatttacgattgcattttttttttcttttatatttttttttttatataagaaaagaaaacgattgtatttgtaactaatgtaaattaaatatttgaatatcaaaatatactgtaatactatgatatttcactattgtcattaatattgttttttttctttgttgtgtgtttcgaccacaaatgacagatattgttttattctatatgaacgtatgatgtctagtaaacgtgctggtaaagatatttgggtaatattggcatatgtatgtttgtcctaagtttttcatttatataattgtagtagtcacctatgttatatcatcgaagtatagaggtagagttagagattgagagaacttgtatcctccgaattttttcgatattagtgaaatctgcagcagaagaaagtggacgtaactctttttgagtaaaaccactatatatcttgtgtgcacattattttttctactttaatttcgtgttcttgaaaaaaaaattagatccttaattcctgacatatatatgcaacaaatgctaagccacattagtcacctagtgggacataaaattaatacatcaataggggcattattagcaaaccttataaaattacttttaatttttaaaaaaaaatcatgtgtacaagtgaccctcccaaaacctatgtacgtcggccaatgtgcataatattacggacacgcttgcaagaaattttacacaatttcttagttgcataaaactactccgaccaattatctagctagtcctctacaattaatctaaaattagagagctttctcaaataattgtagtctacctaaattttctcattgcctctttctttaaatagcttaacaaaaatcactggtcacatatgtagtcagagtatgttatatatatgcatatattgaaacatcatcctattcaatctcacaacaaccaatctacacacaaaacaataacaacaacaacaacaacaacaacaaacaacaacaaacaacaacaaaatgtttacaaaatcaatccttttaccttttcttctggtaatcatcttcgtctcagcatctcaagctagtcgtcaactctgggatagtggaatcagcgagatgtttggttccaaatccgggtttcatcatggattttccgggttttcggggtcctctggaggtgctggaggtgctggaggatcattcggagatatgatgaatgctggaggtgcacatacatgctcggcgcaaggagcttgtagcggtaagaagctgacatgtcccgaggagtgctacaaatcaaccaacgttaacaaggatggttataaaagcaccagccgcagtggaggatgttcatttgactgtacgaccaagtgtgccgcgacttgttcaaattaacatgttaatttgcacatatatattatatgttcgtatagtatgttgttatgttatgttatagcattatatagtctatatatatgtcaatataataaaaccggcaaggtatatgggaggtttgtgtctccctttgtaattttgtatggatcttgattagaagctttctatgaatctatgtacataatatgattttgaataaaagaaaatttagtgtttcttataattgtgtgagtaaatctctatgccttatacatgccaggaaatttgagaccgtactaatgtacatagcgcgatcaaggaattttggcactatctatatagagttttagttcatgtctttttaagatcaacaagacattagcatcacatggctataatacttcagattattaaaataattcatctaatactttagattggtaagcatataatactaacgttttatgaatgttaaaacttaaatcccccaaaactttaaagaatcaaaacaactaacttatctgtataattataaacatcaattaggttcatttagagatcccaatgattataatcgatataatcaaattgaaaggaataaacatagatcttggtaatagttatagctagtattttaattcacattacggattggtgtttatctggcatctgtgatctactataatttcatttcattcgttatgcttattctaaactcattgcattcctttcttctccaattaaaatttatcatatgaataacatgcctttttcaccaatttaaaaataatgattacttgttatatttagatgtattataaagtaaaatatttttattttatttacataacccatattaattattccaaaatatatgatgaataaatgatgcatagtataaataattgtgatttgaatgattttgtcagcggtaaatgtcactagatcactatttgtgtttggtgaaagacgaattatactttttttgttgttcaaaaaagtacccttttcccccaaaacacatttttagactaagattataatttatcatttatcaaaaagtaataaacttaaatttgaatcatcgttgtaatattagtattatatatatcgaataagaagctatttaaattcttaaaattatattttttttttaaaaatcagatttttcatagcaacactttaagatagggggtactagtagtatgctttgatgatacaaatagcttaaacaaaatatttgcaaagaaattaaaatacaatcttagtagcatgattcgctatcacaaattctcaggttaactaaaattaaagatcctccccacatacaaaaagattgtagtctcccttattttgctcattaccctttcttttaaatagccttttaatattcttcatagaatcaatttcaaatctaaacttaaactctggcctctcttatatgacaactttaatgaataagatcttacttcttttcttcaataaatatttcctctgttcaatttcttgttttattttatttttgaagaatatggttgaaagaatgtctaaagcttgttggttagttgctgccatcatatttacagcggccacggtggtttacggacaacaagcgccgtgtttcttcgtttttggagactcaatgtccgataatggcaataataataacttgaaatccgaggcaaaagtcaacttttcaccttatggtaatgactttcctaaaggcccgaccggccgtttttcaaatggccgcactatccctgatattatcggttagttcccgattaatttcctctagttactcgacatttgtatatcctttatatattttgaaaattaaaaaagaaaaggtttaaaatattatgaacaaatgaaaaaaaaattgtatgagagacttgagaatcaaaatgatactttatagtatcattttattggtaaaccatttttacacttatgtcactagatccaaaatattaacatatctttaatatgttaaaaactatattcaaatatcatttagtaaagtatttaagattttatttttacatattaaaagctaaaattgtgacatcaatagctagtctctccattttgtaccttatgtgttcattcatatgcctaataattacgtattttgaaagatatatatactacatgcatagtccactcaattgtttcttggtcgtacgaaattttattaatggtatattagacgtgttttttttccccttaaaattataggtctcaaattatatgcatgtatattctactttcttacagatcttttccctttatagagcttcgttcgaatgctgtaattgtactttagaaaagacgactgtgtatatggtaacatacatgaatttaatttgtgatgtttttatcgtcaggtgaattatccggttttaaggattttataccgccattcgccgaagcatcacctgaacaagctcacaccgggatgaactacgcttccggtggaagtggacttcgtgaagaaactagcgaacacttggtaagaagtaagaactagaaaaacaacttataaatagactttgtttggtgataaatgattgggctttaatatctcataaagtatagttagttacttagctctaacctctcactttgatggagaaaatgatgtgaaccgtgtatatatatatatatacttaaattgtttccttggaaactgttttagtttcttttgttaacgtttcaaaaattcatacaataacaggatttattcctataggttatgcatcatagccaatgttatacacgcttagaacgtccgagttttggtgggatgttttagtttcagtagctctaatgttttaaataacaaaaccttaaaatatgtatatagggagatagaatcagtataagaaagcaactacaaaatcacaagacgtccataacgaaagcgaatgtaccagcagaaagattgcaacaatgtctctacatgatcaacattggaagcaacgattacatcaacaattacttcatgtcaaagccgtacaacactaaacgacgctacactcctaaacaatacgcatattctctcattattatttaccgttcccacttaaaggtaaagtggaaccatttggtgtgacatatatttaggataatcattcattgtttttatttttactagttatttaaattagtttggtttttagggttatctaacggtgttcaggttatcaagttttcttctaaataaccaaattatgtgcatgcttgtagaatttgcaccgtctaggagcgaggaaggtggcagttttcggactcagccagattgggtgcacaccaaagataatgaagtcacacagtgacggtaaaatctgttcccgcgaagtgaatgaagcagtgaagatttttaataagaaccttgacgaccttgtcatggatttcaataagaaggtcagaggtgcaaagtttacctacgtcgatcttttctccggtggagatccccaagccttcattttcctaggtaaacatattgaactcatgacttataacaagttaactttgatccaataactatgtatgcaaagtacaagaatattttaattcttaaataacaattgaactcaccacgctttcgtaatttcataggatttaaggttggaggtaagagttgttgcacagtaaacccgggggaagaactttgtgtcccaaaccagccggtttgtgcaaacaggactgaatatgtcttttgggatgatcttcacagcacggaagccactaatatggtagtggcgaagggctcgttcgacggaatcataagtaaaccgtatagtatcgcccagcttgcgaaggaatagaggctagccccaacatatagacatgaaaaatgatgacattttgagtttagtagatctttaacagggaaaataaatttgcatgtatattcaatgaaccaaaattttgcgagattaattaatctctcttttagtggaaaatggaaagtaaataaattaatcataattgtaaataaattagtaaattactatagttgctaatcattgcctaaaaaaacggaaaaactaaaataaaacttttaactccgagcaagccgctaactaagcaagtccacggtcctaagcaggtgacaggaccattgatagatcgtctgtactcaataaaaataatctatttatagatatttaagaaaaacgttatgattaattaaggagtatttttagattaatgcaatcatgactatctatatttggaaaacaatacaaaaaatattaaagagaaacctattatcataactatgaacgccaaagttatgggaagagatcaagcttttttttaagcattaaatgtttagatacgttgttatttacatttggactgaaatttgtaactaatttagctaaatattaaggtaacgtcaatttggtcaattggaaaacaaaaattttatatagggcaagagggatatttttatggggggcaatgaaattaattccttacaactcttagaagatttcagaaaattaagggtggcaactctccccccatcttaactaaggtagatccgcccctgcttctaacctctaattgtatatataaagtagcccatttttcttcatttttacaacaaacaaaaacaaaaagaagaagtactatcaacaatatctctataaacaaagaaatatgaaggcattggtgatatgtttgctagtgattttcgccgcggtgattgcggtaccagtggagagtcgtcggaagcatctagactatggtgtgattaccaagtgcgctggtcctaatcctcctccaggatgctatcctcccggagcccaacagaagaatcctactcctgctaacgagtatagacgtggctgcagcaaaattactcggtgcaagcgcgattgaaccgaagtgacgttcatcatttaaactgattcttcatatctatgagctccgtacgtatatgctttaacatgcatatacatacactcatatatgcgtatatgcaaggtgttttatttgtttcaaattagttattaatggattaatcctcagatcattgtatcaaaagatatcaaatatatattttgatattagaaaataaaattattataataattatatagtatcactctccttaatgcatattcaatttttatttatcggctttgattcgatttgtaacactataaagttataaattggaaaattcgtaagaaacaataataactagacgcaaaaggactagcagaataattaagcagacgaaaaaaacaaacattatttggtcactaacctgtaagatgattaatggaatatttgaaaagtggcaagaatatggaccaacgaaaacaaagctctatgccattaatgcaatatcataaaacactataaacattgttctggtagacgacttattacactttataatataaccgtttcttggaaatacagtgaaaactggatttataatcatgctgcattttttttttcctccttactttaaccatcatgcaatttaatttattaacagattttttcccctcttagtagtccccaagttttctctggtttatgagttcatccttatccgaaggtcggtaattcggtatgctacgtccccaaaattttaaggacttgtttatccattctacaaattaccacatactttttttgtgattgtataatttcgacattcactttttagaatgcaacatatcttgaaattgctccaacataaatacgtttaactgtaaaattctttcagaaaatttaaccaaagaaataaatgtattgtgatgacatatatgaccaaaacaaattggaagtcaaaaccagagaagtagaatttcactgcttttacgaaatacaaaacatatttctttgtttttaatgcaaacaatatctcagtcataacatggaaaataacgaaatcctgattatatttttgttatttcttgactaagtattggttaactagtcaatatagacggttgtaacaatttacagcaatcgaagaaatctttctcatcttctttgcacttcgtctcaataaaaaaatatgaaagcaaacctaaaaataactcagaattcatcttcaagctaattttaacatccttaatttagctaaatctaatgaatcttctaacctctttgtatatataaagtagcccatctttcttcaattttacaagaaacaaaaacaaaaagaagtactatcagctatatctcaataattaaagaaatatgaaggcatggctgatatgtttgctagtgatttgcgcggcagtgattgcggaaccagtggagagtcggaattacatagaatatggtgcgattaacaagtgtgccggtcctaatcctcctccgggatgcaatcctcccggggccgaacaaaagaaccctactcccgttaacgagtatagccgtggctgcagcaaaattcatcggtgcaggcgcgattgaaccgtagtaccgttcatcatataaaattcttcatttcaatgagccccgtacgtatttgcttttcatgcatatacatacacttgtatatgcgtatatgcaaggtgtttatgtgtttcaaattaattaggtattaatgtattaatcctcagtttgtattaaagatatgaaatatatattttgttattgatttaaattattataataattaattagtgtttatcactctcataaatttatattcaaaacttatatctgctttgattcgatttataacactatcaagttataagctagaaaatctgtaagaaaaaataactagacgcaaaaggacaaaatataccaaaacattatttggtcgctaacctataagatgattaatgaaatatttgaaaagtggcaagaatatggaccaacgaaaacaaaggtctatgctatttatgcaatagcataaaacactataaacattgttctggtagacgacttattacactttctctaatatttctatctttagcatgtgcataatactttataatataaccgtatttttggaaataccgtgaaaactggatttataatcatgccgtattttttttcctccttactttaaccattatgcaaactagtatttaattttctgacagagttgttcctcgattcagtagattttaacatattattggttacttcgtattactttagctattaggccacatatgctagctgcagaccaaaatgatgggttttggactcgtgatggtaataagaagaaaactagttacactagatgggcgtttcatgatttcaagaataaaaagctattgatggtttttcattatctagagagtccaaagttttcatggttcaatgaaaatgggatggagataaactctgatgtttcttgggcataagtcaaacaattcttatggagtgggaaccgtaagactaatgttgtaacgcctcagtcccttcttagtgaggcccacgtcttctccggtttgtgagtccatccttatccgacaatccttatccgacagtccgtatactatgtctaaagattttaaggacttgtttatccatcctacaagttatcatataattttttcgtgattgtatagtttcgacaatcatttcttagaatatcacctgtcttgaaattgctctagtataaatacgtttaactgtaaaattctttcgggatatttaaccaaagaaataaatgcattgtggtgacatatatgaccaaatccaaaataaccaccataccatattaagatactttattatgatattcataacaaaatcgaccaatgtcttttactttgcttgtagccatgaaaacaaggccaaaatcctctgtttaatcttgatacgatatttgttattttctactctttttagattgtataaaagatggtatggttagtagacaaacgtatgtattaaatagcctaaattatttttcagaacttatagctcatgaacgctaaaattcaacagattacacggtttcaacccataaacataatggctttatttaagtgcacgtaattttcatagtttatatataacaaagaagatctcagtcataatatgaaaaataatgcaatcctgattacatttttgtttttccttgactaagtgtaggttaattaatcgatatagacggttgtaacaatttacagcaatcaaatataaatctcatcttgttcacactttgtctcaatacaaaaatatgaaagcaaacctaaaaataactcagaattcatcatctagctaattttaacgtccttaatttagctcaatctagtgtatcttctaatctctttgtatatatatataaagaagtccatttgtcttcatttttacgacaaaaaagaagaagaagtactatcaacaatatctccataaataaagaaatatgaaggcatgggtgataggtttgctagtgatctgcgccgtggtgattgcggaaccagtggagagtcggaattacatagaatatggtgcgattaacaagtgtgccggtcctaatcctcctccaggatgcaatcctcccgggactgaacaaaaaaaccctactcccgttaacgagtatagccgtggctgcagcaaaattcatcggtgcaggcgcgattgaaccgtaatgatgttcatcatataaaattcttcatttcaatgagccccgaatctatttgcttttcatgcatatgcatacacttgtatatgcgtatatgcaaggtgttttatgtgtttcaaatgaattaggtattaatggattaatcctcagatcattgtatcaaagatatcaaatatatattttgttattgatttaaattattataataattaattagtgtttatcactctccttagtttatattactagtccttttcttgaggaaagacgtttctgctttcgataacattttccatttcaattcagcttccagttccttgatcgcattaattagaagtagagggattagccatacagaaattttcctcgattcattacagattttaaaatttaatttgttatttaccgttttaatttgtattactgtagattctagacatcaggctaaatatgctttgcacacacttttcagttttaacatattacaggcttaagaaacaaaagaaatgcactttaagtaaaattatttttaggaaatgcaaacaaaaagaaaattaatgcaaaaagtcttactttcggatgatattttgaagaactaaaatcaaagtgaagcaattaatgaacctgaaattatcaaagtgattaagtgaagttattaacacaactcacacatgtgcatgacgatgcggtttttttcctcttaaacttggaatttaaattaacgagatccaattatttgactcaaactgtttctcattggctaacaatgtgactcaaaagctagttgatgtttttgaaaaaaaatcatagtagagccgtcgagcagttttttttgttcctggacaaaacactttttttttaaccataaaaattattgttaataaaatcgaccaatgtctttcgcttttctggtttgtccaagaaaaaaaaaaagtcttttgcttttcctatagccataaataaaaaaggccacagtcaaataatcttaatttgcgctatttgttattttcttattctttttatattatatcaaatacggtatgattagtagataaacgcgtttattaaatagcctaaatagtttttcacaacttatcatgaacgctaaaattcaacaggatgcacagtttcgatccatatacatcgtggttttattttaagtacacgtagttttcatatatggtagaaaaaaataatatttatgtgataacatgaaaaataatgcaatcctgattcgatttaagtgttggttaattagtcaatacagacggttttaacaatttacagcaatcaaaaagaaatctttttcatcttctttgcacttcatcatttacaaaaatatgaaagcaaacctaaaaataactcagaattcatcttctagctaatttttacatccttaatttagctaaatctaatgcatcttctaacctctaattgtatatataaagtagcccatctttcttcaattttacaacaaacaaaaagaaaaagaagaagtactatcagctatatatctcaacaaataaagaaatatgaaggcatgggtgatatgtttgctagtgatttgcgcggcagtgattgcggaaccagtggagagtcggaattacatagaatatggtgcgattaacaagtgcgctggtcctaatcctcctccgggatgcaatcctcccggggccgaacagaagaaccctaatcccgttaacgaatatagccgtggctgcagcaaaattcatcggtgcaggcgtgactgaacccgaagtgacgttcatcatttaaactgattcctcatctctacgaactctgtacgtatttgctttacatgcatatacatacactcgtatatgcaaggtgttttatgtgtatcaaattaattaatagtttattaatcctcagatcattgtattaaaaatatcaaatatatactaactgtgttaaattatataaagtgttcatcaatctcctttacatctaattttttttatcggctttgatcttatactaactataactaggattctgatttataatactataaactggaaaatttgtaagaaaacaactagacgcaaaaggactagcaatataattaagcagaaaaaaaaaatttggttactagctaacctaacctgtaagatgattagtggaacatttaaaaagtgcatggcatgactcgaccaacgaaaacaatgaagttgaaagccatttatgcaatatcctaaaacagtcagaaacttggtctatatctcttgcatatgcatggataatactttataattataaccgtttttattaaaacattgaaaactggatttatgcggtaacttttttccttcttattttaacatttaattattcctcaagttttatttacctttgttcgcatattcttcttttttatataatcaaatatagtatttatttatatatattttcctcaattcattacagattttctcaagttaggcagatctacttgaagagagtaagaatacaaaagtgtttaggaagaattgtaataaactctcatgaaaatagttataagagatacattatgttatataaagatgagatttcctaatctacgataaacttaaatgtaaataatatatttaaagataatgttaaactttctaaacttcaattattaacgtttattaataatcttttagatacttatagaataattatcttgatcttgtcatttcaaccgtcaatctcggtcgatttccggttttcaataccagttctctatattctaataatgtgtttgaacaataaaacaaataacaaagtacaaactacacctcattttagaagtcatcgcaataattaacatgttgaatgcgtcgactttgcataacaatctttttttttctgttcaatgtgatcatattattcagttaaataaaataaaatcaaacaccacaagattcttcacgaaaccaaatatacgtatctggctcttattcagagactttgatatttgtctgttaaaatgacttctaatattcttattacaactcacgtacaagttgacaattgaagattttgccgaacataaaaaaaaaactacttacttacaagttgacacttaatgatctttcagaaaatctaagaattaccatccctgtttaatttattcattatctattctgtctctagtcttgaaatagaattttacttctgtctgtttctgtctatatatgtttatatataggctcttatctgttcttgaacgttaacaatttcagtttctggtcattaatttactaaaatggccgaggcaatattcaaagcgttgttgttggtcattgcgaccaccgcatttgcaacgaccgaggcggctcttggacagcgagtgccttgctattttgttttcggagactccgtcttcgacaatggtaacaacaatgtcctgaatacctcggccaaagtcaactattcaccctacggtattgattttgctagaggtcctaccggccgtttcagcaatggtcgtaacattcctgacattatcggttagtctcccagattttgtttatctttttgccaataattttatggataaaagagtgaatataaactacgaaaaagaaagagtttttaagaatatattgtatcacaatgtttcctttgcgctgtttgaagttttgaatgtaggtattatttgtttttagctaatgtatcaaatgaatacatgaaaaatggaagaaattaaagttttgatcggtaaaacatatatagaacttagttataaagaaaaagtagtcataaaatgccacttaaaacattatatacgtttgaataatttgtcctttcttttttgtcaaaagaataatttgtccttatttcagctaaactaatgagatatataagaactaacgaaattaaagttttttcatgtttgaaattaaagaagtaactaaagtttctcaagttggttcttatatgtttaccgaaacattgtatgagatacgagtttgaataatttgtcttcatttcagctgagctaatgagattcagtgattacattccaccgttcacgggagcatcaccggaacaagctcacatcggaataaactacgcttctggtggaggcggaatacgtgaagaaactagccaacatttggtaagaatgagagagattatttaaagatattttcatttttgtttacagcaacgcctactttgaacattccatcggctatctaattctttgattgcaaatggaaaaccttagacactaaatagacaatatttataataatcgataagttttctggatgttttatggattaaagtgtattctttttgacaatatagggtgaaataatcagttttaaaaagcaaataaagaatcaccggtcgatgattatgacggctaaggttccagaggagaagctgaataaatgtctatacacaattaatattggaagcaatgattatctcaacaactattttatgccggctccatatatgaccaataagaagttcagtttcgatgaatatgcagattctctcattcgaagttatcgctcttatttgaaggtccaactatatatatgcctaagattttaggaaaaagataatataggatgtattataatatcgtaggaaaaggtggaaattgaataactaatatattgtgtaaacaaactaatatacgaattgcttatattattatttttaattaaaaaatgaacacgcatattcttgttcatatatccttatcattaatttaaagatgaattttgtgtatagtcattgtacgttctaggagcaaggaaggtcgctgtgtttggggtgagtaagctcggatgcacgccgcgtatgattgcctcccatggtggtggtaatggttgtgctgctgaagtgaacaaagctgtagaacctttcaataagaacctcaaagctcttgtctatgaattcaaccgagattttgctgatgctaagttcaccttcgttgatatctttagcggccaaagtcctttcgcgtttttcatgttaggtatgtaaactctgtatacatttgacctaagctatagtccctttcttaaattcataaagataagagttatttttttgtcacagatttcaattagaaaatttattttcgtagtgacatgctatgttcgatttttttcctataatttaatcataaatttatcacatatatttttgtagggtttagggtaacagacaaaagttgttgtacggtaaaaccaggggaagaactttgtgcgacaaatgaaccggtctgtccagttcaaagacggtatgtgtactgggacaatgtccacagcacagaagcagccaatatggtggttgcaaaggctgcttatgccggactcattacgtctccttacagtctttcttggcttgcaagattatagggacaacattacaaaacagattaacattactttatatatatgctgacctttattcttcaattcaactgtattatttaacaaggaaactttgtttcaacgtgtgaaccttttttttaagaaaagaaaaaagaaaatgaatgaataaataatgaaatataaaaatgggtgaacattactatatgggatatccattaaccaagaaattcaaaaatattactttctgggcgaaatatatgaattgttctaggctaaactttgttttttgtcagatggctgagtttagtttttgaaattcgtaaaaacaaaatgaataaactgccaacgttaaatttgttatttttctttttttcagccattccgttcaaattatatcacggttgaagcatatatatactcaatgaactataatgatataacaaaccctaaaatacataattattcttccaaatacattgcatcaatttagaatcgctatttctaaattctagcaaaatgcaagtatagtttccaccactgaatcttgtaaatttgtgaaaggggttgctaatttgctacaaagatggtccaaaaccgctaccgatatagcaaacaaccattatatatgatatctacttttcaggtatattttggtaaagatggaatcatgaaaccttgtcctttttgatgctagagctcgttgattgctctattgtccatccatatagggaagtaatctgatataactacgtacttatacttatgtaggaagaagatttttcatttggcggtgatattcctcatgcactttagggctcatatatgagttatattcaaatttaaattggttttaacattaatatagaaaaagtattttttccatactctagtaatttcattattaatgtcattgtggttgttgatttggtcacaccagctatatatattttgttattttaaattttgcatatagagagacgactatatgtatccaaatccctaatttgatgggactcacgacggtttgaacttcaattttttaacaaactacagctcattgtagaggtcatcgcaataattaacttacatgtccaatgcgtcgactttgcaaactagtactatgttatgatgtgatcgttttatttaattaaataaaatcactacaaggttcttcatgaagccaaatataacgtatcagactcaaattcgaaaatgaaaattaaatatatttttctaaaacaccacgagattttcctattatgataacttatcattttctcatcacaactcatgtacaagttgacttttgaagttcgaagatatctccaaaacaacaaacaaacgatccacatacaagttgaatattaaagatctttctaacaaaatcaaatattaaacatccctggtactaatttttaattctgtctatgtcgcgctctatgtatgcttatatatagacttttctcattacgtatacttcaaagttgccattttatctttctgttaattgttttccaaaaatggccgataaaatgttcaaagcattgttgtgggcttttgccacggcggttgtgatggccgaggctgttcgtggacaactagtcccttgctatttcgttttcggagactctgtcttcgacaatggtaacaacaatgagttggataccctggccaaagtcaactattcaccttacggtattgattttgctagaggtcctaccgggaggttcagcaatggtcgtaatattcccgactttatcggttagtcccagttttggtttatctctttgccaatattgtttttgataaaattgttgatatagatatctaaagaaaaaggtagcaaaataatatctctttgccaatattgcagcatgatatacattgtttgataataataataaaactatgatatacattttccgatatgagtttgatttcaacgattttatttcagctgaagaattgagaattagttatgacattccaccattcaccagagcatcgacggaacaagctcacaccggaataaattacgcttctggtggtgccggacttctcgaagaaactagccaacatttagtaagaacagaataaactcaagagcgagagctacaaacaaaaatatttttatcttctttgggtatttcatttcatatacatatatgattaacttaaaaaaatagttattttgtaataatggttttaacttcttttttttaaatacgagtggtaaccatatttacaaggtttacaattttgaaaacataatattctatagaaatttaatttatccaatatttttaataacggtaaacgcaaacgctttaatcatgcgtttgtgattacagtttccaaaaattgtttgataaaaatacttaaatgctgtgttctatgataaacacattacagtagtttaacatgtaaatgtaaacaaaaataacagatataatgctttagattccaatttaacagcttaggcaccaatattaagctatatatatatatatatagaatcgatgagttttctttccaggttatgtataaaacatgtgattgatcaaattatatatatattttttttaaaaatcttaattagtctcttaatagacagcatgaatcacaaggaatcaaacttaaaactatactatacatgttttaggtgactaaagaagaataatgtggtccatggaactaatcatttgactataattgatttgcttttttggcaggggacgttaaaatcactcatgtattatatttaacattgcttgcagtcttttactatatataaaacttaaactaattacctatggattatgatatattatttttgacaatatatatagggtgaaagaatcagttttgaaaagcaaataactaatcaccggaagatgattatgacggcgggagttccaccggagaagcttaagaagtgtctatatacaattaatattggaagcaatgattatctcaacaactatttcatgccggctccctacactaccaatgaaaatttcagtttcgatgaatatgctgattttctcattcaaagttatcgctcttatttgaaggtacaactatatatatgcttatgatcttattagaaatgtaatataggaattatagatcttaaaatttgattatcatatagagttttactttatgtatatagcttttctcacgccaaattctttaatattttagtgattaagtattattcaagaataattttaaagtattgtattatatttataaacatcttcaaattaattttggatagcatttctaaaatataatcattactcattacactagctacgtacatatcaactagtgattctctttaaagttaattttagaaaataaaagaaaaagtatttaatatcataggttaaaggtggaaattgaataagtgatagactatgtaaatatttggatatttttctctaacatatatactcctaattatgtatcgtacattaatttaaagatacatttttttcgcgtatagtcattgtacgtcttaggagcaaggaaggtagcggtctttggggtgagtaagcttgggtgcacgccgcggatgatcgcctcccatggtggaggtaaaggctgcgctactgaagtgaacaaagctgtcgaacctttcaacaagaaacttaaagatctcatctctgaattcaacagaatcagtgttgttgatcatgctaagttcacctttgttgatcttttcagcagccaaaatcctattgagtatttcattttaggtaagtacgctatatatatatatatatatattaaactcactgcattattgagctaataggaaataaattaaacaaattaaaaacatattacattctttgaaatattatcattatgactgttacttacaaaaggtatttattcaaaaccacacatgtccacacaaaaatttatataaatatcttgaaaaatgtagtttgtttttttgggtcaaaaattaatgattcgtacaattagaaaatttactaatcatagtaacataattgcaaaactacttctttagttatgttctttaattagttagatcattaatatttcacatgtaattttgtaggatttacggtaacagacaaaagttgttgtacggtagaatcagggcaagaactttgtgccgcaaataaaccggtttgtccgaatcgagaacggtacgtctactgggacaatgtccatagcacagaagcagctaataaggtcgttgtaaaggctgcgtttgccggactcattacgtctcctataagcattttactgcttgtactataatattgctagtaaagcctaaaaagatatcattctgcttccaaataccttgcattaatttagaattagtattgctaaattgtaacaacatgccatcatatttccatcattgagttttgttatggatttggcaaacaacccaatctaagtcaaattcattgcatgcaagatcatactaaatgttgtactggagaaagcacgatattctatagcatttttttttgtttaaatgttaattccattgtagtaagaacaataatatatagtttagaatctgttattacaattcaataatcactacaatataagtagaattcaaatgaaagtgcataaatatttgtatacgtcatgtatataaaaaacatataaggcctagatatcttcataaaagtgtttcttgaaggcctccatgtgagccacctgtagacacgtcgcgagaatcaccgagccatcttcgttttgatccggcaagatcagcgagtcgccgtcaaagtcatgcgtgcctggtcccgtgtagaactctttgccccatccgaaatcaaggccgtacattggcaaagttaaccagctcaccactccaagatttgggtttccgtagaatggaccttccgtgcttcccaaggcatgtagatcttgaaacttcttcagatctttttggttcttaagatactctatcccaatcatcacgtattcgtttgttacattctttatggctttactgattaaactcgccgcgaaacccaattcattcgatatcagttcacctatatgcataacaaaattatcgaaacagactttgcattgtagaatcagtacgtactaacctacatttacgtggatgaaaagcaaccaagaaaagtttcatatatccaagttcttcagataattttaattgttcagcaatagtagaaattaatgataatccatcagtttcataaaagagtcgttttgacggtcttttgacacgaattctaagataaacaaattacaatattttgtaatatttttgaattgaaaaaaattaataaataaataatatatataattggaatataaaagtaatgaacaaaatcataatttttgtttagaggactaaattaaattttgaagaagtgtattcaaattcacaaaacaaacaaaatttctatggatagtaatagaaaagaaagaaaaaacacgtacctgaggtgcttgctgcgaccacgtcaagagtagcattgccgaagtagccgcgtggcagaggtggctccatccgactacgagtatctatacagattcctagagccgttggttgctccggagagtggccacgtgctttacacgcgcacctccacacgtgtccggtgacggtctcgtaccttgtaaaccctttcgccgggtcagagtgtttgcttccgttggctttacttcgtagcttctgcagctgagatgtgctcagtggtagcatcaccacaatcgttttcttctttctctcttctacattgtccgtttctccgatcaaaaacggtggctgatcaaactctttgtggtcgaactttgggggcgacacaaacggtgggagcggttcaccagcccagaggattttccggtctagaaatggaacggtttctaacggttcaccgcgcgcgagtcttccccattccgatattaagtgaagcgcgctttggccatctacgatcgcgtgggaaacgttgacgctaaggcttattccaccgcatttgaatttggttacctgagctaaaaatagaggaatcgtttcgatagggtttttatagtttacttgcggcataagattctcgaattccggcgtaggagagaagtctttgaaatccgaaagcttcccctcagattccgcttcaatgaattccactccctcggcgttacaattgagctcgaaccgtccccgagggagccatctgagacggccagccatagggtaaaaatggactagcacacggctcaacgaggtttttaggatttcgactacattgccttggaaagattcagatggcttgtcgtaaaagtaaagggtgggaatgtgagtaattgtaccaacttgatcccactcggctaagggaaacctaccgctccacgttggttcggccggtactatagtgtaagattttctaaaagttatgggagccataacacaaaccccctttctttttctcttctctttttgaagttcgtgctaaagtaatgtttatatagtacacagaatcatatggattcaacgaatttttcttgctgttagtcaaaattcaaaaatgtttttctcgtggtttagtttgtttccttcgaagcagcttaattagtggaagtgagaataaggtttagttttgttggttgtatatgatcacgcgtattacccttcttctctattttgttcacattgtggatgaatatatatttccacgaaaaaatgaaaaaaaacgaggtaagaacatataacataaaattcatatcactattagggaatgtgttatacttttttatgcaagtatattccaaagtataaattctaaactaaatccttaagtatatatcataaactctaaaaagaaatggtaaatccaaaatactaacttcatagcattaaattcaaaagcccacatcgccagttttgattatatcttctgaatttaagttgagtttatttttataaagtcatcttgaagaaaaaaaatgtggatgatgtattttacactgttacacagtaattttagtttttacaaactaacaaaaaggagaaaacaattccactttctccgagtctcctcctccagtagttttgtcttaatgggtaatttgtgggccttttaaagcccaaaatgagttatcgtattaataaaccctagttttaaacccgaccgactaaaccttaacccagacccggactcgactggatcttctcttctcgccccatctctctctatcgacgatcgaacttacttgagtacttcttcttcttttgaccagagctctcacacatacgagtcactataatggaaggcgatcaagagacgaatgtttatactttggtggcaaggaagccttccttcgatctcccaacagcttgccctaattgtcttcctgcttatatatacctgaaattagcccagctaccttttgaacttgcgttcaattcaaccttccctgattcaggtttgcttctgttttgattcctcgcttcgtattttggttgttgttagattaaggttttggttgcgtgatgtgtatctgttggaagtgaacattgttaattctattagcttgaattgagattcgaatcctagacaagataattttgagttctggattcgaattcgtactattaagatcctgctcttaggttaatcagagtttagatagggtttttaggcaatagtaattcaattttgaggtgtatatatgcattggtgaatttttctggataggaagtgttcatcataatttcttgttatagctttggttgaattcctcgttatcgtaattgttaattcgaagagaatgatgatgtttcatacttgttcagaagaaattagttgtttgatttagctattgagtttgtatattaacaatatcttcagaatttctatgttatgtttgataatatctctagacacttcgtaatcctttgttcacggatttacaaatttgtgcattcaatatttataagcttgtgtattgacaatgttaatcatttgtttttaatatagatgaactgccgtactttgaaagtgatacatatgttgcatataacaatgaagatggaggagtaattgaaaaactgaagaaagatgggattgttaatctggactctcagctacagtctctttcggattatttatctttgaaggctcttattgtgtcttggctagaagaagcgcttacctatgagatatgggttggtaccgaggggatatctacatcgaaaatctactattcagatcttccttgggtgatcagcaaggtcctgttttataagcagacatacttggcaaagaaccgtttaggaatcaccaaagagaacgcagagcaaagagaaaaacaggtcgggtttgtttaagttttgttgttactttagaagacctgtggtttatatttgtgagcatttgaactagttattaaagttcatagtcttaaatgtgaacagatatacaagagagcaagtgaggcatatgaagctttgtcgactaggttaggtgagcagaagtttctctttgaagacaggtattgcaatcacattccggaactggattctttcccttaagcctttttgtaaaagattgacaatgtttatattattctcttcccacaggccatcgagtttggatgctttcttactctcgcacatactttttataatccaagcgttaccagtgagcagctttaaatttcaccaatatatttctcagttatgggtttatcaggttgaatttagccttagaactatttagatgaagtagttttcttaatggtgcatgatcaggttacatcagtgcttcggtgcaaacttctggaacatagtaatcttgtgcgatatgctgagaaacttaagtcagagttccttgaagcctcttcttcatctccttcacctccacttcactcattcccttcctcatttccaagaaagagtaagacacatctaaccttcaacgtccatatcatatatatttcatcatattatatatctgtcatatatgcaacattcattggatatgtttaagcctgtgaaggaagtgaatttcatcttttgttcaggttcgaagccaaagagcaaaccaaaggtagaaaagaccgaagaggagaaaaaatttaagaaaagagcaaggttctttctagctgctcagtttctagctgtcgtcatttacgtatcagtgatgggaggaggtagttctgatgaactggagtatgaagatgaagatgactaaactaaagcttttcttattaaatggaccggtaactctcaggcgaactctctgagactaagataaaaacataaccagtaatctctacgcttttttcttcttgaactcttagttatggagaggatacagatgtgagatttagtcacattataatggttttcgacttttcgttctgaaggagagcttttggcttttatataaatttcattggtttttaaggcacatcatgggaaccgattcaccggataaaataccgaggaacattagaagactcttggtacacatcctcagaatcaactgaactaactctatttgtcttactaaataatacaaatctcatccatctaagaaactatcttctgatagcaaaagatgatgccaaaaacctacctaattctaaactctctaaaaccaaacaaaattaataacaagtactaggaattgaaatttacatccgggggctgctgctccgacgcatcgtctgctggttggctaacaagcttcgagtgttcatcggccgagttgatggaaaactcagctagtgaactaactgcaacagacattccatggcagagaaccttcacagcaacctctgcaagtttctcagcagtcatcacaacatcttcttctcccttatcagccactacaagctccatgctttctgacccggagtatctccttgacccgcttccactccagtttggatcttccctaacttgccttgcatatattgaacccatccctgaggcaaagaactcaagtttgtccaaaactggtttttcattcaagctgttaagcaaccttgaccattgaatgcagactcggtatatcgggtgaagacatgaggataatctaactttttcggggtcaggatcacatctgaaacatcttagaagccaaccagataatgctttcatgtaggatctctgagaggtgatccagaattcaaaacaggttctccagtttcgaagctgagcttcaagattcaaagcagattgagctaatctttgagagttaatagcctctggcattattggaggttgtctcttcttgtgacgctttgaaaccggtgtgcctgcaagtaacagtttggcttcgtctagtgttcgtttctgtatctggtgactttccgccattactttccacatccttgttaatctgttatgatcatgattaccatttgtcagtctgaggcttaaaagtgaaaccgaagagaaggaaaaagaagttgttggtgttgttacccttcaacgagctcaagaagctgaggcaacagttcttggtcacgaagagtctcgattcttttggagatggattcaatggagtgtattgacaccttgatctgtgtatctagatctctgatagtagccctagttttatcaaccgcaagcggatcatctcctttcacgtcctgattcctcagctgcatacatttcttttcatatgctcttcgaacacgttctccagactgttacaacaccacaaagacggctcagttataaccaacagagattaatatgtagtcactagttgcttatatctcttgttacttaccctaacttcatcatagagtttcttctcccacgcgaaaagtctgtccaatgttgtttggtggctacctgaaatcatgcaagattcatctgaaacatcgcttctgctttcagacccgctctctcttgaaccaccagaagaagtgatcaagaatcttgacgaggaagatcttgatgaacccgagcggaacaacgctactggattcagcattttcctggctacaaacacacataaaaaaggacttcatatttataagtgaagtcattaaacagagaaatattgcaacattgttcataaactcaccactatggtcattaaaggatgatgtgtattgagctctaccagcttccaatagccccgagacttccttagccgcatcacaaattgttgtgaactgatcttcaagatctttgattacttcagccatgctagttggtctccggttcacatataccgtgaaccccgtcgtctttgcatcatctctaacaccaacaacattcttcatctcttgaaccttacctactccaacaacattccctgtagcttctcctcctctacacacctcagcttttcgctgttcttgcgttggaggagcaacgcatttctcgtctccctcattctcagtctcacacccgctatccgtaaactcatcatcatcctcatctccatcctcgtcttcatcctcatcaacatcttcaactttaacttcctcattgcaacaactcttatcaactttacctctattctcttccgttgctttcggattcggattatgattctgaaaccgcacattgacgacaggttcaggtttatgaggttcatcatcttcttccaaatcaggaatcccttcttcctctctaacacgtctcaatcctctaatctcatcatctataccactcctactatcaacacttcctcggtcataactattgtatccataataatccaacgaagaaaacggattccagaagaaatcccactgcgaattctgcggtgaaggaggaggaatgttatgactacttaacctttgctcaggagagctcaacggattccaaaacgaagatgaagtagacgcagaagtattcatattcatattcattccaaagaaaccatctgattcaccatattggttactactactaggtggagaaaatgtctcaactctaaacgtttcaggagatctctgttcgactctaaccggtctacttctattagccatcaaataattcgctttcacattcgatcttggcctaccttgaatcattttcggaggaatcgaagaaggcgaaatggagatgaactcaccgctattactacggctgcttcgacgacgtctctgtggcattctcttgaccggagtgacgaatgagtcttgacagagagtaggaacaaactcattgttgttgtctccttggaggataaagtcatggagagcatcagagacttttctaagagagtgaatataagcaatgtgaccagaagcaaacttagttctatgttcaatagcttgtttgatgaaacgtttcctgtctttacagatctgaactgcttcttcatcatctaacttggaatgagaacatcccatttctctctactcttctttcctaagctcaaatccagagctcaagacactcatacaaaagctatgaaacaactgagaacagaacaaaacaaagacataataactatgtctgaactcgcattaactgagaaaaagacaataagaagattctttgcttaatatacaagacaaagctctttagtccttaaaacccttgaagagattttgcttgttttctattaaagggtgagattgtactcagaaataacagaaacccagatgagaaatggtgtaaaatcttggatttggtgttgtgaaaatgtcaaaaggaaagtaaagagcaaagccagaaaagaagttattgaagaaagagagagagaagacaaagaagaagaagaaaaaacctaataatgagtcaaaagaaaagagactggaggagcgtgagggatacacagtagagagagagagagacgttggagaaaacaacggtcaaaattactgtcggattttgaaggagagagaatgaaagaaagaagtcaagactcactcgcaatcaagaagttgaagaagaagaagacagaggctacataaaacaaaaccaaaaaaaaacatttgatagaactaaaatcgtgtgtattgatcgaaattaaaagagatgattaattaataaataaagtgaatggtagagctaaactaaattttaataaagctacgaagaatatatattggctaagagaaagacgggacacgaagcttattttgtttctatcctcgcttttcatgtttattttcgattttgccactctgaatatttcttgtcttttttctgtactaagttttatgtttatgagtttatatatggcatagtctattgatgtttacattacatttattttcatacctcaattgttatactgatattaatttcaatcttataataacatgaatattaatataatgacataacgatgcaaatagtgtaaacaactaaattatactctctgttttcttttctttttctagaaaatatacaaatattaagaaaacatattaaatattgattttaaatgtattatactttgtgatttacaatttttaataactctaaactaatagtatttaataatttttattaaaatttacaatttatcaattataattaataagaattgcattgaaaatctaaaaaatcaattttttagaataataattttttctagaaaatcaaacaaaaataaataaagggagtatatcatattaccgatagtgatttacttggtaacttctaaattacataagttttttttttagttttactaatctatatttttgtcgagttatataaattacatttgcatggtggattgttttgtgtaaaatggaatcaattcggagaatctatatgagtagttaagcatgggcaatttagtaacttaataagcgtcgccagtgggaaaatacgttggacgaatttaggaaaagcaacaaaaagaaaggaccggcctgtaaagtaaaaggcaggatctggacccacatttgtaaaagatatcatgaaaatgcctcgatacctgatacgtacttcttcttttttttgtccctgggaatttcacgtaaccacaaaactgccattaatattgagaactagaatttctccgcaatctattttattgggccaagcatttacagtcatatctagcacaatggacataattgtcgtaaagttaaattgcagacttagcccgtaacgtagtttcttgaaactgtaatttattacatttagaatgattgaattttttttatttttttttaatataatgttaaattatattcaaaagaaaaattatctttttttacaacatgtgcaacttgtttgaaatgaagctgaaagtttagaattgaaatgaaaatttagaaactagaagtgattaggctcttgtatcaaaccacatttggagtcccgcatcgtagtgtctatctccctttattcgaattgatgaaagaatgtttctcacttgtttgtcgatccaaccaattagccgagttgctgaatgcagagtgttcccatgtcgtcttctgttgcgttcgctccagattgagtaaaccgaagcttgaaaggcataacgcacaagaaagttttcaactcgattttgctgtaaactagaaaccgtgttaaggaggaggtgccaatccgttgtgaaacgcgtcgttagaatgttctttgctgtgactgtccagacttcagaagaataggggcagttaaaaaagaggtgatcacgagattttgtgggatgattgcagaagacacatgatcctgaagaaacccctttccaattagccattcgatctcccgtagagaggcgatccaaagctgcaagccaaacacagaaagaaaattttggagtcgcttgataaaaccatactcctttgtaccatgtaaccttggtcgcagtggttcgaatattgttccaagtatctcgtgtagagaactgtggtttataaatgtcatttcttcctcgccaaaccacatcatctgctttctccttgcggttcgcctttgatgtagctatgacgttttctacttgatttaaatagtctgttatgtgccttcggctgcgatgtgtgtcccaaacctcagccactaacttatctcttttaatgcccaggtcaataatacctttatctccgatgaagttcattattctgcccatacaagaccagtcatcataccaaaacgatgtgcgttgaccattgtgtacttcaatcttactaaaagtttttgccacttctcggtactttagaagcttcttccacatccatgatcccatcgttgtggagctttttattatccagaaagagttatttttcaagagattcgtttctatccactttacccacagtgagtctccatgggataatattcgccaaatcagcttcagacaacagacatcatttgcttctttcaaagatcgcagtccaaggcctccctcctgtttcggtttacaaattgcttcccacgccactttagctttgcaagagctaaaatgaccataaaaaaagcagagcatattttgtttatttccctgagacaggcacgtggaagtcgaaatgcggccatcaagaaatttgtgatgctcgataagaccgaactgatcaagtttagtcttccagcataggagagaaaacgtgatgtccaagtaccaattctgtgtcgaatttgttctatgagaggaagagaatccgcagatgaaaggcgttttgtgaccaaagggagccctaaatagcgaaccggcaattgacctatatcaaaagagaaatgattgcttatggcttggtaatttgaagcttgtattcccgccaaatacaaagtagacttctccatgcttatttcagacccgaccatttagcaaaatcatctagaacctccattattccttctattgatcttacttttccatcagacagaatcatgaggtcgtatgcaaagctcaaatgagttaaacccaactttttgcatctcgggtgataaccaaaatgatgtgcacctgcagctttatctaacattttagagagaatgtccatacttatgacgaagaggtaaggagatagagaacaaccctgccgcaaccctctcgcactttggaaaaagcctgcaagttcaccattcacctgaaccgaaaaagaagctgtactaatacagagagtaatccagcgtataaaaaccgtggggaagttcatagcttggagggcatttgttaggaaggaccactggaccgagtcaaacgctttggatatatcaatctttagagcgcaacggctttagattgagtccttatggtaatctttgactaactctgttgctaacaacacattctcgattagtaacctatccttgacaaaagctgactggtttcctgctatgaatttggggggcaccagcttgagtcgattggcaattatcttggatatcaccttatagatcacattgcagcaagagatgggacgataatctttcatctctttagcctcctttttcttgggaatgagagctaaaattgtagtgttgataccctttggtaaaaagccttttgcgaagaaagattgtatagccaagataaattcattaccaagaatctcccaagtggctttgaaaaattctgaagtgaatccatccggccccggagacttgtcatttggcatagaaaataacactttctttatctcttcagcagtaaccacacgagttaacaactcgtgttctgtttctgagcatctaaagggtagtaaatcctgaagatcagccatagttactccctcatactcgttgggaataagttgtaagaactctctgaaaaaccgctctgcatatgctttaatctcatccccttttgctgtcacactaccatcttggcattgaatttcgctaattgagttctgagcctctctagtgaccaccgctctgtggaacgccttattgttcttatctcccccatccaaccaatgtaactttgattttttcttgagaaatttttcttctagtcctgcaacatgttcccatctgtcatgagcctcgacttcttctttcattgcgttaggagtaggattatttagggttgactcttgcttcttgcacaaagtgtcataggcttctcttgtcttcttaaccaagtttccaagtctctcttttgccaagtttcgaagtaagggttttaaactctttagctttttggagaaccgaaacagtgaagaggtagataaaaagattggctctgtttctttccagtaggaatctactgtaggcttgaaatcctccatttcagtaagaacattcacaaatttgaaaggtctctttcccctaacaatactgcctggaccatcatttaagtttattcggcctcgtaggtggtctaaacatcctccagcttcaaacacactataagattgaggaaaactctgagtccaaacatcattcaccatgaccctgtccaacttcttggcaatgagatcatgttctcttttgtttgaccatgtgtaaagtggaccatgatgagccatgtccgtaagagaacaataattcaccatcgatctaaagtcacgcatgcccattgaaaccacaggattatcctccacttttgaatgctcttctagttctaacgtctcattaaaatctccaaaaataatccaaggcttcttcttaatgataggagaatcataatgatcctgcaattcattccaaagaacctttctatcatccctgaaattggatgcatacacaaacgaacaaaaaaactcatcatcccggttctctagctttactgaacaggttatgagctgttcactcttatagaaaggactcaaacgcacatttctcctccatactacccaaatacgacctcgactattgtattcgaagtttgtaatcatcgaccaatcattgaacaacttactacttaacacctgagctttatcctcctttactcgcgtctctaataaacaaccaaacagaaaatcttgtctctccacccaactctttattacggaatgtttttctaacttatttagacctcgaacattccataagaattccgacattaatgatttttaggagggtgcttcttactctgatctttaggaaaattcctattcgattgagtaaaagagtttgataaaaccttgtgagcagttttggatccacgtggaagagacagacgttggttctgcacctccgtacgtacatgaacatggtcttgagatactgtcatcttcacagttggaacttctgtaccagggtcgtctttcttagtttcttcacccgcctctgggatcttatttccctcctccacatcctcatctccactcaggaccgagtatgagttggataatatggagacctcaccaaacttaagctcccctgtttttatagttggactgcgacctgtttttggaggagttatccagcccttatcattctcagattcacttgaaacaatcgcaactgagttttcttggctgcagtttcctgcactttcatttgttttctcctctagactcttcttctctgcaatgtgtagaggcgattgtgtagaagtggcagctacttcaacaagagtctctttttgacttaaacttacattagattcttgtcccttgacagacagacatgaatcaattaaatgtcctcatttcttacaacagccacatctaggaggcaaccaagggtaagcatattgtataaccacctctaattctccctcctcttcacccatgaagctatattcagtaggtaaatcttttgtcaaatccgcttcaactaaaatttgcgcttcatcaaagctaacacaagcttctgttttaggatgtaaatgtataggtttccccactgcacttgagagaaattctagacccttatctgtgaacaaagtgggtggaatgttagagagggtaatccacaaaggaattgacttcagggctggctgcatatcctctgtaaatggggtccatttagacatgatcatagggatgtccataatgttccacattcctctgttaaggactctgtttctcataacttcatttcggattcgaaatttcacggtggtcgcgttaacctcatagacgtctatcaaagccgatttatctcctatcctccagattttgttaacaatcatatggatctttcccacatgtggagctttagtattgaaaaatttacctatcagagaatctttccaaataggttttgcaccagcaaaaacctcttttggtaccaccactttctctttcccatccacttcagacaccacaaacttttgcttcgtaaaaacatgttttttagccactttaacccaagattccttctgactagtgccagcgacctgctttgataaaccctccggctgagaagcaacaaaacctgttgcagaaacttttgaatcacccaaaaccactatagcctcttcctcctgttgggaaaccatcttttgagtaacttccggcaacttatctccatccggatgaggcggagaagccaccgccggctccatacttgctagaaacgcaaagaaccctagatcgccttattttctcttttaatcattgagtttttcaatgacaaagccacaccacatgtttgactaatttaaaagcttaaaccaactacgtactaggccttttgttcaatatttacatgtttctggttcatggtatgtgattgaatgcaagtttttttttcttatctgtaaaaacagatatacaaaaatagcaaacccaagtcggtttggatcggattcagtatatagtttgagctcatgttagttgttgatcgaatgtccactatcatgaattcatgatatcatatatcctcattgtgtttttcactgtgtacatatcatgataaaacactcgtctcttgtctttgtccccattttttaaattccaaaggtcaatattatgatgcacgtattggattttttctaggtgtacgtgtatatagatatggttgttactttattactttgcatcaattctatcatattactcgaaggtgagaaatatgttataaatattcttgataaaacgatatggttttcttttgtaaagatatgattatgataatattaacgagttaagtatacaattaagcttgaccacctcatggtcctcattggtaatttagttcttgcattgcactttcataatcacttatagcaacttttctcaaaaatattatatatgggcaaacaataggtgtcctatatcattttcttttttaatttctaatgcatcacgataacatatcgaacaatattttacttcatattcgtgtatcattttatacaataaatttaaaagtttagaccgatcaagagattccagcccacttaggctttaagaaatctatcggttagatgcttgcatttaacaattctactaaaatcaactatgaaataaatcccatggtgaaaatgatttctttaataactaaaaactaatcttagaataaaacttccactaatgtacatgtatcaaagagttttataaagaatatccattagaaatgattgaaagagagataaattcttgttgatgtcgaagtctaaaaatgaaatgtttactataatgagaaaagggtgaagaaaactgaaaatagtaagttacaattcttaaaagttccaaagattcaggaactataattttaatgtgattaggtggtagaacgaatataagtacgaccacttttcgatacacaaaaagaggtttccttattatgacaatttctattcatattcaatctaatgtagtaatgttcttgcccatgtacatgtagtatacgtttgcgtattctattgttcacccgcactatgtaatttctcacaatatctatagtgttggctaattttgtttgccttttccaaaagatttttagaaataactatcatcttagtagtcctattatccgttgtcaagttgtttataaactctttgttatctaagtattacaggaaataagaatttgctcattgtgaataataaactagaagttgtgttaaattaaaaatttattatatactttttatgtttctttttaattgattttgtagaaaaaacacacagattaagaaaatatattaaaactaattataaatgtattaatttttgtaatttatatttttctttaattataaattaacgatattcaattaattgttctaaattttaaaattcattaataataactaataaatagtgcatagaaaacaaaaaaaaaatcaatcattttgaaacaatagtttttctaaaaaatcaataaatgatcaaaataataaaaatgcaatgaacgcgacaaagcaaagtttgaataaaagcaattaatgaacctttactcaagagtacattaactggaaatatttgatgaaacaattaataaagttttacatcggtttggaaagccgcaccatccaaaatttgagatgaaagaaaaaaattacccaaactatggattttatagtttttgcgatcaagataccacaaacttaccgatcgggtatgccatgaaaaagcttaaagctaacattcaagatgtccttgaaacctataacgatgattattttgttataggtttaattacctacgacaatttgaaacttttttcccattctgactattgtactctaataaatgatgcaatcaaaatcttccatgcacagagaagagttggtaattgttgcaattgtaaaaacaaaaacccataaaatctcaagaacctcatgtcacacagataatgccacattgcttacttaaaaaatttgctttcttgtttttcttttttttttttttgccaagaaaccaatgtttttcttttctctttttttttttttgagcaaaaccaaaaaaccaatgtatatttgtactttaccaataataaaatctcaaaaacttgaagataagtttgatcaaggccgacccatgggtaaaaagcccaacaagcgaatgctttaggcaacaacgtttataaatgtttttagcagcctcactaaccatcaagagttttgctttatttgttatcatattctttttcgcagtatacactataaagatgcggtcatattatctatattttttgtaacgatttggctgggactgtttgtggaccacgacgtctatttttggttgatggatttctacaatatacgatactgaaaagagtaaaaatcatttattttattataaaaataatgtctccaactttctcttgtaataggttatggcttgtattcactgattcttaatgcattctagtataactttatgtcatttatttatttaatttagtggtttatcatttaagccgcatacgtctttactctatctctttctcctagagtataactataagttatactatgcaaacatgtgagattttattagaaagtataaaagatataggtagatattaagagataagctacgaaagtagacgacattggtgcgttgcgttaaaagaatttgtagttaattatttagaatgataaactaagaaaatcgtactaaaaacaataataaagaaaacaatgagatgaggaatcacacatggattccattttcgtgacattccacttttgggggtttccactaaattttttataactttgatttcgtgtctcttcctcacgagataaaatccccctttgaccatttgtttcgtccaatcaacttaaaacctagcaagaactattaatcataatataattattcagattcttagatatgctatatactaatgtgcctaaactcgtgacgtatcggaccagttttagtcccgccctactttcaaactaataatgttttgtaatctcaatacttttccttcaaaacaattttaagaaaactgccgtatttgttatgagctaattataatcgagcatcctaccttgaattaacttggtttcaagactaattaagatcgacttttccaaaataaagtcatgcataaaaattgatttaaatattatacatacgagttatgacaatttgtatataaaaaaatttgctggacgtttgagtaaaacgtttcataaaatataggaactgaatcttgaagataggaaccggaaacaaataactaaaaagatagcctacgagatttacgtggtaaaaaaataacttaaaaccccataaaaccttaatcaaagaaaaaatggtttaataaaggtttcaaaaatttagtaatggttctaaaatcatttggtaccccccttattaaactttcaacaaccttatacacctactagatttgtggtatttttaataattttgaatttttgtggtagttttggaaaacatgatttaataatttgaagcttttcgaattactctataatttttaatagagatcgatcattatccctaaatatatttataaaaaatctgataattactaaaatgttaaagaaaactaaccaatcatcttgcatctaacattcttacttatctgcctatataagcaacaactcccatttcttgacttctctatgttcctaacacttctctcaacctttatctgatcgcaccaaaccagttttttcgcatcggcttcttccttttgctactagctctcctctcttctccggtatttttgtctctcttcttaattcacacagatttcatgataagtgatgatctataacaagacgctaactcttctcttgcatttctcgtgttttcattttcttgttacgccaaatttatcccttcaaaatcatttttttatgcgtatagaatccaaataataagtaaaagctgattcgtcttcttccacttaacacaagtaagcaatgagagggtgaagatttttctttaggaaaaaaaagagagtgaagatattttttggcttgatctcaacattattttttcttaaaagtaaacattttcaataagaaaatacaagacccataccgaaagtttcttcttaaaaaaaaaaaaaaggttttgaactgtttcatgataatgataactaaaaaagtttttgctttcttgttttttttcctccgcaaaacagtcttaaagtataaccaaaaagcctataaatcaatataatttgttgttttgatttacgttttacagaaaatggcgttacaaaacaaagaagaagagaaaaagaaagtgaagaagttgcaaaagagttacttcgatgttctcggaatctgttgtacatcggaagttcctataatcgagaatattctcaagtcacttgacggcgttaaagaatattccgtcatcgttccctcgagaaccgtgattgttgttcacgacagtctcctcatctctcccttccaaattggtaaatcttttttttctttgtgataataaagatttttttaaaaaaaaaaattggtaaatcattataaataaatagttatttaatatttctctaatttttaattttactcagtcaaaaaataataattaaaaagcataaataattattttatattacacgaaaagctcacttcatcttatttctatttataaattagtggttttgcgtcatggtttgatattttaattagtcaaatatatgtgatccaacaagtcacttcaactgaaaatatttaatattctaccactcaaatttaatttgctttcccaaatcatttcttcttaagaaaactagtttagatccaattctgttttaccaaagtaattttttcttaattgctttgctttgatatttatgtactgataaagtggggtaaatggttgtgtttttaacctaggagctaaaggtcaatattaaaattaacagttttttcgcctacaacaaaataggataaaccgttactattttttttgttttattaatcccatgaaacacgttcagttagtataaccaaagattgtgaataaggttcgtctagttttttttcaaactgtatctagtaaaccaacaaattaaaaatggtaacttttatagaaacgcataatgatataataacggcaataatacaacgatcacatgtttttataaattctaaattttgcatatcataaaacctttaccacattttgttttttttgcatattatagctaacctaatacatgcatataacgcatgatacgtgtgtaaccaaataaataatatatttaattgacatcatatatagaatttaattccgaaatcatatatagataatacataatagaataaaggttgttagaaaaagcctgtcgtgatactttaccaaatcttttgatatgaatatttaattggtagtgcatcatactcgttacgtaacaatattttataatttttatttgacagaaaacatattctatattagacattgaaagttaaaaataatcaaataaaaaatcagaaaaaattaaataataacactattttcatcattaagaaaatacactattttcagtttattatttactagtttttaaggtttgaatttataaaaattggctaatatttgtcattttcctcacttgcaaatatattttaataaatcttcttccacctttgttaattaatgatttaattctgaaaaacattgtgttgcagctaaggcactaaacgaagctaggttagaagcaaacgtgagggtaaacggagaaactagcttcaagaacaaatggccgagccctttcgccgtagtttccggcttacttctcctcctatccttcctaaagtttgtctactcgcctttacgttggctcgccgtggcagcagttgccgccggtatctatccgattcttgccaaagcctttgcttccattaaaaggcctaggatcgacatcaacatattggtcataataaccggtaataccactttctcctcttttctttatgctgtcgttataccacttttttttttagtattcattattagcatctaacattatttctctatattactccgtgacttaagaatgatgtgttctataataatttgttagtttatgggttatccgtgatcgatgtaacaactagaaataatattgttacttatctaagatttgaaaacttagcaaattgtggttaaggtaaaactattaatatatataatttcttaaaacttgtgatcgagtctctatccctttttcggtattttaaaaaagcttacatactgctttcctacaaacccaacactccacgaaaccttttagaaaagtttcctttattttgttcataacatttttagataaattcatatgggaaaactactaaagaataggtattaagaaaaatattgtattatgctcaacttattttactgaactccaatataggaaaaattaaatacgtgtagcagtttgatatgtttgttatattgtagagtttatttgagttataggttatagaggaaaactaaaacaactttatatttttgccgtaagcaatgcaaatttgagttatagtttataggaaaaaatcaaaatgttcttaggatataggaaaagtgaacatgtgatataaacttgaaagttggtgtggaagataatgcaaaaacaaaaggtgcatttcaaaatacgggaaaaagaaagacgcctttctcttttctgtttataaaaatatacattttcgttcatttctactagtacgattatttataggaacatacataatttcaaattaaaaccatctaaagagtagagaaaataattaaatattttgttcaaggaaaatagttatattgtctatatcgtaggcaagaaaataaaaatcagttttattttccttgggtgcaattaagatgtcaatctttttatataaaatcagagtaatttcataccagaaatcagactaaattttgagatttgtaggaagtctcaaaaatcatagtgtgatatcttttgatgattttttctaaaacaattacaattacgtgccatagatagaaaaacgctaagcataggtttttgattgaaaatggaaaatggaaaaagaaccttcaactcattaaaagaaaacaaaaaagtgcatataataatttaaaatatcatcaaaaatgaagaaattaattcagaacttggaactattatggagctatggaattagttttagttggaatttctgtttagtagacataattaacaagaaaccatacaaagtcatgtgaatccaagtttttttttttttttgatttttttttatttcgcttggtagatgttatagtgttactttaagctttctttgattttctaaaaacaaaatattttacactgagaggtgatacaatgttttaggtttaaactgataatgatccaatttcttcaatacagtgattgcaacacttgcaatgcaagatttcatggaggcagcagcagttgtgttcctattcaccatatccgactggctcgaaacaagagctagctacaaggtttgtgtcctaatattattaggctaataatcaccatctataacaattgtgaaatctcttgctatttttataaatgattttgaagttgaaactagaatggtttattaacgtaatgattattgcaaatgtaatatctcaggcgacctcggtaatgcagtctctgatgagcttagctccacaaaaggctataatagcagagactggtgaagaagttgaagtagatgaggttaaggttgatacagttgtagcagttaaagctggtgaaaccataccaattgatggaattgtggtggatggaaactgtgaggtagacgagaaaaccttaacgggcgaagcatttcctgtgcctaaacagagagattctaccgtttgggctggaaccattaatctaaatggtatgtaatcctattttaagagcttcaagctttatacatttttgttgtatctttcattcttttggtctttcttggtgttttttttgcaggttacatatgtgtgaaaacaacttctttagcgggtgattgtgtggttgcgaaaatggctaagctagtagaagaagctcagagcagtaaaaccaaatctcagagactaatagacaaatgttctcagtactatactccaggtaagcaaagacataaccagaatttctttatgtttttgattcgagtaattttgagacctctgtgtttcttgttttgtttcagcaatcatcttagtatcagcttgcgttgccattgtcccggttataatgaaggtccacaaccttaaacattggttccacctagcattagttgtgttagtcagtggttgtccctgtggtcttatcctctctacaccagttgctactttctgtgcacttactaaagcggcaacttcagggcttctgatcaaaagtgctgattatcttgacacactctcaaagatcaagattgttgctttcgataaaactgggactattacaagaggagagttcattgtcatagatttcaagtcactctctagagatataaacctacgcagcttgctttactggtaaaaaaaaaacttgtgtactgaccataacaagtttgctgagataacttatgactgagactttcttgttatataatgtttcagggtatcaagtgttgaaagcaaatcaagtcatccaatggcagcaacaatcgtggattatgcaaaatctgtttctgttgagcctaggcctgaagaggttgaggattaccagaactttccaggtgaaggaatctacgggaagattgatggtaacgatatcttcattgggaacaaaaagatagcttctcgagctggttgttcaacaggtacttgtaatataaagctcaacagaatgttttgaggtcttggtattctttagtctgagcacttgattgttctttctttacagttccagagattgaagttgataccaaaggcgggaagactgttggatacgtctatgtaggtgaaagactagctggatttttcaatctttctgatgcttgtagatctggtgtttctcaagcaatggcagaactgaaatctctaggaatcaaaaccgcaatgctaacgggagataatcaagccgcggcaatgcatgctcaagaacaggtgagactaatataaaccatatttttaatcactctcttaagcgaagacgttgtttaatagtaccttgaaatgttttatgaaacagctagggaatgttttagatgttgtacatggagatcttcttccagaagataagtccagaatcatacaagagtttaagaaagagggaccaaccgcaatggtaggggacggtgtgaatgatgcaccagctttagctacagctgatattggtatctccatgggaatttctggctctgctcttgcaacacaaactggtaatattattctgatgtctaatgatataagaaggataccacaagcggtgaagctagcgagaagagcacgacgcaaagttgttgaaaacgtgtgtctatcgatcattttaaaagcaggaatactcgctttggcatttgctggtcatcctttgatttgggctgcggttcttgttgatgtagggacttgtctgcttgtgattttcaatagtatgttgctgctgcgagagaagaaaaagattgggaacaaaaagtgttacagggcttctacatctaagttgaatggtaggaaacttgaaggcgatgatgattatgttgtggacttagaagcaggcttgttaacaaagagcgggaatggtcaatgcaaatcaagctgttgtggagataagaaaaatcaagagaatgttgtgatgatgaaaccaagtagtaaaaccagttctgatcattctcaccctggttgttgtggcgataagaaggaagaaaaagtgaagccgcttgtgaaagatggctgttgcagtgagaaaactaggaaatcagagggagatatggtttcattgagctcatgtaagaagtctagtcatgtcaaacatgacctgaaaatgaaaggtggttcaggttgttgtgctagcaaaaatgagaaagggaaggaagtagtggcaaagagctgttgtgagaaacccaaacagcaggtggagagtgttggagactgcaagtctggtcattgcgagaagaagaagcaagctgaagacattgttgtcccggtgcagattattggtcatgcattaacgcatgtggagatcgagttgcagacaaaggaaacctgcaaaacaagctgttgtgacagtaaagaaaaggttaaggagacaggtttgctgctttctagtgagaacacaccttacctggagaaaggagtgctgattaaagatgaaggaaactgcaagtctggcagcgagaacatggggacagtgaaacaaagctgccatgagaagggctgcagcgatgaaaaacaaaccggggaaataactcttgcttcggaggaagagacagatgatcaagattgctcctcgggatgttgtgtgaacgagggaacagtgaaacaaagcttcgatgagaagaagcattctgtgttggtggagaaggaaggtttggacatggaaactggtttctgttgtgatgccaagctggtttgttgtggaaacacagaaggtgaagtgaaggagcaatgtcgtctggagataaagaaagaagaacattgcaagtctggttgctgcggcgaggaaatacaaaccggagaaatcactctggtttcagaggaagagacagagagcacgaattgttccacgggttgttgtgtggacaaagaagaagtgacacaaacctgtcatgagaagcctgctagcttggtggtatcaggcttggaagtgaagaaggatgagcattgtgagagctcacacagagccgtcaaggtagagacctgttgcaaagtgaagattccagaggcttgcgcatcaaaatgtagggacagagcgaagcgtcacagtggtaaaagctgttgcaggagttatgcaaaagagttatgcagccaccgccatcatcatcaccaccaccaccaccatcaccatgtgagtgcttgatggagattgattgaataacttaaactcttgatgcatccatctattcacattacgtttagtctcattccgtgaatgccgaaataaaaaacaaaatgttccagcaaaggcagtttattagattaagcaactgtgttattcataaagacaatgctagtgatttttttttagtactttatgtattgcaattcctaaagtattttgaactttgatcttaagagtcttaaaatcaaacaaaccaagcagttgaaacagaccttggatcaaagttagtgttaccaattaccatccataagctgtcctttcgtttcccaagtagctggaggagtagaaaccaaggtaggacatgatctaatgacttaagataatatgatttttcattgatcgatgagataaaagaacactgatcacaccaaaaaacaaagaaagtgagttttataatgaagcagattaaaatatgagatgataaaggattatatacaagatgctaacacaatgcgagttgtgctatatgatgatactaatatggaagtgtgaagaaaactaacaaatcttctaagacctgttttcatttatactctgaactttaaattccctatttcacagcattgctgatcattatcttcttctccttcatgacaacaaaaaataatctggaagagagaagcaaaatccagtacatgtcctgggacaaaaccgtcttgagagtcttcacatcgtgggtattatcaacaagttcgttcaacgtcattttgtgcatatctcagcatttccaatacagcttcaacgtaatttggtgtgcaggcctatgatcggtgcgtctgaagggtacagcttcgatgttattaacccattattaggtgccatgggattataactagatactttagggattgggaaatccaggggaagagagtccatttccataaaacagtttctgcctctcgcgtcagagatcaacgctgcccaatcctcagacttcatcagagcagatgcatttcccatcacctattcaagtaaaaagttgttgaaaaaacccatcaacatataatatcaaacaaaatgtgtgcgagcagagagatagagagaaaccatacccacagagctcttctcgcacgggtaagagcaacattcatccgccggatatctgaaacaaagccaaccccatgacccgaagcacgcacacatgacatgattataacatcacgttcttgaccctgaaacgcgtctactgtattaatataaatctctttcagttcatcttggcccaaagcattgccaaactcgtgcttaaggcatttcagctgcagtttgtacggggttattactcccacagagactttacccgcacccaacgacttcagagttttctgaagatgcatgtacaccccaacacagaatcgagcttcatcaacattctcgtaagatacagatccacctctatgagactcccgcccatggctgatattgaagaaaaggtaaggcctaagaacaggatctttatagtaaatctcatcaggagcgctggatatactttcactgtctttgaggcgtccttggtagaagtaccttgaaggaaaatctcgaatttgaggatgcattctgtattgaacagtcaataacaaagtcggacagcctgctagctgaaacctttcaaagagacttctactatataaaagagttccagcagccttgctaatcactgtcgcaggaagctgctgaggatcaccgacaagtacacatcgcgcagcaccaagagcaaggggaggaagaactccaacctcactagcttgggcagcctcgtcaatgacaaccatatcgaagccatgggtaagacgagaaaacagtttacgaccactgcttgatacagtggtaaaaacaatttcagcctcatttgcaaaacttgcctcaagactcgctcgtgcttcctcaagattaaaattgttaccagcacgaaactttccctccacaataagaaggcgagatatttcaacaagtactttatctctggcttcaaccaccgcagcaaggtgctgtaacaatgcatctcttttctggtctcttgaaataaggacttcaggatcaactccaacagatccctgagaacgtgtagcaaaagctgcagcattaagttcccttttaagtccagctatattttgagaaatctgtgtttcttgtagtctgaggttacgcatgtgtcgtagaatctcgtcgcgggatatagctaatagctgatcacttcttcgctccacagaaactgcttgagcagctcgcgattgagaatcaacaccgactcgagcaacatcgggacgatataccctcatctccccatcaataaaaccacggtcgaggacacgtgaaagaagttcatcagttgcagcattcgaaggagcacaaacaagcatccttggtttagcacagagtttgggcagggtgcggaagagattgtggtccatgttttgtaggacttcatcaatagagcctgacaaaatattatctgaactgctgcactcattagcttgattataggtttcaggtgctaatttcttcagcaacgaagtgtaatattgttgatactgaaccaaatggataacattcaacattccccaaacagtgtgtgtcttgcctgttcctggcggaccctgaacaagagtgaatggccatggttcttgcttcttcaccccactactagtaccagctgcagtatgcatggccgcccagtggattgcagccagctgcggagcattaaagcttctatgtaaatggtcaacaaagctagtagtgaaacaatcaggcgttgcaggggtttgctcctcgtaactaggaaactgctccggactggggttgagaatggcattttgcatctaaaaaagacattaagtttcaccaacatcagcatattttaaagcacctataggagatctgtaggagaataaacaaaaaccaacctgtgggttaagtcgagaaaacgcatgaagtgcaacatattccctctgtgtggttgcaagtgaaccaagcactgttagatgccagatatcctgaggtttaagcttccgtaaaatatgactatcatcaatcttgctgccaaaataaatgttccatgcaaatacatggagaagagatgagagactataaatatttgctttcaatttctgatagtttgtgaaaaatagaagaaaggataaaaactcagacagagtatcaacagataaagaatgaacatacaatatatgaacctacctgccagtgccaccagaatttccaacatagaaatgtagagtagctccacgagggtcacgggtatcaactggtatatgtctcctaactgtaccagcgacacgtccagcatcctcatggtcttcatcttagcataaagaagagaaaaattatacaaaatgcacagaagctagcaatatagaaacaaccagacatcaatgatctccaaacgcacctgattcaggcagtggagttgaaagaactgcaacatctccctccttgaaagcccatttacagccatttaaggagttaagtattacatcataccatcctaaatacataaacaaagactagcagtcaagtaacttaacagaaacttggaagtgtttctcagacggccagacataaaaaggtatcaaataaggttgtcaatccaaagagatataagaaaccagtctccacaactcaaacctaatagagaacataatgacaagcaaaacgaggaccctaatcaagagacctggtaaactgcttaagttataagatcgtgaatcaagggcaaaatcattttcctagataaactgtgagtttacaagaaaactttcagaaacaaggagaagaaacaaagtccaataaactgtttaacaatgcacaaagtgtctatgcatgcttacacatgtgaacaagatctagggccagttacctctctctcttctttcgatggattttattcgaactttcacatatgtattagcctcagccagttcaacccatgtactgtaaagttgtgcccggcattcctcaaaaagtaagggttcaaaaactctgacatattcctccatagattcaaaccgctcaggtacacttcggagttcggtatcctctgatagacaagaaaatttataccacttgtaaatcaaacaaaatgggcgaaagaatacacaatgagctaaaaaggaagaaaatatttgtttggaaaaaatcagccatcatcttccatgcatgccaaatatcctactctataaagcctaaagaaggacggaaaacataaaaatcaaaaagtgaacgaatactcgatattcacttttctccgatataccattcagcttttagatattgcatcgtctaggctgaggagatttttaaccccaatatagtttggaccagagtgtcagcctgataaataattactaccaggaaccagttctagttgcaaagctagactttatgttcaatgccttaagaggttagcaacaataacaatggtggaaatagatagggacatatatgccacaacataatgaaatttctattaaaatctatctgagatctttaagcaaggaacaaaacaagaacaagtcgatcaccaaagtcactagaattctccaatctactttaacagtacgatatattcgttgcagcttacatgtcttttgactatatgattctccagagtcatgactttagaagcagtaaattttactcacataaaagtttctaccgtaaattaagattcaattccttctagaaaaataaggcatattcaagaagatgttccataggtagtaatgtaataattatcataccaggatgacgccagaacttttcgttggtcacctctcgaataagacgttccacagatgtatcctgatattgggtactacttgtggctggcttcttgaaagatctttggctgtaagatacttttctactagatgaatgaccgctcttgggctgccgtatattagccggctgcttccaagaagcctgccttgatacagatgttcccatcccttcagcagaaggttcttcatccctgttgagcctcctaggtttaccaagtaaacctgaatatgattccccattactttcggtcttctgttcagcagattctgaatgtataccgccagtagaaggaaaatcaactgattttagattttgatggctttggctttggctttctcctccatgctcagcaggtggattaactgcactggagcgtgtagggacagcctgtgcaaagttctgtctcctaggtgtagatgtattaacagtacctgcttgcttaacatcttccaaattaagaaacctagtctgcctatttcgtttctttcccaacattgcctctttatgttgatccatctttctcttcactgtagtattagcacatttaactgcataacttgcttcaactcctttaacttctctctgcttcaccatcaaacctggttcttgtagctcatctctaacactgccttcaccaccagtttctatcattcccttgtagtcagaaagatcttgtgtattctccttggcactagcatcagaatccatcacttcaccttcttatctgtcataatctccacaagtattagcgtttgcagatacaataacattctttggttgattcaaattaacatttatcatttccatcagcatctatagaaacttcactaagatcaagtaacaataaaagaatcaaatgacgtatctcctctgaactacagaagtttctgcagagaaagcttaaacctcaaaatcgaaactaagcatagtgatcaaaacattgattcagcgaccatgaatatagaacagatgattataaatggcgcaaacacgcatttgttattcaagcaaagttcaagatcgagcaaacgaaccggtaacagagtcggcgaacggcggcggcgagttttagttagggtctaaaaagaatgtgttacgtgagcacaatcgtaatctcactctactccggcaaagtttgtactgtgccgagtacgaaattacagttctaagatacgaattcgtcttccgatgacgccggcgacggggaccggagattttattaaaacttaaaactattcttcgatatcggaggggagaggaatctggtggcttagagactatgcgactttgtaagagattgaacttggaccgttggattaaggcttacgttagataatctgacggtatttaaaacatgtttgcttgtttagcttatgatccgatgtgtaagagcaaatttgtttagcttatgataaaccctttgatgcttatatagggggagaaagagagagaaagagcaaaaaaaatcgtatttgttttaaagttctttttgtaatacttctttttaaaaattgtatgtgatgtttaaagttttcacacaccaatcacgaattattattattattatttttaattatagtactattaattatctacttaaacaagatttaaccagtatgaaaacaatctgtagaatataaattgttaaaataattaaaaaaatatatttaattttgcattaaaaattgaaaacctcatctattttaaaacaaaaaaaaattccaaaaacattaaaaaaatacataaaaaaaagcaaaaaaaaaaaagcagagggtgtattttaggttagcaaaaggttttagaagatcatttacggcgaatcaaaagatatgacaacatattattgtgggataaaaaaaattattgtgggctaaaagatttgaagtacacgaatttcatttatgtcaaaacggtgttgtaacgtagaacgtagttgttcattctttagctatcaaaattcaaaagatattgagatcgaaaagacgaaaacatacgtataatatattagggatatattattgtagattacctaaaagatttaaggaagcgaattttcactcatctcaaaacgattttgtaacgtggttgtcattctttagctaaacatgatcttttaaatacatttttttttcttttattgttgtattgattccaccattttgattaaagtttttatcttgactaaaaacatttctataagaattcaagaggtgttttaaaaataaagtatatcttgacccacaaataaaaacaagaatttgggtacacattattttccaatttgtataatcatcatatgtccgaccatattaactagtcaagacgttagacttcattcataatacgaattgggtgctagtttggttaaatgcattttatgactacgcattttattcacacaacacaacagaacacaacgtgaaatatacgagaaagacaaatcacaaatctaataatatttgagtttttgacgaggtcaagaaaagtattttaggtccgtcccatcataattattgtaacttgtttgacttttctccaataaacaaaccaacccaaacatacgacatatctcctctctttgataatcgccattaacaaaccaaacctcacggagtcttctcctttttaaaagaagagtctctcttcataatcatatgatctctctctctttccagtttcctctaagcttttctcatggtttcgttcttgaccctcacttccttctttttcatctgcttcttcatccatggctcttccgccgtcgacacaatctccggcgactttactctctccggcgaccagactattgtctcctccgacggaacttacgaaatgggtttctttaaaccaggttcttcttcaaacttctacataggtatgtggtataagcaactctctcaaaccatactatgggtagccaatcgagacaaagcagtttccgacaaaaactcatcagttttcaaaatctccaacggaaacttaatcctactcgacggtaattaccagactccggtttggtccaccggtctcaactccacttcctctgtttctgctcttgaagcggttttgcaagacgacggcaatcttgttctcagaaccggcggctctagcttatcagctaacgtattgtggcaaagctttgatcacccgggagacacgtggcttcccggagtgaagatccggttagataaacgaaccggaaagagccagcgactcacttcgtggaagagtctcgaagatccatcaccaggtttgttctctctcgagctagacgaatccacagcttacaaaattctctggaacggatctaatgagtactggtcaagtggtccttggaaccctcagagcaggatctttgattcggttcccgagatgagactcaattacatctacaacttcagctttttctctaacaccacagactcatacttcacgtactctatctataaccagttgaacgtgtcacgcttcgtcatggacgtgtctggacagatcaaacagttcacttggttagaaggaaacaaggcatggaacttgttctggtctcaacctcgacaacaatgtcaggtctataggtattgtggctcctttggaatttgcagtgacaagtctgagcctttttgccgttgcccacaagggtttaggcctatgtcgcagaaagactgggacttgaaggattactctgcaggctgcgttagaaagactgaactacaatgctctcgtggagacattaaccagttttttcgtcttccgaacatgaaactagctgataattcagaggtattgacaagaactagtcttagtatttgtgcctctgcttgccaaggagattgttcttgtaaggcttatgcatatgatgaaggctcgagcaaatgcttggtttggtctaaagatgtcttgaatctacagcaacttgaagatgaaaacagtgaggggaacatattttatcttagactcgctgcttctgacgttcctaatgttggtgcttcgggtaagagtaacaataaaggtttgatatttggggcggttctaggctcgttaggagtaatagtccttgttctgttggtggtaatcttgatcttaaggtacaggaggaggaagagaatgagaggagagaagggtgatggtacattgagtgcgtttagctatagagaattacagaatgcgacaaagaatttctcggataagttaggaggaggaggttttggttcagtgttcaaaggtgctttaccggattctagtgatatagcggtgaagaggcttgagggtattagccaaggggagaagcagtttaggacggaagtagtgacgataggaacgatccaacacgttaatctagtgaggcttcgcgggttttgctccgaaggaagcaagaaattgttggtttatgattacatgcctaatggttctttggattctcatcttttcttaaaccaagttgaagaaaagatcgtcctcgggtggaaactgcggttccaaatcgcgttagggacagctagaggattagcttatctacacgatgaatgtagagactgtatcattcactgcgatataaaacccgaaaacattttgttagattcacagttttgtcccaaagttgctgatttcggtttggccaagctcgtgggtcgagattttagtagggttttgacgacaatgagaggcacaagagggtatcttgcaccggaatggatatcgggagttgcgataacagcgaaagccgatgtttacagctacgggatgatgttatttgagcttgtttccgggaggagaaacacagagcaatcagagaacgagaaagtcagattctttccaagttgggccgcgaccatactcaccaaagatggagacattcgctcactggttgaccctagactagagggagatgcagtggacatagaggaggtcacgagagcttgtaaagtggcgtgttggtgcatacaagacgaagagagtcataggccagcgatgagtcaagttgttcagattcttgaaggtgtcttggaagtgaatccaccgccttttccaagatcaattcaagctttagtcgtttccgatgaagacgtggtcttctttactgagtcgtcatcttcgtcaagccataattcttcacagaatcacaagcattcttcttcttcttcttcttccaagaaaatgaccaacgataactcttctgcttagttaataatgtaaactcatgtttatcaatgtgtaattttaatagtgaatgagtagtaacatagcaagaaaatcactgaatgttcttctattgtatcattatttatttcttacaagaacgctacgaatttgtgtaaatttatatatgttacaagaatgttaccaatttgtgtaaagtttgatctttttaaacctcatcatttcggttccaaaacacattagctctaactgaaattttcttctattgtataattatttatctggcacaagtatatattacaaggttgttaccaatatatattaaataaaagtcaaatttataagcttctaaggccgtccactttatatatatatatatgtacacacaaattaaagacatgctaactttgttattgtactatctaaaatgtcctaaagtataaagagtagatatctaaaaaaaactcctaagatataagaaaaatctctacgccaaaaaatattatttttgcctttttgaattatcaaaattacttttatgtatatttgttagattcgattttattcctttaaaatgaatggcaaattatctgtttacttaattagatacattttataaagataaatattggtgaaaaaagcaaatcctagaacctttcaccgcctctatggttcctataaaaataccttgattggatattaattcagctgaagtcgatctatgttgcttcaaattagcttgatagttccattaaagataattcatgatgtttacgttcgagtgcatatattggatgtgttgaagtcaaaacgtgaatgattgcatgaaaatttgggaaatgttaaaaccgacatacatcgtcacggatcaaagatttaaatcccttctgtagagaaggtaagctcgcatttatatatctgagatatattcttacatttttggtgtgttttttcatttttagatacaaagatattttttgaattttagttttaagcgactaaattaaacggttgaataagcgatgggcacttaatcttctatttttatttgtcattaacctgttttggttattaaattatatattttgttaggattttgatttttttttttgactgcatatcattggctagctagagagatagttaaattccattgcatcttcgacatccgtaagctattgtcgactaacattatgtttcttttttcgttgtttgctttgtattaaataattgtcagtgtttcaaatgttttgtaacaagcttatcatttgtattaaagatgttgactatgaatatatttatttaaaatatttgttgtgcgcactacaaaaaggttagtgcgattttttatcgtgtaatatctcatttagcttataatgtttgaaagttgtttgtaagatggatatatagaaagtggagtcactactttgatatgcttgcaaatcataatatctgttataggtacaccaatgtaaaagcagacatgttgatggttagagctaaactttaatgattttctgtttttattttaagtagagtgagcaaagaaaatctatattttgaagttgtttgaataatagaaaacatattatcactcattctcaactaaaagagttaactatatatagcccatctcatcaaaatatcgtgtggaatatcttacttgttggcaaaaggaaatactgattcaaagaataccacatgtcgtgatatataccgtagtgtttgtttccaaatccagaagcttatatcctttgtagtctacatggtaaccaaggaagacacaagctcgtgctcaaggttcaaatttatctcgttgttgggtgcttgtcgattgataacataaacctatgttgcattgaactttccgaggtctgtttctgtttcggaaacattttagaaacgaaaattcttgaaaactcggtaaaacgtcacgaaaactcgttttttaagaatctaggtttagaaacacgatgaaaattcaaatatccccattcgaaactcgacaaaattctttttattgactttagaaacttaatagataaaagtttgaaaatattaaaatttataatatatataactcattttggaagactctgagtttttaagatgtctctctcgacaaaccagatttggaggtatttttatgatatttgatgaaactaatgaaaatattgatctaaatatttgaacatgagccttttaatctttatcttttagaattttagttaatctatttaatattgatgttttggatttgtattgtttaaactatttatataactacaagacacaaaatttacatgatcactaagagaaactgtaactcttaaaattagttttcgattatagtggaggtatataacagataatacaaatttgctattctgctaaaccattattgactgttaatacgtgtttcctataaatcatatgtaactatgtcctatcaaaaaaaaaaaaaactaatatcagcatatttcttacctgtttttataaattttacatgaatgtgaacaatttggttgtattttaccattagatcacactgtgtaaatcaaaatatgaaacgataatataatatttcatttctatatattttacttttgattgcttttatttttcgttgggtagctaatatagttaattaagtaacatcaaacaattacaatagcattgtcttacatatttttaaataatgttacatatgtttggatctatttagtgttgtgttttaattggattgcatcacataatatatttattctatctttatttcattttatttttatttttagtatgcaaagatatataataaaaatatttttatgagaaaataagtttaacaaaaaatgaaaaataattactcttttctatatagtattctttagtaattatagtctaaaaatttccctctatttcatgaacttcttcaacatcttctccttctttctcctccttgcctagccgaaaaaaaacaaatggagatacacaatcacatataattagtaggtacttacggatttgatcattctgccgagaataattatgtatctcaataaactttaattaccactagagaaaacttcacatgtctttaccaaatatttatttagctagcatatccctagacatataaacataattgttgcgaaattgggaatttgaaattttcaaagaagatacaaatacaatatacaaatttaagttattatagagcttagatgtttactgagcttacgaggaacacatccaaattctagaaagatggatagatgtacaattaaaatatgcaaaaaaaaaaaacagaatttgtatatgaagctgagcattagagagactcgaggttgccaattacttcttctcaagccatgtttgttatatagttgcatttttaagccattttcagttatatattcagtcataaactgtactttaatgtgttgataaaaataaaccactccaaatgtcactctcaccctattagaaaacttgtcatcttatcatttacaaaactaatataaagtttgataataaataaaaaaattctgtttcaaaataaaatatatttaaggttaaagcacgcacatatttagataatatttttaacaagttatctagatatttttttaaaaaaaatcaaccaatcatgcataatataaattggcacaagttattaaatacatcaaaatttgcatagatacttgcaaaacttcatttagtaatacaatatgttagcttgatttgagattagttaaaaacagtttcacgtaaaccaatccatacattataaagttactagataagacccgactaaataagcgggatgtaagatataaatttttaaaaactattcatcaaaattatttaaaatttaaaatgtaaattagtaattcacacatttttctaatattaatttcttaatttttgtattaaataaaatttcaatcatacacatttaattttattgtacaattttaactatctatttcgtcataataaacaatcttgttattctatacactccatcttttttttttggtaataagaaacaaaagctgcctataatttattcataacataagaactacatttggacactaaatggaaactatatctcatgtgtatcctgagacttacaacttttggacaaacatcaaataaatgcaaaccaaacactaactaaagcgcatagtttgcaaattcattcactatgcgattagctttcctatacacattagtaacccggactatctagtctatatacattccattttattgatgatattgaatccctacaagttgtaactcgctgcaaaaaagtccttctaagagcagcgtaaatccttcttttcactgcacttcatatcacaagcttttgttccattgacgatgcttatgctttacaagcgcagctatcccagctatatgtggtgcagccatgctagttcctgatattaacgcaaatccttcacctgctcaagatccccaagtaagaaactttagttctgatacaaattccacatgttagcttgagtactttgaatgcttaccaaacataactgggctctctgttccgtttggacaccaagcaaccagagttagataaacaagttcaagacgatcatcatcttcaaagtttggccctggaaaccagatgaactatacatgataacaaatgaatccagcagaacatcatttgcatagaccaataccggcacaatgagaaaggtcctaaatcatctaacctcatacactcgtcagagagaagagctaaagacatagaccaagaaggaccaagcttttcacagacaacacaagaatcatctctaaggacaggtcaagaacattaaactgaaaagaaataaagtaacaaggaggacacttgaacttgtcaggaagcaacagagataagcaagagcataagaagatccaaccaacttgaagaaaagagcttgaatacaaagatattctatagttctggtacttactacatagaagtttttggctcacacacattattcaagtagagaaagaaaaagctagaaacagtaacagaagaagagcgcttccttctttcaaaaatcactacttattgcttggctcattgcttggcttatccttgctcttccagaacttaaaccagttgtggatggacaaaaggggatcaagatataatctaaacgcttagagacctaaaattcaaagagagaaactaaacctgaaccaagaggttgttttttcagaggttttgaccacaactgcctgtttcagtgcttggatctcttgcaacatgtgtgcttgtttcaaatcattatcacgtttcagtgcttggatctcttgcaacatgtgtgcttcttttaaatcattctcacgtttcaccatgtccacgtgggttttcagaccatctaaatcgttcttatgggcagctaggatctgcgattggtgtttgttggatgggaacatagtcagaaaccatagtcctaatccgtagtacagaccaccaacgaaaaacgaagcggtgttgttggagatagcgccatggcatctttcgcatcataagtcttgcggtgggagaacccgcagtgcattttaaacaacaaacttctcattaaacccgctttcaccttctgtgatgaagtcgcagcatgttgcactgcttttgcaaatggtttagacttggaactcaagaaagacaaacccttgattgtagcttccgaagcaatggcgaccagttgtttccggagagcctcaccgggatgatcggatacactctcccggttaggtttgatcaatttcgcaaatttctcaaattcttttgatgaatgattgggtcaacgttttgtttttggctgtgctaagcgacaaggagtaaaagacggtgatccctgattcaataatccaatccacacaaaatcaagattttcccctttttttaagcaaaaatatacaattccaaatccaaacaatatcaaatacccaacaatattcaattgtataatatataaataaagcaacttaactatcagagatgtcttggtctctaccaccaccaacattctccaccgaatctatacgcactattcattgttttcgttttttcggattttttattattatttaatttaaataatttttatttatctaatcgttaactcatgcaataagaaattatttttagtataaaaactttttttttctaacaacattctcaatatttcatcatacacataattcataaacaacgttcatcttaaaccgatttaacagagggtagtgttcaattctagcatcctaagtatttgatgatgaagctccgtacgtattctgcaccctcggtgatttaatatataaatattagtttaagagaataacatactcaaatcattaactaatacacaattattatatactcatactttgagtttggattacaaaaaaaatcttcgagtatgaaaaaactattaaaattgttttattgaaaaatcatgtaatattataataaatttagtaatagtacattaaatgtataaaataaaataatatataaattcaaataataaatatattattaacctataaattagaagttgaagagcttacattaattatttaatagacacatgacaaatgttaaagcgatgatgtgacaatcatatggagagagttgaccaactttcatatatatgatttcattctctacctaaccatgactattaccaaaatctaatgtatttcttacctttctgattattgcctttgatccccaaactttcatcatctttggattcttagggttcttctctccttaactcttctcttcttttttttccccaaaaatgtctactccatttaactacaccaacacttttgagaaggaaataagctaaccagagtaaggttaggacttactagtgagtagactaactaaatataaagaaaatggttgaccaatcgggctgttacacaaaaaaaacgaaaataacaaagaaaccatgttattttgcgcattctttttattcaaaaaacacatagtaaaatatgtgatgaaatggaaattgaataagggggtgttatagagtgttgggcatatagtgggaaactaataattgggaaagttttgtaaacacactatatctgtataaataagctgagtttttataatataagaaattatatactttctttagatttagggattagaatttaagataacagcttgtatgatttagtttttggatctttaaaaccaagctgttactaattttttttaacaaatctttgtttcaattttttttgttgctccaccttctttctaaaatattttacacatattttaaaaggactctattttaaatgacttttcacataaaacagatattaagcattttaaaagctacattggtacgttttatgtggattatggaaggttaggcattttagatattttttatatgataaactacaacatatctttttttgtcatcatactacaacatatcggaaacatagatactgacaaaaaaaataaactaattggtgtcggtatttactaaacctaaatagagttttaatgtggtacaatactacaatttgttataagtcaaaagctaagatcaagccaataggctgctataagccaatctgcctccctatccgtcataggctgctctcttggggtctaatcaactctgcagagtgttgcctttgttcttttgacaccgaaactagagaccattttctgcttctttgtgatttttcttctcaggtttggcggatggtttttctcaagttgtacctctgtcagccgttgttctgcacttgggcggagcttttctcgtggacaagacaatcttctccaacggttccttctctccttaggaaagtggtcgctcatcttgtggtgtacaacctctggaggaagaggaataatgtcctccacaactctcatcgggtctctttctctgttgtctttcgtttgattgatggtgagctgcgcaacgtcatttcttcgaggaggcacatgaagcgttggcgagagcttacggtgttttggatccgttagcttttcctaaatattttcaaactctattgtaaccttgtttttatttctttttgtcttggttactttgctttggtattctctttgtattacctctactcattttatatgatatttacaagtttagcaaaaaaaaaaaaaaggatcaagccaatcagacagtcaaattataatagaaaaatggtaagaaaaaacaaagtagcacgaatcttactctctggccaactaattcaaagtttcaaacaagataataatcgatactttcaacttaatttataaacacctaatgcgttatcactaactagtatataataaactaaatttctagtacacaaaatatagacatgtagtacatcgatttaacaaattaggattttactatacgaccatgattttttttagaaaatacatataaggattataccacatattagttttttaatttgtatggttgttttgcattttttagagatgggggtaaatttgaaaaattaacgagttgatttttttgtttttttgggacagagaatcctagtaaaaacccaaaattccaatgtggtacaattagttaaaagtcttaacctaatatctacccaatcatacagtcaaattacaacagaaaaaatggtaaggtaacaaagtagcattgaatcttccctctctgactaactaattcaaagtttcaacttagataagaatgaatctatttaacttaatataaaaccacatatgcatcaaagtatcataaaatctaaaaacaaatctacacaaatatatttgataaaaatgaagggggtgacgattcacaatttttgttactcttacttcaaggtgtgtctacttgtgatgtcattggcatacggatccgccgaatgggatggaagctccagccaaatagctaaaactatcatcgtcaatccaaacgatgctagatatttcaaaactgtccaaagtgcaatcgactctatccctctgcaaaaccaagattggatccgtatcctcataagtaacggtatttacaggtaatgtataatgttacttctttctcaatacttcatatgatttatcttgtcacatttttcttacaaatagattctgtttaattaacaagattttaaaatggtatgaattgtcaataatttaaaatgtagtgagaaagtaacaatacctaggggcaaaggatacatatacatgcaaggcggaggaattgaaaagacgataatagcttacggtgatcatcaactcaccaatactagcgccactttcacgtcctatcctagcaatatcatcattactggaatcaccttcaaagtacgtctttttatctatatatcaactgcattagagtaccatgtattggaaataaagttagatcgtcaaacatactattgaaaaacataaaccaattcattcattttcaattgatttgatttggaaatgcctaaaaatccgatttcatgtagctatttttattagcagtccgtttataatagtttatgatgaatatgcatatatatttaaaagttgagaaattcctaaaaatagcacgaaaacaagttttatggacaataatagcatatacttcataaacttccaaacatagcactacttgacttatgaagttttaattttgttctaaaagtattaacactaattatttttttcaataataccacaattttaatataaatctattcaaccaaaataaattagaaataaatttaaaatattatatttgggttcttcatttccaatttagggtatatatttcaaccatttaaaagaaatttcgattcattttaatattagtttatggtattatatttgggttctctattttccagtttagggtatatatttgtaccatttaaaagagatttttattttaatattactttgtggtattatatttgagttctttattttcaatttagggtatatatttttataatttaatatttatattagtgtttgctctcatttttcttttctatcttatatttaatttaagtttaattgaaatttatagtgttatttgttaaattttagaaatgttgtgttaattttggaagaatttttttgtttggtgctatttttgtcaattgttcttaaaaaaaagtttgattaatggattttcattttgtctagaataaatataatattgcatcgagtagctcaccaaccaaaccagcggtggctgcgatgatgcttggagataaatatgcaataatcgattcaagttttgatggttttcaagatacgctttacgacgattacggcagacactactacaaacgatgtgttatctccggtggcatagatttcatttttggcggtgcccaatccatttttgaggtaaacctagatatatatattatcaaaatctactgttaacatttctcgtaagagtagtatatctaaagatatgttaatcaaaagtaaatttagttgaagaaactttataaaaagagtgaaaagagtaaacatttttggtattgatcacgaaagcactaaggaaaaaataagatagtccttttattagtactttaccctatttcctataaagataaatttgttgatactctgagtaatggtgaatgtaacaaaaagggatgtacgttgaaactaagggttggaatctacccaccgaatgaagtgtatggaacgataacggcacaaggaagggactcgccgacggataagggagggttcgtgtttaaggactgcactgttatgggaagcggcaaggcgttactgggacgagcgtggaaatcttattcacgtgttatcttttaccgttctatgtttagcgacaatattttgccaattggttgggatgcttggaaagcaaaaggccaagagtaaataatctctttacctttttattacattttcatatgataaatatttcattaaagttatatctgtttcttaataaaaagaaaggaaaacgatattattttagggggcatataacgtttgtggagtttggttgcactggagttggagcagacacgtcaaagagagtgccatggctcacgaaggcaagtgaaaaagacgttcttcagtttacgaatcttacctttattgacgaagaaggttggctcagtaggcttcccatcaaattttagaggtgttaatacagattagtccgttcgtataagctcgttctgtgtcttcgataaattaaaaacctgtaagcagtgaatatcaatatacaataaaatacatcaacgatttatctgtttagtaaaagttcaataagtcataactatttatctgttatttcaactattacctttaaaaatgcacaagtttcaactcttaggagttaggacaatacatttttttaaaaataaaatctttagattttagagggcaagatctgagaaaacaaaacattgaatgtagggtttaagatttgagattcacaagagaaaaaaaaaagattttgatgatttggtttttctgtttatgttttaagatttgagatttttagtctctttgaagtttatattttagtttttgctttgaaatttttaaaaagatgatattactttagtataaagaaataaagcaacaattgccaaaaaggtaataaatgttgtcaatgattaggtttgaggaataattgtttatcttattcatgtatttcacaatatacagcatatatatagggatacaatcttaagggtttagcttagagattatgtattctagaatctactaatgaagcatataatgggcatccatataacaataggattattcataacaataaagcgatactttttatttatctatttggctacatctttggtaaatcattgggaaaaaaacttaaagctgaatagttcaaaaatcttttagaatcttcgtaaaattacgctttaaaaacttcgaatatacgatggaatctgaaaacatgagagcaacacactaaagaagtgggatcaaagtactttaggaagtaactaatggtgtgtgtattagttaattatttgtgtatggacagacttgacttatacgttcgacttttttttttttttgtatcaatagtttatttggtacaaaaatattgtgtttatatatataatataagattaaaattttggataatatcataattccaatattcgtgggagttagtctatagatgggtggtgaataaatgggtggcacgatctttaatctttactttgttcatgctttaagtaaagaaatgtaattcgacagcaaagtagatcaaatattttctaggtaactttattaaaaaatagtaaaatcaattaacttacatataaaaacacatcttatctatgatgatcattcatattatctatcatatatggataatctagtttttaattcacagaactatgacaaatggtcataaaaacttcttaaatatttgaatctatacgtactgcaattatttgattttcaaatttgaatctagactaaaatattaaactagaaacgattttaccaattcaaataaacacataaaaataagtagagaggtcaatgtccacttgtttgagaaaatgggataaaaatcattagagcctgtaaacaactcacacaaatcttttaatattacaacctggtttagactttttagttataataaaaatttcgtatattgttccctttaattaattagccgtaatcaatataatagtttcgctaaaaaaaaaaatcaagagtccagagagactttagactttttttttttttttttttttcttcgccatagagactttagactttcgtacattttagaaaaagaaaaaaagacttttgtaatgtatttgtaattttttcacaaaacttatatgtttagaatttgatcacgacgatatgaacgttagctggaatgaaaataaaataaaactaaagaacaatctaacatgctttcctttgacgggtcaccaaattgaccagccaacatatagatgtgaacttacatggttcatggatgaccataaaatgccaaaaaccacactcaatttttaccgatgtcaatgcgaaccgaatttaatattaacccaaacgaaatgattttgtaccggtgaaatcaaaccgtatataaatgatgtatacaacaacactaatcatttaacattaagaatatatatatcgttagttgaatatatattaaaaaatagcattctgtatacatactaaacatatatcatagtaataattaaactttattttatttgatcaaaccgaaccgcacctgaatcagattcgaactgaaccaaaccgaattgaacctcttttccaaaagtcgaaaaaatcaaaccggattgaacagaactggggaaaaaagaatgtccataccgagacatgattttaggctacatgatttctaaaatacaattacgagtagccaattaaaatattacacgtttaattaatcagataataattcttattaatcacctcaaaaatatttacttcctgtttttgaaccgaagagacttcttcttctccattcttgcttcttcttcctcgtcttcgtcgtcttctgtgtacagacatacctccattttatagagagcgagaaacagagagatcagaagaagaagaggaggacaaaattatagaaggaaacgtttcaatgcgtgcatagaaatcgattctcatatactctgagagattcatatagaagtttctgttagttcgtagctctaagttcttcgttcgttgagagcttggaaaattgtcgcggagtctgtttttgttctcctagatctttgggtggaaacaaacaagctcgcgaagacgagaactctcgccgtatttgggatctggttccgtttagaagattttccaggttcaattttgctcggcgttttgattatttcttcgttggtagtgtttttaagtttttcgattttggattttgtgcggacgatgaataggctttagaatggatccgatttggtttaggatttggagaagctctaattagatttcgtttgatttgatctcgttcctgattctgataacttctggggttgggaagcattcgtgtaatttgttgactgaggcaatgcccgtggttgtgtgtattagaagctgtggtgatgatttgacttttcttggtttggatagagttagaggatttggtttttgtactagtttgaaatggtctcattgaaattgtcaaattaattttcctgtagatgtttgattttttctcttgggatcatcataacaagtttcttcagctacaattggtgaaattgtgttgttctcttcaggaaaaagaaacaaaactttgaaaattaccatcttcaagaatctaagttgtctatttatgcttcacacttttggtgtgacattcttttttttaaatctttatctggtgtagttttcagatttgtatcctatgctcctctatggtttacttatgttctgctctgtattgatatctgatattcaagtatgggtttttgtatgtaaattttaggtttcgactggttctagctgctaagtggaatcgactcattttagctgaagaaacttgttgggagtgggttaaagggatatttgaggctgagttgttgcagtatgcgataaaggtttttatgagatgaaggcaattaagggatggcgtctaggcaaaattaattatatgcagtctttgcctggggctcgccatcgtgctcctacaaggaagcctatatggatcattgcagtgctttcactgatagcaatgtttgtaattggtgcttacatgttccctcatcacagcaaagcggcatgttatatgttttcatctaaagggtgcaaggggctaactgattggcttccaccatcactgagggaatattcggatgacgagattgcagctcgtgtagttattagtgaaattttgagctcccctcgtgttataaaaaagagttctaaaattgcatttatgttcttaactcctggtacattgccttttgaaaagctatgggacctctttttccaggtatacttcatctcttcccagcttcttttccccgcatcaattgtgttagaggtttccttcttgctaataagatacgaatgataggaagttcagtgaactctttctaagtttaggctggccttttatattgacaactcttcaaaattgtaaactttttctgtaaaatcgtttaacaacttggatgcagcaagtgccatatgaacacttgcaatatgtttagcaactctgcgtttatttcattatttctttgacttatttctctcactgactgttttcggcttttacccctccgcacagggtcatgaggggaaattctctgtttatatacatgcatcaaaggatactccggttcacaccagtcgttactttcttaaccgtgagattcgaagtgacgaggtatgtctccttttctatgtctgatgtctatatttgtagatatcatgtcatccctctcttcggtcatgaaaaaactattggtttggaatgactacatctagttggttgatgtatcataaatttctcttgcttctgttatagttttcatgattggggtaaaagaatcatatatttttctgtaggtggtctggggtagaatatcaatgattgacgctgaaagacgtttgttgaccaatgctcttagagatcctgaaaatcagcaatttgtattactctctgataggtaatctcccagaaactttatttctcttctcactgattattctgaggtttccctaaccaacttgagtgtttctggttttgcagttgtgtgccacttcgaagttttgaatacatgtacaactatatgatgcacagcaatgtcagctatgttgactggtaaagtatttcttcaagttgatgagatttcagaactataattacacatgttgccagatttcttcttgacttctctatacttaactatgatagtgttttattcttcagctttgatgatcctggtccacatggaacgggcaggcatatggaccacatgttgccggaaattccaagggaagattttcgaaagggtgcacaggtatgtccagtattaatcttgcttcatactctgaaaacatatatgcgagatcactaaaatacaaaggctcagatataagaaatcaattatgtttcattgttggaaccatttgatacgacaaaaggcttttaagtagaactctttgtggaatgtggactagttatagcaacagcatatgtatgattgtatgcaccatattacatccgcatttaggaaatggaattttttcttttgaagcttagattgttccttgctagtgatgaattggtcgattcgtcgttgttgggaagcattttgatcaagtttggctacatttactggagtttgagaggtttttcgataagttttcatcgcttagtcaattacttaatatctatgcagtggttctctatgaagcgtcagcatgctgtagtaactgtggcagataatctttactactctaaattccgggactactgtggggtgagtatgacctaaccctcaaaatagatgtttcttacctttttatcttctcgattctatggaggcgttcctatctatatatatggaactaaccacatattaatagcaaggcctttttttcagccaggtgtagagggcaacaagaactgcattgcggatgaacactatctgccaacattcttctatgtgagaattcattttgattctaaagagaaagaaaatgtttgattttttagtactttctttatccataatatacttatggtctgataaatttcgcagatgcttgatcctactggcattgctaactggactgtgacatatgttgattggtctgagagaaagtggcatccaagaaaatacatgcctgaagatatcacgctcgagttaattaagaacatctcggtatcatcaccacaccgctatgatctcttaaaatcttccttgactattaccatgcttggttccaatgagataactaatcagtatgccttttgatccatttacagtccattgacgcagtttcacgcgtaacaagtgagaaaaacgtacacacttttaaacccaagtcttctccacttgtaattagttgcaaagtttccgattttttttttcctttagcgagatgcttatctgccgctttttttaatgcctgcaaatgtagggagtagtatcctggacgcattgcatgtggaatggaatcaaaagaccttgctatctctttggaaggaaatttcatgctgatactctcgataaactgatggaactcttcccaaactacacaagcatcgtgtagggctttcgagcaattttgattgattgatgaaatgcaatgccaaggaggtattcttttgactcggattctttggccaacgttcagttatacccatgaatcaaactaaaacttttaggcaatatcatggaacccctagaagctgtatctcactgtaaagtccttttacgagcagagaaaatccgaaatcgtgtgatctttgagaaagcttaggaagtatttggggttttgtcattttggttggggacgttgggacatttttaactcatctgttgtcactacatctcattgttatttatagaattttcagagtgcttttttgtttttctctctttttgttggagcactttgttgaatatgaaatgaaaacaagatatgaggcttatacagtttaaaaaaagctgggcattttgatcataattttggagttttatatcaataactaattatacaaactgctatgaagcattttcctctttttagcagacacagttctctagaactaccctcttattactgcatattacaaaaaaattatattacaacacccacacgatttgttcatcgccgatgtcctagagccaccaccggaatcctgaccttatgccctcggctaccttttaactttacctccccgaagctgtatactccagaaaccgatctcacggtcatagtgactgagaaggttctagtagcgcctggtctgagtgtcatcgctggtgggttcacttcgatggcaatagacggctgcatccttgctgttattgtgtatgtttcttctacctctgctacattagtaactttccttgttactgtctgggtccccactagatgagaaactgctatagatggtgcattaaagtttgaaggatgtttcatgtcgtagttacaggccgtgtttgtgtaatttcttatctcgtgggcgctgatccctggggttgtgcataagaatcctagatagtcctcataacctacaagagaagattgataggtcttatcaaccagatatcaaaaatctttggtacatcattgatgagaaatagaaattaatacctgcatcaaagataagaccaggatctaaagcagcacttggattgacatgaccacttccataatcgaaaggagtggctttaacaagcgttacagcttctgtgtctgaatattgctgtgcctgaagaagccttcctgctctatctatgactgttgaggttgtcatcaaagctgatttgatagcagctgggctccattgaggatgcttctgcttcacaagcgcagctatcccggctatgtgtggtgcagccatgctggttcctgatattagcgcaaatccttcacctgctcaatatcccaaagtaagagaccacaattctgattcaaaagattcggcacatgctagcttcagtactatcaatgcttaccaacataattgggttcatctgttccatttggacaccaagcagcccatatgagataaccgggtgcaagaatatccggtttaagaagatcagcatcttgaaagctgaaatctttggtgttgggtcctctagctgagaacaatgccacttgaggtgctgatttgtgaagaacgggtgctaagccatctccgatgcttccctcggctttaaagctttttactcgtcctgtccagtcccttgatgtactggcgttgtagtaatcgatcaaatcctaaagatgcaaaagacagcatttcagatagagaaactaggctaagagtaagtgaaagcatcaaaactctcattaccattgacttggacacatctgtaatcaggattcctggaatggcagaaggaactggatcgaatttggttcccggagatacattttcaacaactagaacaaaaccagcagcaccaagatgcttagcggttgcaacaactttcttgatggaagctgtaccaacaacaaagttgaatgaatatccacagagaagaatgtttccctcaactaatttcttgttgaagacttctggtctttggcaatcagatggattatacttcgaaacagatgaatccaacagaacatcatttgcagaaaccaaagtgtacaagcgatgagggcgtgttggtgctgcagaaaatacgtaacaattcatcaaaaacatgaaaatataaactcgtatcggtcatgccaaatgtaaaataacattctttttacttacgagataagcccatccctgcaagcatttttccattcccaagggtcagatgatttttgtatcttcgatcatcaattgcagcggcgacagtagttatccagggactatatgataccaaagttttcggaaagggccctccgtttcctgcagcttgagcaacgaaaacaccagcttttacagccccaagaagggtagcatcaaatggattcaagaacgttgtcttggtagttgtgggaggactatttggaccaactgagaggctcaggatatcaactccatcatgaacagcctgtcatgaaaatctcttttaatatcaacatagataatctccatggaaagtagcagttataagattacttgactcgttgaaatctaaaatagataaccggagcttgtgttgctgaacgaataaagcatatgcagcaggataaatcatttcatctaagcagagagatatttccatggtactttatgatcagtcttttctaacttatgttaagttcttactcttacctgatcaattgcagcaacaacatcagcaacaaagcctccaaaaagccggtaaagagccttgtaaacagcaatcctgaaagaaattatttagccttttagtctctgaacgtgaagaatacaaactgtcaataaatctgccattttgcacatctgcctaccttgcacgaggagccatcccactcgcttttccaaattcataaccatgcatcctcaacggaataccgttattcccagctgctatagctgctgtatgactgaaaatccagcataatcagatttgcttagtacaacagcattatctccccctaacacctggagacaactttaaagacaaaccttccatgcccatcaccatccattggcgatgcatagtcgatatctgggttaaatgccccagccgctttagcagcttcagcaaaatgttgggctccaacgatcttcctgttgcagaaactcttcttggtatgaggatcttcttcacatttccctttgtaatgaggaagagggccataaggtaatctgtgatgagacgcgaaactcgggtgatgcggataaatccccgagtcaacaaacccgataacaatatcttctcctgctctatcaaaaccgcctcctgttggccaaacatcggttggaagtcccaaaaactctggtgtatgtgtggtgagtctcctcactttccaatctttgtctacagatctcacaccaggggcgcgacgaagtgtttctgcctaccaaatatagtgaaatagtgtaagggaacatgaaagttaagaactatttagaaatgatctgaaatcgatttttcacctgctcaggagaaacatgagctgcaaatccatttataaggtgtttatagctgtaaagctttttgtatgatccttcctcaaagagcatcccaagaatcatatcgtgcttcctctctaagtgacgagcatacactgtcaccaattcactaaaaaagtaacagcctgttacactagcaagcaatgtatagacactattccaaaagtaacagattgttaatctataaagaatctttagtctcttaaaccaaaagaatcaagactaatcatagtgaccattcgcactctagatttgctgtttagtaaataattatccatcatgttggtactattacaattgaagaagagaaactatctaataagtaccttgatgtatcaatcttctcatcagattctacagcagttgcttcaaaaccattttcgccacctttgtaacttatgattggatctccttccatagtcacaatataaacctctgctgtcacagcaacaagaagcacgaaaacgacaaaaattctcaacccgatatccattttggtttcactcaaagtgaagctccaactttaatttcttgctgtagattcaactgcagcatcaaaatcaaatgaatgcattagctccctcagaccagatagatcatctaatctcatacacacttctcagagctaacaaggacatagttacttttggtctaaaaggatcaagctttcccacaaaatgcagacaacgcataatcaaactagtgtatagagaaacgcaagaatcatctccaaggccaagtacacaagaaccaccaaaaacaaagaacaagaaccaaacacataagagcagtaaccaaaatccaaccaacaccaaagaaaagaacttgaaactcaaatcacagcttgaagaccaagaacttactccagagaaatttgactaaacacaacaatcaagtaaagaaagttcagctccatcttataccatttatataaaaagcaaaccagtaagtacattataaccactattgctcttcaattaatgagacaaacaaagaagaaagaatcttctactctcttaaaccaaaatgaaaatcaccaaaatcaaagaaaaagtatcaagactaagtaagaataacccactttcacaaatcatccaagcaaagaatcaaacatcaaataaaacccaaaaagaaagatccttttagaaagaaagaaccagtagcagtttcaatagagtaaatccaaaaagccaataatgttgtacgaacttacatttgcttcacgagacggaacagagaacacacacaaaaaaaaaaagttagctttctgtgagagacgaaatggtgaatgtacgattgaatcaaaaccgaaagattataaatttagtcacatttgaagaagaagaagaagaaaaacaagagaacaagtttattcagatctctctaattgagtgattaaagagaaacatttttgtttctgggtttgttcgtagaatagagatctagcaaagtatccaaagagagaaaacaaaaaaaaagtacgaaagtgaagttaaaaaataaaaaacttgttactgtaatttcagtgagtgtgtgtttgttggtagagaaatgaagaagaaaatgtcgttatttagggttttaattatttttataaactttatactataaatgctaaggagacaacgaaccgaagattacgtatgtaaatttttaattagttttatactgtagtaatgttttcgtgtaatggtaaaatgttaaaaaagtgttttacaaaaatccaacaataaaatttggtgtggtgcggatttacgtaaatgtccgattgtccgaaggtggggagggaggagagtgaccattcgcgcgccggatttgctgtcagttcgttttgtaatgacgttaatacccctcaaaaagtagatatgaaaatcaatgttttgtgttaaatgccgagaaatatcaaaatcctatttattttttcctttctagctagagagttctagaaatgtaaatggtaatggtaacgcctttgatctcatggtcaaaattcgatttccagataatgtattagcttgcattgtaataaatctaaaatttaatgaaaatttcttagtactgtaaagagatcgttactgtaaatacaaagcctttatcgtagttttgtatggtaggtataaaactgtatattgtggcatagtacaaattcgagtattccggaaaagtggcacatcgtgaaagttatatttggagtcgtttatatggattgatagtatctctgatgtaatatgtgacaaaaataaatgatgatatattaataacaattcagtgaatagttagttatctgatcaatgctgcattatttatttcaattttttttaaactttttatctaagcaaataaaaccctaaatatgaaagattattgacagaaaattaagagaaagttgacaatggaacattaatgagtaagtatgatatattgctgacttaaattggttatagtcttaacactggtgaaaagttatatctaaattcataattagagggccaatgttatttaactcaattatgatgtttgatcgccagagaaaagagttccttttacaaatcagaaaggcgtcttcattacaaaagcattatgaaaaattgatatacaattatactgctaaagggactctactcaatcatatgtttgaaatagtttaatatttgatgtttagggtaaatatatgaaaatcgtttttttctttttttctttttctgtatcacaaatatgttgttctagattttttattttttttaaaatgttttaattagaatgtcgcaaacttaatttccaatttaattactctttattcaaaactcaaaaagtctgaagtttaattcttcaccatttagttggtaatatatctaatgtaaatatattttatatcataaatatatctcaatatgtgttatacatttcaaaatgacactttttgtaagatctagaaacctaaaaccatgaaatttatgattcagtgatttagccaagatatcatcaccctcaaacttgtatatttcaaagtcctaaaatatggtaagtaaaagattttttcttacaaattaccaataacctaaaacttgaaagctaccaatgtattaccaaaaatatggaaagtacaaagtgatatttaaagagattggtaaatacaaatgtaaccgagaaatcatatgaagtagtttcttacttcattttgaggatcaattctagaagaaaacctgcagtttcgggactctaatttgtgaccctttttttgtcacaaaacattgacgaatatgtgaatatgtgaccctcttctgttttgtgcatggctatttgcaaaatcgatgaaatgtcccaaacctgccaaataattcgatgagacatgatacatgattagtgtatggatcgattttattgtacatccattcttctaacggattattccacatcttcttctttttttaacacttttctattcttttttttttttgttttcttcctatctctttaatttttcttttagcattgtagttggaggcaaaattaactgaagaaacgtacgttgatatatataggagaaattttgtgatgtttttgtgaccattttttaaggagtcgcaaaagttcagtacacctaacttttcgcattttcaatgtttccaccaaattttgtatcaataatttgcgattacaataccacttaaccatgatcgaaaaatgttgttgcaaataagtccctaatttgcgactcttctttctaactaaaaaaggcactagtctctatttgcgaccaaaattttaccattgcaaaagagtccgatagtagttgctgatatgagaatgtttgccgactatgtttttcgtcgttattaaacgacgtttctccatccatttatgctgtagtcgtttatgagtcttaaaatagtcgcatattattttatttttctacaaataattggagagcactcccaataaagtgattgtgcaaagttgttgttactttgattgagacaataaatatttaatatgatcagatcactgttatatatgtatatatatatccataacgattgtattgaatgtgttataatgaattcatagtaagaaagatgaatgtataaattacaaattggaggtatatggcagtttaaagtttacatctgaaagcacatgtgaatattgttcccccaaaaatgtcgtttagtccaaacacatcatgtgtccagtcatttttttttctttgttgaaatactaataacttattcttcctctaacaccaacaaagcaaattcgtatattcatttcttattatatagtttctttttctttgtttaattattaaacttcgtttggtttgctaaaaataaatatagtttacttcattattgtcgacgtagccacaccatgcatgagaccgttgcggtatgatagcgatgccacaatctctcttttatcgttcttgtattgaaatgagaaatattgtataatatataaaatgatgggttctttatataactgggggacttttaaactgaatacaaactattctattggatctgtaaaatagtagggtattcttgtcgtttgtgtgaattatgatgttttggagtgaagagatcattttcccaccaaattaatgatggtagcttagccaggataatttcttatcatgaacacatgcgtatagtaagatttttatgctaatggttaaacttattgaacagatcaaaataatataatttttcttacagagatagtagaattatatatgttttcataaaagtcataaaatatatgatttttggagtaatatatcatttattttatcaaagaattgaaaggtagctaattgttaaacctacaaaattacagcattagtaaacgttacgaattgttatgtggatctaagtaagagatatcactaaaaaaaaaaagtgagagattagtagatttttttattttagccaatacaaaattcacataatgattacaaaattttatagtttttcttgattgtgggtttagagttttcagtatgattgtagaacatgattcttgaacaaatagaactctgcattgcttatataataagtctatttatgaaacaaatcctaagataagctcagaagagagtatccgaaacctctaaaagaaaaccttgttctaatcatttaatttttttactgcagtaaccaatttcataatgattaaataaaattgcattgtaagattcgaactagggtctttcaactaattttgacaaattcttcaacacaaccacatgcatgaattggttttgattaaatgcatccttcgatctttggataaatggtttttggaatgtaatcttcccatttacgttttttttgtccccctttagaatatgggaactctagttgatctcagtgaaggggactttgaatacctttcggttagaaaaagacaattctgctatgggccaaattgtctcaatttacttttcgtgactctttagtttacatcgatttcatattattaattaagtagtgtagttaggaaataatctcaaaatgtcagcttttatttttcccacaaatttcatgtaatataagtgcaactatgaacaatacatgtacttttaattaaaaaccgtaaataatctcatgaaattatgagaagttactatatcaaaaaaattatggtatttatctaatacataaaactataatatgaggcttacataaaagaaaaatctacgatatttttatgaatacatatggagaaattgaatacaatatcgtagaacatattataaaccacaacacatctcatatatatattatcagaagttctccatatgtagagataaaaatatgtacataaaagtctcacaacttgcatattcgaaaaatactaagatgaaatcatgtgaaaaaggcattttcccttgagcttgaagaaatcggaaagaggatgcataattctcaaatgtgatttctaagtaacgtgttttcacttttgaaaagttcctctatacctcttaggaaaatacaaaatttgcacgttttctataataactcaatccaatgtatcaataagggccataccataaatctgtaagtgtaaatatctatgcctttatgttttatatataatagtccgatcctctcaactttaaagacttgttgcttttatataggtgtcactggtgttgagacaatcaaccgctaattagaccactcggggattttcctatatgatttttttctctctgtaattttacaaaaaatattcaattcaaacaaagtaataataccatatttgtttcctttttgcaaaagatttttcatatttttgtaattagaattttctgagtttacatgatacataattacacataaaacggatataaaccctacaatgatgagttttctaagaaaacgaaaataaaaataaaaagacaaatacccaattccacaaaagactttggtttgcaaaattaggtctaaacggcgacgaccctaccgacggctgagcgattttccgacacttaatatttgtcttatacacacaaaattaggtcaataatcatatatgtttcgattattgatttatatcttagagctttagaacggttgccttcatggcttcatataagtgggcatttaagcacatatcgtaaagttcggagccaatgtctatacgtcgtcttcgggtaaataactctcctttataaacattttattttttttcaaccgaagaattaaaataaaattttagtttcaactttcctttcaaatggaattaggattcacctctagatcaaccccacttagtaatggtaacggtggggcattttagcttaaccatatccatatctctgtcatagcatatgatatgacttgcaactataaactccaaattcacgtgcataatataaacgacactttatgacatgtggactcacaatctccatattcacgtgcatttacgtacacacatgacatgagcatagttccatatacatttggaaaataagacagcaaatattattgggtcagcgaatcctgcaatttgcatctaccaagaatactattcatcacttatactttagggccaccggattagatcaatcggtgcccatttcaagcccaatccactcgtcttttgttagattttttttccttttttatatatatatatatttgggtttgctcaaacattaataattgattgaagttaattttaaaatttagaaattggacttgctgttttatttagaaaatccacaactgaatgagttctaacatgtacaagattcaccaaaactttgtcttatcctgtcaaatggttagtcttgcggatatgatgctaatttcatgttttaagttatttcaatttttcaaatatacttttttcttatcaataaatttaccatcaaaaaagaaataaatttaccatcaaaaaagaaaaaaaattgaccaaagaaaaaaaaaaattgaccaagaaaaaaaggttatttgtttttctattaattttctataattggatcggatctcagggattcggatcccaatttgtacccgtttcagtttcacgaactctgtcatcgtttataaatgtaaaaaaaatctcaaactttctctttcttgactctctctcctaaaaatgtctcgattgctctcaaaaaccctaattcccaacggaagattcctcctccgtcgtttcaacgagccggcgattacgacaccaccaaacgtcgtctgtttcagccgccgcttttcatccatcccacaagtcatcgagcttgaaatcgattctaaaaacgaagcggaagcagcaattctcaaaaagctaaacgaattcgtacgaaggatcatcgttcataattcgactccagattggcttccttttgcacctggctcttccttttgggtacctcctcatcagattacggctacaaagatcgccaatttggtcgataaggtgactaatccgttgacggaggaagagtctctttcgctttcgtctccttatggttggccttgttcctctttcttcattcctcctccaggtaattgctctgatgggtcttacttgttttttggttctgcttgttaaaaaagattccttttgagattttcctcaatgttaaacccaattcatgagacaaagttgagattttgttgggttacttagggaagagaatatttgaacattattatctacatgaacatttagagcaatactagagctgatttgttttgatgtttgtgtctcgttttcgaaagatatggttgagtcgttgttagggttatttgctgatatctgtggtgatatgtttgtgtatgtctatgaaaatgttaagatggttcctcatctacacaagaggaagaagctagcgtggagttgaaaatcccggggaatgagatgttggaagtgaagctagcacattatccagatcctatttactcttttaaacctgaagatggtgaagagtgattcgataccttttccagcacgagagagcaggtaatgacaatgtaaagaaatttttttacaagttgattatagatttgaagtagcaatgaaatgtgttcctgacaaataccttggatgtacaggacaggattggaaaaaacagatgacgatcgaaactcaagcagtttgtacatacagttgaaaaccatgggagttatatgatctttgggtgactttatacaccttgtttactatgttttataattgacttaatataattagcttgggggcttcttccacttgccagagtttatggtgatgctcgggtaacttgacaatttcatttataatgacaattcttccctttgacacttgacctaagtgcatataaataatgtcttggcatacatattattcagcaaccatttgcaagtaagattaatgtatttattgagacacaaaagcaaattgaatacaaatttattcttctttttctactctgaagaaattcactaccttgctcgaggaaccatctcggtgtctagattcactgtaagcattttcgtcgagtcatcgtagttttcctgatcagtcactatgccataaacaatctgtttcagctccataacgacctgactcatcgttggcctctgcgcagaagtgtgctcggtacaagcaagagcgatctctgacattttccaagccgagccaacgtcatatctctctcttagacgctgatccacgattcctctaatgtctccgttggctaatattgacctgacatgatcacttatatgcaccttctctgtttttgagcttgcaatagcaggttggcctgtaatcacttcaagaagaacaaccccaagactataaacatcactcttttcgttcatttggcgagtcgaatagtacctgtagtttcaataatatgtgtcaccctagatgaaacatttgtattctttagtttggagaaatagtaattaagaaggtttttattacttactcggggtcaaggtaaccgatggatccagcgacaactgttgaaatctgaccgcttccttcaacagagaagcttctagataacccgaagtccgccatcttcgcttggagcttctcgtttagtaagatgtttgttggcttcacatctctgtgaactataggaggcttacaaccattgtgaagatactctagtcctgaatttgttttatagacaagaaaacacacacttcattgattgattttcgcatgttagatttagttaaatgtaatttcaagatgggacttcccgaaccttgcgctgcatctaatgatatcttcaacctctcttcccagctcaagataaatgaccttttaccttcacaaaatgaaacaaaaccaaagttcctttctcagtacattatgaacataagattagtgaacaaaagaagaatcattaattaacctgccaaatagtctcctaagttctcattagccatatactcatagataagcaccatgtggtttatttcgttgcaatatccaacaagagaagtcaggttcgtgtgatgaactctcatgagaaggtcaacctgcgattctcaactagattagttaggtgaaaaagtttgagataaattaagattaagtccttgaaaggtacgcaaaaaaaacctctgctcgaaactctttgtagccttgagctgattcttcagagagtaccttgacagcaacttgttctccatttatgacaccatggtatactttaccaaaacctcctttgccaataactctctcaaagttatttgtgatattcacaacttctgagtacttaaagtatcgctttgcagttttcaacggcccattcctctcaccaagtgtacctataagaacctcgtttagttactttctttattggcagaaatttgtttttagtatcatacctctttgttgttttttcttgaaacgccggaacaaagctaaagccgtcaaaagaacgacgatgattcctacgactactaatggaatgatgtatccattcttgttcttcttctttgtgtttgaacaggaatcagagagacaaaggtccggatttctaccaaatctataaagttacaatgtagacatgttaggaatgaatcttgtcaaagcgcattgcggaattatcggttctaaatcacattcaaagaggaagaactaaactaaaattaataaaaggtagcttttacgagtcgcaaaccttaaggaaagagatccattctttgatctttcatgcaatctttgtggaactatgcccgttaacttgtttccttcaacgtttctgcatatacgaatccacatcaactcgtaaattcaaagatatcttttgcttcactgatcaagtgaaatatttgctctagttgatatgactcacaattcggtcaagtttggtaagttagcgaggaaagcaggtatttctcctgttaaagtattaccggataaatctctgtaatgaaaaatgattgtgttagtaaggaactctgtgtatcacagagtgtcagtgattattacatgaaaaaaaataccgacaattttcttatagatgtaaggttggagaaggctggatctatctggcctcttaattcactaaaagatatatttctgccaaatagagatgtttaggacaaaacaaaaacagagcaaaacagagcacaacagaacaaagcagagtaaaacagaacagatatctataaatttaaacactaacttacagtgaaacgactctaggattagtagtgttatcactttggatacagtcaataccttcccaagaataatctacgggaacacaaggatctccttgccagttcttcttcactctatacgtggctttaatcttcctcatggcatcaactataagagcatataaacgaaatcagacataaccgaaaaaaacttcggaggaagtttgtaccatataaaaaaagccttaattaccatcctgtggatgagttgggatctgaaggaactcattgacttgatagacctcaagggcgttaatgatcggtggaagtacaaattcaccaggtggttgaagaagagagaagttaatggtaattccgctcacgggatccggtgtaacgaatgtgtcggtaagcaagtaccgaagcttaaacgaaggagagattacatcctcatttagccagatgctgaattctctcgtctggttgcttttcagtacttcaatttcagcaaagtgcatgtatacataaaactttgcgttagggtcgggcggtctgaaactaagcgttaggtagaggctctcgtttcgcgctgtttctgcagtgctcatgacagtagaagccggttggtagccattgttaagaaattgatcgacagtgagagatgtatttaatatcttgtattctgaactcactatacgcggtgtccatatacggtcatatatgtcatctttgtacctacacaaatgtgtatgagaaactgcaaaaacaaaaaagtttccttgtaaaataatcaaagtttcttgttaaggctcacctcgatggaagttttcccgttttgctgtaatctaatctccgaaggagggtaagtgcatcgtaaggagtctcataagtagtgttcaacaagagccgtatctccaagacagacaaaaatggagttcctgcgttcttatcaacaacacacacttgaacattgtctaaaagtggaatggtgattatctctttgttgagtatagttgttgcatcgtcgagtttaacagagtcccaaaagtttactcctagatagagatcgaactcgggtactcttccaagatcatcatagttcccgtacatgaaacgagttctgattagatacttaaaacctttgcctctcggcgtcggaacatcgtaacagcttctcttgctttgagggaaacttctcacgttcaacaagtgtctatcaaaaccacttgattgaaactgagctgcaattctctttgttgttcctgaatcaacaaacgccgaatccgaaacatactttatacctgtagtctcatcgttgtagctagaatcatccggtatcccgcaatctatacttatgaaacctgtaacactcagagaatgagagaaaagaagatacgattgatgtatggaagcttggtttgcttcaagataaatactaagggagagtagttttctgggaaaattgtatgcaaattcttaactaaacgatgcacttgatgtaaaaacgtattttagcatctgaatattaaacaaagccaagactgttttaaattaccagattgatcttgagcatgaacaagaaagaacagaagagcaaagcttgtgaataaaatcgatgaaagagattttaacatcgccatttacttaattgagctgctttctctgggctagagcaatgagcaactgttttataattaaaaaaaaaaaaacatttggtcaataagatgttgatagtcaaccaaccatcttctaaggttattagtgttacgcaactttaagaatgttcggaccaggacgtaatatatgtcaacgcttactctcattaacattatttctacttattgcatatttgcatggtttttccttggcaaatgattacctttaattctctgcaaaatttaattaaaagtatatttgagtctaataaagcgaatgaaactatatgcataaaaaaacgagacttaaaatctatttttaactattatttacaacgttgccaaaaaaaaaaactagtatttttcaaatgtttgacaagaaaaggttcattttaataaatggtcaaaacacatctaatttccttttgagtttattactatatatgctataacaccacatcacaaatgtaaagagaccaacactgatataaaaaatctcacaactcccaatagtttgtatatttttttaggaatcagttgaatatcaatgtgttacggtgaatttttttatttaatatagtcaaggtacttgacaataatttgcaaaaccacattggtaggtgaccggacacgtttagatctttttattagtcatcactttcaagtttcaacgatgtgtttttcttttaaaacccgatgatccgctttcaacgatacaatatgttcttttaataatatatatattggtcaactagtaattaagtcaataatttttttatttttttttgtcgacttctaagtcaatgaatatatattcttagtttcattgccatccacaaaataatcaaagagatatatattcttcagatatttatttaacaaaagagactattctgatattaatgtatgatcatacaattttggactccttttctttttttgtttctgaattcggtttatgaagattactttagaatactagcttcgtaagacaggtctagaaggtaaatctttccaacctgcaatcactaaccaaatagttgtcatttcgtttagatcaaagatcgacttttagttggatatcaaatttggtcactatgtaatattggaattcacatggcgaatacagtcatacagattgaggtatgatcctaaggtcgaatgaccgaaagaaaatgcaataactaggaatactgccctaataagcgtccctaatacttttcaacatatcaaatcttcttcttttttttgttgttgataaaaaggcgtttaatttaaattagaataactaataccttgctatgactttttatggtcaaacagttttaaggaagtaatttggaggaggacttgacgataaaaagatattcttaaaccttttttctttccaaattactttctcaaaattgtttgaccataaaaagttttggagataaccaaccaaaattatacatagctgcgaggaagaggaagtgaggaaaaaaaataaaaatagcttacaggagataactaattagtgtttccacgactaccgcggcttctacaaccacaacgtccacaataactcacattaatccatatattatgaacccttggaaacggttttgtaccggtctatctcgcaaagtcttatgagtagatgagtcatatcagattctgctcagagattggaactgagtatccttgctccaacatttcgaatctttcaaacagtttccaaattttttggacggattggatttttttgttgatttggtaaacgttgatgtgatcttctggtccgataattctaacaaaggtgcatgaacctcatctgaaaagatgcttagttgacaaataatataaatcaaaagtctcatattgaccatatgatttatataagtcggtatgcatgcatgtataatttaaaatatataagttaatgcaaaaagttaaagctctccctttgtgaaaaaaaaatccaagaaaaagatgcttaattgaaaagtagtctgaaaaaaatattataattatacaaaactaaattcttgaatagacgatacggtttatgtaaaccgacatgattatatacatggttgatgaaaaaagtgttttcttacgtgagattagtgccttttgctcttaccaaacttctcattacccgggtctgcaagccaaacatacaaaaaaaaaaaaaaaatctcattacgttatcattagagcagaaaaatccattaaaaacagtctaataattaagatttacttagtagtaatctgatcagaacttgtatggtctcagaaatcaccacccgatttcgatctctatctaagggagtcagggttaatctatataatccaagtattcttgaaattcatcaacgtattagttatgtctccacagagattatacacactccttttggaccagtttcatttgtgtcttgttggtaaaaaaaaacacagagaaatttctactcttcttttttttttttcttttttttttttttctcttgaagagaaaaacttctactctcataaggtatagaagaacaagaaccgaatctatacgatatattttggtcccatgatcctgtataacgcttcctcttcgatatcgcacctcctctagcgttcgcagtgcatctggaaattacaagaaaaagaagaagaaaaagaatttagggtttagtttaagaaaataaaacctaaaccctagagatcataaaccctgaaattttaattgaaaggagaagaagaaaaataggaaactcacctcgcttgaacaatgaagttcactgtcagggattcggggaacaatgacggcggagttttgcgacaatgtatgttcgacagcgatttctcattgtctccaattctctaatttaaaagttaggtccaaaaaaaaaaaaaagttaggtcaaattggtatctttaagttttttttaacacttttcgatttgtaaatgtaatttcaaatttttttaaaaaacgatattaagacttgaaattacatatatgaccaatttatgtaatttcttatttctaaatatccaagaagtgaggtatataaattgcgtgaagtggagaaaccctaaatcgcgcccatgatccactcgcttccgaagagaagatgaaaagggataaggttgagcgtaagattcccgggtccgaggatatgaaaatactgaagaactgttttgtatatatcgtacctaattgttttttttttttaaatcgcttccgaatatttaagctaataacttccgtggttgtccgtacattttcgccaaaagtcatccgcacaatcagcccctaagttcggaagagaagatggagaaggaaagtaagaagaaaattaagaaactcgcttcccgagagaaggtggaggtggttaagcgtttgtttagacttgaagatattaaaataaatcgcgtggtttggaaaagcagtgtaataaatattctttctatctactgtacctaactgtcgtttgtcaaatcgcttcctaatatttgagctaataactaacgtgtcttacttaggacatggtaattcgccgaggtcttacgttcgttttcgccagagatctttttttttttttttttttttttcgttttcgccagagatcatctgcacaatcctcgtcgtgtcagagtcctcctctatgctaagtcgggcttcatcgttacaattttgtcaaggtaaatattaattttcttattttctttcttattaattagccatctatttactttaatcgatttctttcttttttttttttatcaataaattactcaattttaggggaaagacttgaaggtcagtagcatatctacatacttcacgtcccccggtaccgcataactttcgatgccaaggatcctcgagagaccagtggttcccttcaaacttttcatactcatgttaatgaaagaagttatggcagcttccttttgacgtgcactattgcttgtcctttaggtaaagttttgcataattatagtgtacaaaaccaacaacttatcaatattcgatttactctttgtataggtgaaccttttagaggtggtgaaaccaaaagaaccatgttggtttctctcatacctgagttgccgctagagaatcctttccaagatgctacagaccgattttacgtggtaaaatccttgattttaagaccgtttggatctttgcttattaccgatcaacaacatatttatgttttttttcttttggcgctgaaaaaatcagtggttaaaaaaaatgactggtttcgtttgtacttggaacttgcagttgccacgactaataggcaccgtatcaaatatggtgtggccaattaagattttgagagtggctatggaaactacacaagaccttggcgcctgtgatgcaactttctacgttaggtacacagactcatgccaggctcggactggtgaggatgccgatcgcgttgctatagtcagaagaatctgggatgagcagtttgatgtcttcaaaatcgtgggtcgtactgagagctatagatcattagggaatggtgaatccaccacgtcccgggagacagttgtgcattgctcgaaggacatagattcgatggaacaatctgacatgcatgatggtttcgacggatatgttgggttgtactcagagctgacaaaccttggaagctggctcgttgtcatccatttgaatatgttgattagaatagtaaaccccatcgcttgttgaccaagttatttggtggcttaggattgttgcgtggattgctttggtgaaactttgtgtagttttaagtgtgttgttctgcttgaatactttaacattggtcgactaagttattttgtgtgttgggattgttaagtggattccttatgtgcaattttttgagctttctaaatgtgttctgcttaaatactaaataaacgtagggaaggatttggagacattattcttgctttcagaatgcaatcaaagacacaaagattgatttttaatttataaggagaggatcacgtatactagaagctctgaagtgtgaaatgttacccctttctctgaaaagatccaagacgaagttgcctccctgtcgatgatctcaatgagtcaccaacatcagtggattcaagaacatataataactataaatataacttcaagaagaaattacaaggatagaaaacaaatgcaccttcttggtgtgttatagaaaatataatgtttagtgttcattccggtaatgtcagttggtatgactcagatcttagaaaatggtacagagtttcgggattgaaatatctgcttatgtcacatcttgttagctatcataccaaatgtgagggagattgagtttttacatgttgtggttactactgtcccaatttcatatcacttgttgagctgttatgaccctttgaacaaacaaaggataaataatctcaccttatcttggctttgggggcagaacaattctcaagaaaattgaagctcgttatttcttaagaatggggttcaagtttggcttatgtgatgtgatgccactttaaatgttatttagcttgagttgtctatgttatcaggctgagacttttttttttttaatggaagatagcataatatacacttcgattattttacaaagcaaacacaactcaactttgttcttcttcttcatcacactccacactacacgcaacttccaagtttagggaaaatgaaataatcggatgaattcaaagatcatttaatttaccttgcttgaggaaacattcccgaatcaaaattcgtcatagctggatccgtgacactactggcgccagaaccaccaccggctcttgctctgcttacactctcctttagctcagccactacatgactcatcgtcggtctattcttagaactagaagatgcacaagccattgctacttcagtgatcttccatgccgaaccagcatcaaacctctctcctagctttggatccacaatgcctctgatatctcctgtcgacagcattaagtcgacccggtcagttatgtgtatgttctctgctgttgttcttgaacgtgcaatcaccggttggcctgagacaacctctaaaagaaccaccccgaagctgtaaatatcactcttctcgcttaatttttgcgtcaaatggtaccttcattttttaaaacaatgccttagaaactgtaacagcttataccaaatgacaatggaagaagctttttacttactcgggatcgagataaccgatggttccagcaacagcggttgtatcctggttattaccgtctagtgcgacacttctagataatccaaagtcagcaatcttggcctggagcttctcgttgattagaatattagccggcttcacatctctttgtacaatgggaggcttgcagccattgtgaagatactcaagccctgagattcaaacaaacaacagagttttatttcattgattttttcacctacctctttgtgtattcgttaccaaccttgtgccgcgtctagtgatatttgtaacctctcttcccagctcaagacataagatttttccccttgattttgaaagaaaccagaaggtaagtttagtttcctcttgcaacagcagcaaaagaccaatgatgaaaactaactaccagagagactgacctgacaagtaatctcctaaggttccattagccataaactcatagataagcgccatcttcttgccttcgtggcagtatccgataagagcggttaggttcttgtgatggactctcaggagaagttcaacctgatgataacaagtgaatgcataattgattactccataattcagttattaaagactgatgtataagagacttacctctgctctgaactctttgtaaccttgagctgatgattcagacagaatcttgacagcgacttggtcatcatttaagacaccatgatatacttttccaaaacctccttgtccaagaactctctcaaagttgtttgtaactttcacaacttccgagtatttgtagtatcgcttagttgtatccaatggcccagccctgacaccaccagagccgcctgtaaagatttcaagagaatttgtcttacaagtaatcctagaaatcaaagaacaagcaatgtaggatcgtttcttgatgtttttacctcttctgtgtcgcttcttgtacaacaaaaacaaagctatagctagtacaagacctagcactcccacgacagatgctactaatggaatgatgtatacattcttttttgtcttctcatccgaaatttgacatgaagcagacacgcagaggtccggattcccatcaattcttaagatcaatttgcagagacattaagaaaccatgaaccagataggccaaaacttattaacatgaagcaaacatctgaattgtgtttaaaagccaatactaatcatgaaccaaccttagcaaaatcagttttttgtttgatctctccaatagtttaaccggaatagcacccgataacttgtttccttccaagtttctgcagacatatatttgatatcaatataaattctaagttatagagaagtcaatgtctatgtaatctacattttcaatttagtaagacttacaactctgtcaaattatgtagattaccgaggaaatcaggtatttttcctgttaaactgttgtttgataagtctctgtaatggaattttggttgcatcagttaagaattccacaaatttgtatacaaaagaattccatatcaaatcgaaaatacgaacaatatatgtaacaatgtaaggtttgagaacgctgcatcaatctctccagtcaagccactcgaggataaatttctgaagatcaacaaactcttgtgagaaaaagacatacagatcaaagacatatacaagcatttgaagaggagcttacacagaaataattctgggagactcattatcgacatagctgcagttaatatccttccaagggtattttactggagcacaagggtccccaagccagctcttcttcactccatacttggacttgattctcataattgcatcaactagaatttataccataaatggataagtatttgaataaattacgaaaagggttaagtattgtattagaaatgaaagtgtaccatcttgttgatcagtaggtgactgtagaaactcgttgacacgatatgtttcaatggcgttaatgatgggtggaagggtagatctaggagtttgttgaagacgaaactcgagttttggtccgctcacggggttctgaacaaaaagcgtgtctgtatacaagtatcgcgggctaaaggagctcatgttgatttccttttcgtttaataacaccttaaattctcttgtctcattacttggcagctccacaacttctgcaaagtgcatatacacaaaatacttccaagtaggatcctttggttcccaagaaaagattatgtcttggcttaaatcctcaggtgaagttgcagtgttcataacaaagcgagcgggttggaatccctcgttgttattcgaatctattgtgagcgatgcattgaagatggtatactttggaaaccttagaggtatccatatccggtcaaaaacatcatctttgtacctacattattaccaactttataagaagaaatactaaaaaagaactcatcatcaaataaaaagtagttttcactttcacctgacgggaagagcaccgagtcccccaagatcccatcttttaaacagaataagtgaatcataaggagtctcgtatgtattactcttcaggagcctgatttctaacgcagacaggaacggagttcctctgtttttatcaacaagacacacatgaacatggtctgagcgaagagtgtggatgatctctttggtaactatcgtagttgcgttatctattgtaacagaatcccaaatattgaacccaagataaagatcgaagtccggtgctttccctagattatcgtagttaccatacatgaaacgggttcttatcaaatacttgaagccttttccctgcggaggcttcacatcgtaacagtttctgttgccttcagggaagctcctaacgttttgaaactgcttctcaagagaacttgtttgaaactcaggatctatgctatgaattgtcccagactcaacaaacgcagcatctgaaacatactttatgtctgttgtttcatcattatagcttgaatcctcaggtataccacaatctatactgacaaaacctgcaaataaaaacacacacacacacataccgagagattaaagcttaaaaaacacagccatattatgaaaatttgcaagactttgtgtttacctgattggtcttgagcacgaacaagaagaacaaaaacagcgaagaagcatgcaaatataatcagcgagagaaagttgtaatgcaccattactgaaaaaaaagctcttgatctcataaaaatttcaataccagcctcttctacaatgtttaagcaaaacttatttctttctccaatacttttgactctaaagattatataatatagccatgttggctgatggtgaagcactatctcttgtaatcaaatacttaaaaaacaaatctcaagtcaaaagggcaagttgatatatgctaagagtgtccttgtgttcgtacacaaggacgacttcgggtggtcttttgttagttgacaaatcttcaagtgggctaattgtttaaagccaaagaactagttctcatgattagctgacaatgaaagtttcaaacttgagtttgtggataacataaagaaacttcaagtgacaataaacaaagtacaaaaatcaatctcccaaacatggcaacatgaatcaggtggaacaatagcagtagctgaaaaattcttgagactatttgaaattgtagcactctaataaacaaagagacacatgaattggaattcaaacatcacataaagacttgcaagacaagcatcaaaatggacaaggatcatttaccttaaaaagttggatctttttgaaaatttagacttttagtccagcatttgatggagctgctgatacaacatcatagaatcaacattttcgtacaaacccatttatcgaaatagcaagtcaaaggaactgagaccaaattcgaaacaataatctaatcagaaattttataatcaacggaattcgatgttgcaaagtgatttacacggcacggacgaccagctaaagggattggataaaagtctacattaataaatttaggtccatgaataagacgtttaaaaagatgaagggtatattgagaaataacccaaaattactaaagcagtaatgcggcacaagcatggtgacgtggcgttacttttttaggcaaaaaaagttcaaaaagaagataaaatgaaggttgttgtatttcatcactacctaaatcataattcatttagaagttgaaggttacttgttgctcaagaaaactcagaatctgtaatacttacattgaacttgaagcgagaaatgttcgcctcagtcagatatagcagagagatatagatgcacaaaacgaataattttataacaagaactagacattctctctcaaatcataataacctaatatctcacattgttgagttctaggttactctccagtatattaagtattacacatacacataatagagagtttggcataatagttaagatcaagaaagaaagaaaagagttttgcacaatactcataaacatgaacgaaaaataacaaaacataaaataaaaataaactttttttttttttgaaaagatgaatttaagggtttgatagaagctttagcagccaagccatcctcaaacttgatttctgcaacatcaagaagagatatctgtagtctttggtcttaaacaaatccaaggcaaacatgtatagatcaccgcctttctcaacctcttctatggcatccaaacactccacgcattcctcaaaggtaaacttctccttcttcttgaccgatgcattcactggaatcttctccatcatctcgggagttacagtttcagcaacatcctctgagtctgacctaatcagtgaagtaggctccacattgccatcctccgctctatcgtcacttcctttgactggctcgtttgtgttgactactactgatgatggagttggttgatgatcatgtagctgtggtgattctgaatgatgatcgatcactctcttgcgataacggcgggttttggtttttccaggttcgatacgtcctttgaagatggttgccagtttatcagcatgaggaatatgtctccttttgaagactcgagctcttttatttatctataaatcgacaaaaaaataataatataattacaaattgatatctaagaaatctaaataaagtttttctttaccatcaagtatttatcccagtcctcttcggttgcaccaaacttgcgagtattggcatcccacttcatgatgggagaggcaatagtttcacaccagtgcttccaagatgtcctggtacgtgtgaagtggttttcgagctgcttatgtgtgtatcctagtcctgtgatccgattgattttctcaagaatcattttccaactttcctttgtaaaaagatggttacgtttgattggtctgattccttttaaagactcttggaaacacgtgtccacaacaatcgcatgtgaggatggtgaccacttataatgacgacgagtcgcgatatcagacgcgcttagcctaggtacatatccagtaacattttcttcatcacgatgctcacatatttgcttcattttgctacctgaagaagtaccttcaccatctaagttcatacctgcaaagataatctctagtttctcgaggaacaaggggggattacaccgatactgcccagcctcaggattcacctatgacaattccaatcaagctctttttattacatattagccttcataaacaatcaaaatcaacacacaaaaaacgttgttaatttgtacctctaaatagttggcccattcttgatcagtggcaccaaacgtgtttgtcaaggaatcccatttgatatctttgcattgaacaagtctacaccaaatcttccactgcttgatcattgtatcccaatgatttataagctggtctatggtgaaccgcacacccatttcttgaaaagcttccaatatatgttgcatttcaggttgattccccaacatcttttgctcgacgcataagtccacaaatacttcgtcgtgttcaggttcccatgcggctttggacgtcataattctttactatatgcatagttagataaataaagacaacaacaacaaaaaaagtaaattaacaatatcattattaaaggctttgaccggtaattccgttaaaattgtgggaaatatacaaaacaaaataaagcaaatcatgatataattggttagaacccggaagatagcgaaagattttgtcattccaaatagttttatacagaaaccaagtctatatacaatatacattcaaatatgtatgggaattttttacatcatggctgaatctagaactaaccttaagacttatcaattccaaaattttacatcatggctaaattttttggcatttgcactgcttgagatggagaattcttgtgtttttttctgagattataggtgtctaagggccctatttataccggtatgagtggattctcttttaggaaactttttaattggcattgactgattttaatttgttgcaaaataaaaattgactaatcttcatttatactaaatgatattgtgattgaagggttaattgaaaagatagtcaaattatagagttcaattaagttaattaccataaaattacccccgagattactattttttttttggttttaataagataataagtttgcgtgcgaaatttgaaaaaaaaataacaacacattgtttgtttataatacacattatttaattaatttaactgccattttttattacacgaaatttgaaaaatacatgttatttgtttatatgttatgttgtttaattagattagttattatgagtttttaaatttgttatgtagatattgcatgttcctatattttattcagaagctattgctataacataacagaatcttccttatatgatgtgtagaaagacaaggtagggaagtaaagatgcagagaaccgatcttatgcaaacgagaatgagaacatagttggtcctgaagcagtggtggggaatagtgaaggagattcagattattgtttttggattcataacttccactatttcctggcttccacaacatatattaaacgagtcatcattattcccttttaacacaagaactaaaacaagtatttggcttcatctcaataaatcaatgtacaaaaatatttaagaaattgaggtcaatttctttcatgagttttcctctacacatttagacctaaccacacctcgattgaaaacagaaagttttattctttatccttttactctaaaacaatatacatttcaaatgtatttacagagctgactcaaacaaatgagagaacacaacctcacatctctgacaacagattactgagtttccgaagctccttaagtgctgttgtagcagtgacttgtcccttttcgatcaaattggttttagcaaagttccctatcaatcctgcctgaaccagactaggttcttgttggaaaaccaactcaactgcctgaatataaaatagactaaaatcatcagaacatttgagcttgtaaggcggagaagaattgtcatggaaatggctaaatatctttgttacaataatcctataccactagaggcaagaaactaacatactcatacttgttaccttcagaaccatacgaaaaatacttctaccagtttgatgaatatgagaactgagaagttacctgaatgtgttagagcatggactggccaaggttcttcagagtcctcatcagattctgatttgagtctccattgctgcaagaagataaagcttgggggtgggactcagaatggcaaccgatttggttctttttaatttcaacatcactggtctttgtggcatcagaagcttttctatctgaagtctcctcacttgacaaagtgtgtttaagcttccggaaccactggactattccatgtaaaaggttgtgctccttagtaatgcccacagatttatctgtagagttgactgcatcaggctgagttactggatactcatttctcgtatggggagatacagaaagaggtgaatttacacttgtttgttgacctttatcgttttctgaaccggtacatcaatctaaatcatttccactgtaatttgacctatgtaacatactgaacccgccagattttaattttgtacgttttctctaaaggtttttgcatggaagctttatgatctcaggcttgtccttgcttcttatatgaaagctatatcaaagttagttttctatataaactagctttactttacagtataaccatgctttactttaccatatgtactctctttgtgaccatcttcttccttatatctaccttactaagccagtcccatactcacaggttatgtattaatgtttttatcagaacaatagagctcaattgaagggtatcagaacaatattttttcttcttgtccattaaagaatgtttgtatatatgtagctcaagaattaaagtgtcgatcagaaagtaaacaatgtataaaagaacttaccgttactaagatttaaggcaaaaaaaaaaacaattcaattatacccaacctttcttctcttcttaatcacaaatcatttttatttcatagctcacataattttccaaatgcttttaaactgagatgcattacctcggttgaggaagcacccccgggtcaacagtcatggacacgttcatctccgtcggctcgctaaaagaaatatctccagaatcaccactggttcttgctctgcatagactctcttttagctcagccacaacctgactcatcgtgagtcttgtcttagtactttcagacgcacaagccaatgctacttcagtgatcttccaggccaagccagcgttgaacctctctcctagcttcggatccacaatgcttttgatatctcctttagacagcatcaagctaactcggtcgcttatatgtctgttctcttcagtccttgaacgtgaaattaccggttggcccgtgattacctccaggagtaccaccccaaagctataaacatcactcttctcgctgaattgctgcatcgagtagtgccttcatttcaaataaccatagagtagagaaacaaatgaatatagacaacaacaaaaatagctgagatttgaggttcgaagagaa

SEQ ID NO: 250 - DNA, 97495 bp, Arabidopsis thaliana
gaattcaaagatcatttaatttaccttgcttgaggaaacattcccgaatcaaaattcgtcatagctggatccgtgacactactggcgccagaaccaccaccggctcttgctctgcttacactctcctttagctcagccactacatgactcatcgtcggtctattcttagaactagaagatgcacaagccattgctacttcagtgatcttccatgccgaaccagcatcaaacctctctcctagctttggatccacaatgcctctgatatctcctgtcgacagcattaagtcgacccggtcagttatgtgtatgttctctgctgttgttcttgaacgtgcaatcaccggttggcctgagacaacctctaaaagaaccaccccgaagctgtaaatatcactcttctcgcttaatttttgcgtcaaatggtaccttcattttttaaaacaatgccttagaaactgtaacagcttataccaaatgacaatggaagaagctttttacttactcgggatcgagataaccgatggttccagcaacagcggttgtatcctggttattaccgtctagtgcgacacttctagataatccaaagtcagcaatcttggcctggagcttctcgttgattagaatattagccggcttcacatctctttgtacaatgggaggcttgcagccattgtgaagatactcaagccctgagattcaaacaaacaacagagttttatttcattgattttttcacctacctctttgtgtattcgttaccaaccttgtgccgcgtctagtgatatttgtaacctctcttcccagctcaagacataagatttttccccttgattttgaaagaaaccagaaggtaagtttagtttcctcttgcaacagcagcaaaagaccaatgatgaaaactaactaccagagagactgacctgacaagtaatctcctaaggttccattagccataaactcatagataagcgccatcttcttgccttcgtggcagtatccgataagagcggttaggttcttgtgatggactctcaggagaagttcaacctgatgataacaagtgaatgcataattgattactccataattcagttattaaagactgatgtataagagacttacctctgctctgaactctttgtaaccttgagctgatgattcagacagaatcttgacagcgacttggtcatcatttaagacaccatgatatacttttccaaaacctccttgtccaagaactctctcaaagttgtttgtaactttcacaacttccgagtatttgtagtatcgcttagttgtatccaatggcccagccctgacaccaccagagccgcctgtaaagatttcaagagaatttgtcttacaagtaatcctagaaatcaaagaacaagcaatgtaggatcgtttcttgatgtttttacctcttctgtgtcgcttcttgtacaacaaaaacaaagctatagctagtacaagacctagcactcccacgacagatgctactaatggaatgatgtatacattcttttttgtcttctcatccgaaatttgacatgaagcagacacgcagaggtccggattcccatcaattcttaagatcaatttgcagagacattaagaaaccatgaaccagataggccaaaacttattaacatgaagcaaacatctgaattgtgtttaaaagccaatactaatcatgaaccaaccttagcaaaatcagttttttgtttgatctctccaatagtttaaccggaatagcacccgataacttgtttccttccaagtttctgcagacatatatttgatatcaatataaattctaagttatagagaagtcaatgtctatgtaatctacattttcaatttagtaagacttacaactctgtcaaattatgtagattaccgaggaaatcaggtatttttcctgttaaactgttgtttgataagtctctgtaatggaattttggttgcatcagttaagaattccacaaatttgtatacaaaagaattccatatcaaatcgaaaatacgaacaatatatgtaacaatgtaaggtttgagaacgctgcatcaatctctccagtcaagccactcgaggataaatttctgaagatcaacaaactcttgtgagaaaaagacatacagatcaaagacatatacaagcatttgaagaggagcttacacagaaataattctgggagactcattatcgacatagctgcagttaatatccttccaagggtattttactggagcacaagggtccccaagccagctcttcttcactccatacttggacttgattctcataattgcatcaactagaatttataccataaatggataagtatttgaataaattacgaaaagggttaagtattgtattagaaatgaaagtgtaccatcttgttgatcagtaggtgactgtagaaactcgttgacacgatatgtttcaatggcgttaatgatgggtggaagggtagatctaggagtttgttgaagacgaaactcgagttttggtccgctcacggggttctgaacaaaaagcgtgtctgtatacaagtatcgcgggctaaaggagctcatgttgatttccttttcgtttaataacaccttaaattctcttgtctcattacttggcagctccacaacttctgcaaagtgcatatacacaaaatacttccaagtaggatcctttggttcccaagaaaagattatgtcttggcttaaatcctcaggtgaagttgcagtgttcataacaaagcgagcgggttggaatccctcgttgttattcgaatctattgtgagcgatgcattgaagatggtatactttggaaaccttagaggtatccatatccggtcaaaaacatcatctttgtacctacattattaccaactttataagaagaaatactaaaaaagaactcatcatcaaataaaaagtagttttcactttcacctgacgggaagagcaccgagtcccccaagatcccatcttttaaacagaataagtgaatcataaggagtctcgtatgtattactcttcaggagcctgatttctaacgcagacaggaacggagttcctctgtttttatcaacaagacacacatgaacatggtctgagcgaagagtgtggatgatctctttggtaactatcgtagttgcgttatctattgtaacagaatcccaaatattgaacccaagataaagatcgaagtccggtgctttccctagattatcgtagttaccatacatgaaacgggttcttatcaaatacttgaagccttttccctgcggaggcttcacatcgtaacagtttctgttgccttcagggaagctcctaacgttttgaaactgcttctcaagagaacttgtttgaaactcaggatctatgctatgaattgtcccagactcaacaaacgcagcatctgaaacatactttatgtctgttgtttcatcattatagcttgaatcctcaggtataccacaatctatactgacaaaacctgcaaataaaaacacacacacacacataccgagagattaaagcttaaaaaacacagccatattatgaaaatttgcaagactttgtgtttacctgattggtcttgagcacgaacaagaagaacaaaaacagcgaagaagcatgcaaatataatcagcgagagaaagttgtaatgcaccattactgaaaaaaaagctcttgatctcataaaaatttcaataccagcctcttctacaatgtttaagcaaaacttatttctttctccaatacttttgactctaaagattatataatatagccatgttggctgatggtgaagcactatctcttgtaatcaaatacttaaaaaacaaatctcaagtcaaaagggcaagttgatatatgctaagagtgtccttgtgttcgtacacaaggacgacttcgggtggtcttttgttagttgacaaatcttcaagtgggctaattgtttaaagccaaagaactagttctcatgattagctgacaatgaaagtttcaaacttgagtttgtggataacataaagaaacttcaagtgacaataaacaaagtacaaaaatcaatctcccaaacatggcaacatgaatcaggtggaacaatagcagtagctgaaaaattcttgagactatttgaaattgtagcactctaataaacaaagagacacatgaattggaattcaaacatcacataaagacttgcaagacaagcatcaaaatggacaaggatcatttaccttaaaaagttggatctttttgaaaatttagacttttagtccagcatttgatggagctgctgatacaacatcatagaatcaacattttcgtacaaacccatttatcgaaatagcaagtcaaaggaactgagaccaaattcgaaacaataatctaatcagaaattttataatcaacggaattcgatgttgcaaagtgatttacacggcacggacgaccagctaaagggattggataaaagtctacattaataaatttaggtccatgaataagacgtttaaaaagatgaagggtatattgagaaataacccaaaattactaaagcagtaatgcggcacaagcatggtgacgtggcgttacttttttaggcaaaaaaagttcaaaaagaagataaaatgaaggttgttgtatttcatcactacctaaatcataattcatttagaagttgaaggttacttgttgctcaagaaaactcagaatctgtaatacttacattgaacttgaagcgagaaatgttcgcctcagtcagatatagcagagagatatagatgcacaaaacgaataattttataacaagaactagacattctctctcaaatcataataacctaatatctcacattgttgagttctaggttactctccagtatattaagtattacacatacacataatagagagtttggcataatagttaagatcaagaaagaaagaaaagagttttgcacaatactcataaacatgaacgaaaaataacaaaacataaaataaaaataaactttttttttttttgaaaagatgaatttaagggtttgatagaagctttagcagccaagccatcctcaaacttgatttctgcaacatcaagaagagatatctgtagtctttggtcttaaacaaatccaaggcaaacatgtatagatcaccgcctttctcaacctcttctatggcatccaaacactccacgcattcctcaaaggtaaacttctccttcttcttgaccgatgcattcactggaatcttctccatcatctcgggagttacagtttcagcaacatcctctgagtctgacctaatcagtgaagtaggctccacattgccatcctccgctctatcgtcacttcctttgactggctcgtttgtgttgactactactgatgatggagttggttgatgatcatgtagctgtggtgattctgaatgatgatcgatcactctcttgcgataacggcgggttttggtttttccaggttcgatacgtcctttgaagatggttgccagtttatcagcatgaggaatatgtctccttttgaagactcgagctcttttatttatctataaatcgacaaaaaaataataatataattacaaattgatatctaagaaatctaaataaagtttttctttaccatcaagtatttatcccagtcctcttcggttgcaccaaacttgcgagtattggcatcccacttcatgatgggagaggcaatagtttcacaccagtgcttccaagatgtcctggtacgtgtgaagtggttttcgagctgcttatgtgtgtatcctagtcctgtgatccgattgattttctcaagaatcattttccaactttcctttgtaaaaagatggttacgtttgattggtctgattccttttaaagactcttggaaacacgtgtccacaacaatcgcatgtgaggatggtgaccacttataatgacgacgagtcgcgatatcagacgcgcttagcctaggtacatatccagtaacattttcttcatcacgatgctcacatatttgcttcattttgctacctgaagaagtaccttcaccatctaagttcatacctgcaaagataatctctagtttctcgaggaacaaggggggattacaccgatactgcccagcctcaggattcacctatgacaattccaatcaagctctttttattacatattagccttcataaacaatcaaaatcaacacacaaaaaacgttgttaatttgtacctctaaatagttggcccattcttgatcagtggcaccaaacgtgtttgtcaaggaatcccatttgatatctttgcattgaacaagtctacaccaaatcttccactgcttgatcattgtatcccaatgatttataagctggtctatggtgaaccgcacacccatttcttgaaaagcttccaatatatgttgcatttcaggttgattccccaacatcttttgctcgacgcataagtccacaaatacttcgtcgtgttcaggttcccatgcggctttggacgtcataattctttactatatgcatagttagataaataaagacaacaacaacaaaaaaagtaaattaacaatatcattattaaaggctttgaccggtaattccgttaaaattgtgggaaatatacaaaacaaaataaagcaaatcatgatataattggttagaacccggaagatagcgaaagattttgtcattccaaatagttttatacagaaaccaagtctatatacaatatacattcaaatatgtatgggaattttttacatcatggctgaatctagaactaaccttaagacttatcaattccaaaattttacatcatggctaaattttttggcatttgcactgcttgagatggagaattcttgtgtttttttctgagattataggtgtctaagggccctatttataccggtatgagtggattctcttttaggaaactttttaattggcattgactgattttaatttgttgcaaaataaaaattgactaatcttcatttatactaaatgatattgtgattgaagggttaattgaaaagatagtcaaattatagagttcaattaagttaattaccataaaattacccccgagattactattttttttttggttttaataagataataagtttgcgtgcgaaatttgaaaaaaaaataacaacacattgtttgtttataatacacattatttaattaatttaactgccattttttattacacgaaatttgaaaaatacatgttatttgtttatatgttatgttgtttaattagattagttattatgagtttttaaatttgttatgtagatattgcatgttcctatattttattcagaagctattgctataacataacagaatcttccttatatgatgtgtagaaagacaaggtagggaagtaaagatgcagagaaccgatcttatgcaaacgagaatgagaacatagttggtcctgaagcagtggtggggaatagtgaaggagattcagattattgtttttggattcataacttccactatttcctggcttccacaacatatattaaacgagtcatcattattcccttttaacacaagaactaaaacaagtatttggcttcatctcaataaatcaatgtacaaaaatatttaagaaattgaggtcaatttctttcatgagttttcctctacacatttagacctaaccacacctcgattgaaaacagaaagttttattctttatccttttactctaaaacaatatacatttcaaatgtatttacagagctgactcaaacaaatgagagaacacaacctcacatctctgacaacagattactgagtttccgaagctccttaagtgctgttgtagcagtgacttgtcccttttcgatcaaattggttttagcaaagttccctatcaatcctgcctgaaccagactaggttcttgttggaaaaccaactcaactgcctgaatataaaatagactaaaatcatcagaacatttgagcttgtaaggcggagaagaattgtcatggaaatggctaaatatctttgttacaataatcctataccactagaggcaagaaactaacatactcatacttgttaccttcagaaccatacgaaaaatacttctaccagtttgatgaatatgagaactgagaagttacctgaatgtgttagagcatggactggccaaggttcttcagagtcctcatcagattctgatttgagtctccattgctgcaagaagataaagcttgggggtgggactcagaatggcaaccgatttggttctttttaatttcaacatcactggtctttgtggcatcagaagcttttctatctgaagtctcctcacttgacaaagtgtgtttaagcttccggaaccactggactattccatgtaaaaggttgtgctccttagtaatgcccacagatttatctgtagagttgactgcatcaggctgagttactggatactcatttctcgtatggggagatacagaaagaggtgaatttacacttgtttgttgacctttatcgttttctgaaccggtacatcaatctaaatcatttccactgtaatttgacctatgtaacatactgaacccgccagattttaattttgtacgttttctctaaaggtttttgcatggaagctttatgatctcaggcttgtccttgcttcttatatgaaagctatatcaaagttagttttctatataaactagctttactttacagtataaccatgctttactttaccatatgtactctctttgtgaccatcttcttccttatatctaccttactaagccagtcccatactcacaggttatgtattaatgtttttatcagaacaatagagctcaattgaagggtatcagaacaatattttttcttcttgtccattaaagaatgtttgtatatatgtagctcaagaattaaagtgtcgatcagaaagtaaacaatgtataaaagaacttaccgttactaagatttaaggcaaaaaaaaaaacaattcaattatacccaacctttcttctcttcttaatcacaaatcatttttatttcatagctcacataattttccaaatgcttttaaactgagatgcattacctcggttgaggaagcacccccgggtcaacagtcatggacacgttcatctccgtcggctcgctaaaagaaatatctccagaatcaccactggttcttgctctgcatagactctcttttagctcagccacaacctgactcatcgtgagtcttgtcttagtactttcagacgcacaagccaatgctacttcagtgatcttccaggccaagccagcgttgaacctctctcctagcttcggatccacaatgcttttgatatctcctttagacagcatcaagctaactcggtcgcttatatgtctgttctcttcagtccttgaacgtgaaattaccggttggcccgtgattacctccaggagtaccaccccaaagctataaacatcactcttctcgctgaattgctgcatcgagtagtgccttcatttcaaataaccatagagtagagaaacaaatgaatatagacaacaacaaaaatagctgagatttgaggttcgaagagaaaagctttactcagggtcaagatagccaatagttccagcgacttcagttgaaacctgactgtcaccttccagtgtgaagcttctagataaaccgaagtcagcgatcttggcctggagcttttcgttgattagaatgttcgtaggtttcacatctctgtgaactataggaggtttgcatccattgtggagatactctagccctgtttttttcaagcaaaccaaagttttattgattttctcattctatttttatatgtaattttgagatacagtaatggtgtaccttgtgctgcatctaatgatatctgtaacctttcctcccagctcaaaatactcgagtttttcccttaattatagaaaacgacaatcagattaagttcttctgattataacaaagacaagtgaccaaaaattgactacatgaggctgacctgacaagtagtctcccaaggtcccattaccgatatactcgtagataagtgccatttgatctccttcgtggcagtatccaataagagctattaggttcttgtgatgaactctcaggagaagttcaacctgacaatcaaaaagtccatgtctctctcagaatagttcacttttcatctggactgaacctttaagactatatgagagtaacctctgctcggaattctttgtagccttgagctgatgatttagacaacatcttgatagcaacttgttccccacgtaagacaccatagtatacttttccgaagcctccttggccaagaactctctcaaagttgtttgtaatttccactatttctgaatacttgtagtatcgctttgtgtctagtggtccggtcttgacacctgctaagagatcaatgagaaattattttcatcaaaagtcttggaaaaaataagcaattttaacaggtgttttatgattcacccactttgttgtctcttcttgaattgccagaaagaaattaatgcgagcaagagaaaaaacaatcctgtaacagatgctactgatggaataatgtattctttcctctccgtctttttgtttcgacatgaatcagacacgcaaaggtctggattcccgccaactctaatgattaaaattcagaaacgttatgtgaagaacaaaccattaatacatgccaaattgaactgtttcaaatcaacaaatgtgggatgagttcaaaatcttatcaagaaccaacctcagagaaagcgatccatcttttgatctctccaatagtttctccgggaggatacccgttaacttgttttcttccaagtttctgcagaaacatgtgtggaatccataaatattagtaaaagataccaacgtttttctaatatgaaaattcagttgggatgacttacaactcggttaaatccggtaaattagcaaggaaatcaggtactgttcctgttaatctgttatttgataagtctctgtaatgaaatgttttggttgtgttagttaggcttcaaaaactctgtgtactataaattgcaaaaaataaaataaaataaaaaactgacagtttctgtaatggtgtaagggtgatgaagactggatcaatctggccagtcaatccactaaaggataggttcctgcaaatcacacatttgttgctttgaggacagaaacatatagtactgagatatatgctattcaacaaattcttacacagaaatgattctcggaggattgttagcggtgtagctacaattaataccctgccaaggatagccaaatggagcacaaggatctccgagccagttcttcttcactttatacttggtctttattttcataattgcatcaactacaattcatactaaacagactaagtagagagctaagtatattaagtgaggcaagttctaattctgaatatgtaaccttaccatcattttgatcagtaggcaaatcaagaaactcgttggtacgatatgtctcgatggcattcatgataggaggacgcgtggacttaacaccttgtctaagaacaaattcgagaaatggtccgctcacggggttttgaacgtaaagtgtatctgtatacaagtagctaggcctaaacacactagtagtgtcgatctgctctttgttcagaaacacagagaactcccttgtctcattacttggaagtttctcaacttcagcaaagtgtatgtatatatagaatttccaatttgggtcccgtggttcccaataaaccattatctgctctatgctggaattcattggtgctactgcagtgctcatgacaacactagggggtaagaatccgttgctgctagtcggatctatcatcagcgacgtattgaggatcaaaaagttcggaaacatcaacggcatccagaagcggtcaaaaatatcgtctttgtacctatattattagagaaacgtaaggcaaaacagaaataatcagagtgtataaacggttaattaatttttaacctggcaggaagatctccggttgcaccaagatcccatcttcgatacagcataagagaatcagaagcagtctcgtatatattatttttcaggagcctgagttctaagacagacaagaatggagttcctctttctttatcaacaagacacacatgaaccttgtccgagcgaagagtgtagatgatctctttggtgactatagtagttgaattctcaagagtaacagaatcccagagattgacaccaagataaagatcgaagtcgggtgctttccctagattatcgtagttaccgtacatgaaacgggttcttatcagatacttgaagccttttccctgaggaggctgcacatcgtaacagtttttcttgccttcagggaagctcctaaccttttggaactgtttctcaagattttttttctgaaacttagaatctatgctatgaattgtcccggactcgacaaatgcagcatctgaaatgtattttatgtctgttttctcatcgtaataactggaatcttctggtataccacaatctatactaacaaaacctgtaaagcacacgcacatgaaagccttttacaaagtatatatagacgtattcaatatctttaaggaactaaatcattgtctaaactctacctgattggtcttgagcacaaacaagaacaaggacaacaacaaagcttgcgaaagaaactagcggaagaaagttgaaattccccatcagtcacaattctcaatcaatttctcatagattcaaactaaaccttatatatgaaaagcttgttattttcagtcattcaataggcatgttgccaacatgtgaaccaccttccctgaaagcatatatatactataagccaaaagggtattttgtgattttataagagtttcttcaatataatgtcaacgacttacgaaagtgtattcacaacaatttccaaaccggaaaagtggtggggaatagtgaaggagattcagattattgtttttggattcataacttccactatttcctggcttccacaacatatattaaacgagtcatcattattcccttttaacacaagaactaaaacaagtatttggcttcatctcaataaatcaatgtacaaaaatatttaagaaattgaggtcaatttctttcatgagttttcctctacacatttagacctaaccacacctcgattgaaaacagaaagttttattctttatccttttactctaaaacaatatacatttcataatgtatttacagagctgactcaaacaaatgtaaaacaatatacatttcataatgtatttacagagctgactcaaacaaatgagagaacacaacctcacatctctgacaacagattactgagtttccgaagctccttaagtgctgttgtagcagtgacttgtcccttttcgatcaaattggttttagctaagttccctatcaatcctgccggaaccagacaaggttcttgttggaaaaccaactcaattgcctgaaaataaaatagactaaaatcatcagaacatttgagcttgtaaggcggtaaagaattgtcatggaaatggcaaaatatctttgttacaataatcctttaccactggaggcaagaaactaacttactagttaccttcaggaccatacgaaagatacatttaccagttcgataacccattttactgtctttgtacttatctttttataaatgctggtaaccgctgaaacacgatgaatatgagaactgagaagttacctcaatgtgtttgagcatggactggccaaggttcttcagagtcttcctcagattctgacttgagtctccagaagacaaagcttgggggtgggattcagaatagcaacctatttggttctttttaattttaacatcattggtctttgtggcatcagaagcttttctatgagaagtctcctcacttgacaaagtgcgtttaagcttccgaaaccactgaactattccatgtaaaagcttgtactctttagttatgcccacagatttatcggtggagacgtcttcatcagactgagttactggatactcatttctcctatggggagatacagaaagaggtgaatttacacttgtttgttgatctttatcgttttccgaaccggtacagcaatctaaatattttccactgtaatttgaatctatggcaggactgattggatcagaggagacagatgaattctcttcactaattgaaactatgcttttgtcgtcttcatcgggaagcaaatttgagccagcactgctaactgaatcgttttcaattttggttgaacatctgacaggactggttgggtctaaggagacgaatgaactctcctcacttggtgaacttccacttactatactctcttcatctgcagaatggaattccataatgttttcctcagtttcttgaggatgaatgttctccttgttcacagtcacatgacaatcaacattgagctgctcagacgaatcttcaagcaaactttgtgtcactggagatgagtttgctttccgttccccaattcctaacttatgatgtgatagatcaatcactgctcggaaaagttttgtcacattcaaccacctctttttcttctgtgtaggaggagtctgtttctccaaacaaattttattttcttcttcctcggctttgtgtagaactctccatttcttctcccaatagctttcaggagcgataatcaaaggagatctaggtgaagtggagcaacttttagttcttgcaggtacaaaattgctctggtcgaaaacaccattaattgacagagctgataacatatcagtatccaaaaccaaagcttgtaacaacttggccttctgtattatcttattcaggtcaatgttctctggaaaatttaatagtctttgtagacagcatgttgcattttcagtagaaagcaaggaagatcttaaatataatatcattgaaacagtcattcccaagactaaggttccccgaggacaatcaaagatcctgaagttctgatttctactatcctcatccgttcttgcactattatctgccaaaattatctcatcccacactaacaagagatcctgaagcaaaaattctcttccaaacaaaactctcaaccaacgaagaccaaagtactggggttcaactccaagttcaactagatgactgtgcagagatgaatccacaacagccaaaatacgataaaatgcactacatgcttcaagaactggagttaacccggtgtgggaaccgctggctggagagtaactaaagaagctcgccatggcgaagcaaccatgaatcccactcattaaagcatcaaacatacagtaagcatcatgttccatgaatttttcagacaagacaataccaagttcactttctgtcccataagaatcagtcaacatcactagggactggacttcaggatcaagctcatctagactattaaaattctttgaatgtccttgggaaccaatcccattgtccactgagtccataaacttattgaaatcaaaggtataagtgatatctctttccatgaaagataaactatcaaatctatcggtaaagtaatcttcatagcttttacgcacttcagaaagacgcatgatatcaacatgaagtacataaaggaggggtgccaaaagctcgtgcattcctgcaaaaagatgagaaaaagcacatgatacaaaagcaattgaactcttagcagaaagtacttgttaagagaattagcatgtatcagcaaagctcatttcaatagccatttcactaatcagatagtatgtaatttcttctttgtgtttgccttcacttgtagttgaaaaagcaagaaacaacaagcatgagacagaccaataaattgcagctaacagtaacaacaaagaaaggtgccaaacatgtaccttgcctatacccatactcaggatgcttaaggcaccacaacaatagaatgcgtcttagcatgccttggtatctcggcgtttgaaaataacaccagtgttctggatataacctcgacaagtcttgatcaagtgttttctccaactcagcgttacgaaagaattgaccccatgtgctatctgcgtagaaatgataactcaaagtctcaagacatcactaaggaacacaaacatcatagaaatacgttgatatacatgtaacctcaatactcataactgccttaaactagacaaataagcttaaacacataggaactaacaatttaacttttaagttttcgaactacatgtgttgaacaatgattaagaatttaagacctccaattagccaaacaaacatatctgaccactctagagacaatgtatatgctttgcagatgagctcattcaaatagcagttgatgttgatgaaattagatatgctatgaacaaaggaaacaaaagcttactcggattttgcgacaaagggttgtcaatgataaaattcggggaactatcttcatgtttgagtacatgtggatccatcaaaagtcttctcctgagaagagcatatctacataacaaaacattgcactacacattattgataaagaaccattgatcattaacaaccatgtttttttatatgaggtttagggttttatgaacacacttccacaaaaagaggaaaatttaccaaaattcagaaatgtttaccttcggcgagaattggctgctgctctgcgaaattcatcgattgaagaagccaaagacggaagaactccgagattcacacgccaacgaactcctcttagattagcgaaacgacgatcttctctactcaaaaccaatgatcccgacggttcttgcaaagctggttcgatctccgacggagccatatagcttaatcctcttttgcttctctatcaattttaagttaaatcacacagctccgaggagataaataagcaaaactataaccaaacgataaacattgttaattcttcatgaaactacttacgatgaatgatgatgaaaatatgaattttgtctgttgcgtgagagattccaggcgcgaagagccgattgatgaagaagaacaagtagctaaatgctaattaaattaaaattgaattttgtcttgttctttttgttaattgtaacctaaaaaatgggtattaattattaaaataatgttgagaaaaaaatccaaaattaattagagcacaaaagagtcattccaggaatgttgagaaaaaaggtattaaatatcagtaatatattatcactgaaaaataaattatcacttaattgaaataccctataatcagatttttctttgataattaattaattgaccatctttttctctttttgcataattaaattgaccatctgttaattgcctatggatttatttttatttttatttttttgggaaacagttattttcttttttccaaagtaaaaccaacaaacaaatttgaaatatgtctcaaaaatatagggaatggaatgtaattttcatttcatgaacataaaacaaattgaatatagattgttaaatagaggggctcaaatgtaaaaacgttaagagttgaacaaaaagtaaagttgaaggtgacgacgaacccaaaccccacagcttcgtcagtcgccgccggtgactcaaccgaccacgcatgatcggtaagtaatttatcgcagttctgtatcaatttttcgattcagatgcgaaaagacttgatggcttctggctttgcatcaatttttgctctttatcatatacactgctcaacaacagtttcaatatgatctttgaacagtttacattactctgtatatgtaatgtctgtgtttcgttatatttttctaaattgacttgacttcgtgtgtatcactacttttaaaaagaggaatttgacgtgcgtctctgtgtctgtttctctatatgagtctgatatagagctactacagatgtttaatactcaatatagttgaaagagaaggaatcagctttaggaacccatgcaagccacttttagttgcaatctaccaacctgaagaaggtgctatccaagagtaaccgtgttgccattaatttaaggtattgctggagtgtatgaatcgatgataaaaaatattgcctggctctttttgataattctctgttctttctctttttaagagttttgaagatcccgtagcagcagttggaattgctaaacagttgcaagaacactgtaatgaggtttttagaatggtaaaagagacaaacagcaatgaacactgtaatgttccttctacttctgagactttgtactctcctcttggatatattcaaaggtgaagctagtctccatactggttctgaaatgttactcaatgacaatgtggattagccttaagatgactctgagaatggtgattatgatcctgaagcgaaggaagacggaaatagcattagtggcttgggaaatgctagcgatgaagatggcaacataacttcaactagcttgagctgctcttctataggattcggcagccgtgttttagaagaactgtcatacgtacacttggaaacagggtccccttaggtgaaaccaacaatgaagaaattgtatccatgccaagacaatggagagcagtggactatactatgtgagtactttttattttaatccctttatttgtttacgggagaaatacagtgatttgctcaaaaaaaagcaaagtagaagaaactccgtttttgagattctccataggacagtagtttacgcataaaaaagcatgccagtgttgtttattgactaaccaagttggtagtagtatccaatggtatgaagattcatatgatttgtcctccaattatttcgcaagactgataatgcagtgtgctaagttgtttcaccctttcatgctcacaatattaaccaccttctcgttatgtaatgattccagtttaatttttttgcaacactattggtaaactgttatagcttatgattttcttgtttatcattactcagaaacgactgtcttttagatgagcagatttttgaaggcgaagactgaggtctaagtaacagatacaaacttataactatgtgcaacggtattagagagacccggaaggagaaacaaccaaagagtaggaaagactctccgtagaagatgaaggtataagttctatttttcagacttcctagtggggttattatggtctaacatctgcttcctattttctaatctcttctgtagtttatataagatatctgattgctgcgtctaaaatgttctaactgctggcattatgtagctgtaagttcatcagatgtttgcaaaaccataaggggcattgttttcataaaatttggattttgaactaaagaaggtatccgtgaaaaagtacttgtttccaattgttataggtatccagcatccacagttagaacgtgttaggctataacatcctcattcatgtcgctaataaacattggtttttcagtattggttcttcataaaatctattgtcggtaatcatatcctgaattccattgtcaggtcagcaaatggtgcaacaacatctgacattgatgagtaagaaggtgggctctaagatatttaaataaggtctctctcaacaacctcactattataaggcactctgaaaattctggggctatagcaatcaacgaggacaagactgagattaatcaacttcgagattctgcaaacgagactgcttcactcagcaggcaagtgtctctttttcttccttcaaccgcagatatttttcttgtttaactcttagatgcaagcgaaaaacagaagttgaaattcgtgatagcgctgctctcatatttttcctgaccattgccattagtctcgcacatgcttttcgcaacttctaagatgtcacatctttgtcattgtctgagttttgatgagcttaaagcaacttctagaagacaaagagacaagaagaggacgagtttgaagcactaatggagaagctttgtttacacctgaggcactagccattgagttttaggcaagtcttcttgttttactcccaagaggactcaatagcagaggcttttgagcttctaggagaaatgttgttatgttgcagaatcatatgtatagttttgtattgtttgatcctcttggaataaacaagtctaagtcttgacacatgtagctttgaactttctgcaacagtgtaacacctatgtatgtaatatataataaaaatgccaaatattttgtggttcttcattgtgatttggttaacaaatattgaatctgtgaatcttctctactgatacagttcagattcagggatcagaatgcaagaaactaaaaaaagagacccattttacacaagaacaaaaaatctgagcggtttaattataaattagattttgaagttatatatataaatttttccacaggaaaatcaaagaaagttgttttgccagtgagttagagagagagagagcgatagagcgagagagagagagagcttgcgtcagtggaggagtcggaaacttgagaaacttgtttagaagaaacgccataacttggagaagcccaaacgaggattttgctcttgtgtatcttcgtagtccatctggtaaatgcgagattgttcttcttgttacgaaattgtttgtttgtgtatcgctgttcattgtattgtttgttgttttgtactggatttggctgtgctttgtgaggtatatgaaggtttctgcaattactggaattggattttggtgtttagtctccgatggtttgattgtgttctagggttttcataagaacggaagtctgttttgttgtgaatttctcagaaaggtaaaatttgttcagagattgttgagattaagacttgaattttagcataggaagagaaatttatgtctagcttgaatctaggttgaagggtgcatggtgctttaaacgactgaaagattaagatttctcagagattgagacttgaattttagaataggaagagaaatttgcttacttcacaaacgttttgtgcaacctggatttaagatgatatagatatgtagcttgaatctaggttgaagggcgcatgggtttccagattcgagtcactttagatccgaatttttgtagttttctaaacttgggtgctgaatttggatctgaatagcatccaagaacatcctggattactaacttactgaggattaaaggtttttctgaatggaaagtttgcattttatcactagttaggaatccgatttgtttttctcagtgagacttggagatgatgagaacagtatgtgtccgcttaatgcagtaccacaaaattattcaatcacgaatcaggagagcaaccttttgagcgcctgataagttactggagttagtttaaaacaatgggtgaaattgatccaaattagtgatcagaagataacttactgtttcttcgttatggtactcatggacttggttttcttgcattttgactctgttccatgttttgctttcgacatttaggtgatcagaaggatatgagcattaccattccagagggactacatgaagaagtcgaccaacagattcattggtacttagagaagtaatgtgctttcagatacttttttggtttctcaggaaaacatgttggtggaaagttcgttcagctcttctgttgaaactagtctactgaacgtatccgagtatcaagacccatttgctgcatatgattggacgtctcttgctgaatcttatcagatgatccacaaagttcccgaacagtctcaagtaagctttcttaaaaatgttccagtcactgatactatgaatcttgatgaatcaaaacatccaaaacatcaagaaagttgttcagagaaatctgttatgcataaggtatcgggaaaggctctgacttctcttgtgtatcgtcgaaggaagaggaccttaatacctgggggaactgaggaacataacctaggaaaaatcaggaaacaggatgattctcttgatgactctattgtctctttatataaccctgaagaaagcacaaaaaggaaaaatcgcttcaacaactgtcttgtctatagccggaaaaaaaggagaggggaatccagttgtacttttactggagaaactacgataaggggtgatgggcttgatgatgcttttgtttctgagcatgactgtggagaaaccaggagaagaggcaatcgatcagatgattgccttgtgtatagcaggaagaaaggtagagtgaaatttaatagttgtagttttagcaaacatgtcactggacgaaccaagataagctatgatcaagctgactcttctgcatgtagccaaatgggacagatagttaaagctgatagttctttaactagacctaagcctggagaaatcaagaaaagtggtcatcaacttgtttacagccaaagaaagcagttagtgaaatctaatgggagctttactgaaagtcatgttggaaaaaccaagagaaatggagatagatctgaggtcttacttacgtatagccggaggaagaagagtgggaaatctattggtgttcgggttaatggctttctagtttatacccggaagaagttaaaattcagaggaccttttgctagacgtgacctaagcgaaaccaagaaaaatggtgatcaacgttctactgtcagttctcgagaacttttagacgatacccaagttaccgaagtgacatgttcttctgatggaacaaatgacagctgctcctcattgaaatccagttctgaagttaattcaacttctagtaaatctcgggaagatgattgctattcctctgattctggggtgtctgagacagatacagatggtagtagcagccctttcaggcagtgtaaacattgtgataagccaggaactgtcgaaaagatgctaatttgtgatgaatgtgaagaagcatatcatacacgctgctgcggtgttcaaatgaaagacgttgcagagatagatgagtggctctgtccatcctgtttgaaaaatcagtcatcaaagaccaagactaaggggagaatttcacatgaacggaaatggagagttacagtaccatttgtaataggaattagaataggaaaaatgtttcaagcagatgttccagactggtcaggtccaacaatgaggtatgcactttgatattcaacagtcctttgaactattgtaatatcaaagatttcggtcaactggcaaataagtgttgttcctttcactaaaatgaatggctttgttttatttggttgacatacaaaagctttttgatctcaatgcagtgatacttcttttgtgggtgaaccattggaaattggccagtcagaatacatgcatgtaagctctcagtatagtggataagcataagtttatgttgccatagaattagctggatttcagatagctgccatccttctctctttgcaggatctcaagaaggccaagaatagtaagaaacaatgttctgcagtgaattggcttcaatgcagagaagaagatactaatggagttatctgcggaaagtggcgtaggtaagttaaacaattttgcaagttccattatttggttcatgctctcgtcttgaatgtaacttactttctatcgccttttcatcagacttcttaccaattaccaataccttcttccttgtctaaatatgcttaatttgactggatatacacagggcccctcgttcagaggtacaaaccaaagactgggaatgcttctgctgcttctcttgggatccatcacgtgctgactgtgccgtccctcaggtcagaaactctctttacaactatcttatttcccccaaagaaaaatccttccgaggatgaaaagttagcagccgtgagaggatgaaaagcattgaaaattattgaaccgtcttgcttcatctttctccatgaacatgtcatctgtattcttgaacagatatcttaatactcctaaaagagccatcgaagtttatacaatgcatcttgtgttcatttctgcaggaactggagacaagtgagatccttaaacaactcaagtacatcaagatggttcgttatttttctcattacttgtttgatctttcccgaccatattcctttctgatcaaggatctaaaactgaaacggtcggtttcctctgcagcttagacctcgatcagacgccaaaaagcgaaaactaggaccaaagggtcgaagcagatcacatatcaaaggaaaatcttgatggacacaatcaaaatgcatatgcttttggattagagagaccttagaaactagaaaggtaacatcagaaattttttgtgaagcgccaatgctttttgtactacttgaggatatcaagttgctttctaagtgactaattaggttcagatcttttgttagctcccaaaacaggagtagtgaatagaacgtttgtgttaagggacaggttctgggttaaatgtgagattcatcttgaatgcaacaaaatctataatcagcttccgggtcaaagcattctgctgagattagattcattcacggaaatgagtattacattcaaagcttggatcttggaaaatagtaaaagaaaaaaattacactctgagttacagaaaatctgttgcaaatttcacaaattgagaaaaacaatagcggcaaatcaccatccgtatttagcttgtgtctcggctttcgtgagcaatcctctagaacgtctctctgtcaactccgactccttgtgcttcatgtccatgaacaacgcagtgatttgatgcttcctcttgtgaagctttgacactttccctttagatgaagatgttaccggctgcaagacaaatttgaacaaagacatcatttaaaaagcaatacaaagcagtcaagtatattttcagtgaagaacacataataaaattggtatgataatcaaagtatctcttttcctataaatccacaaagaagtttatcagcaaaacagaaagaacttgacaacagaagccccaaacaagagataatcttcaactcatattcaactcatatgctctctaatgaaaatctcctaccagcaaagggtttagatatacagaaccagagaatgagaataataagagacattagagacaagacaacacccaagttattgcaaataaatttcgcaagaaaaaacttgacaatggcagccacaaacaggagacaaattcacaacgctctatactctatagtgttaccagttcaggcttttctaaagacaattcctaagttcttgcagccaaaaacgagtaagaagagtttagagagtaaacaaacctgatacgcaggtccaaaggcgattccagtagatttaacctgatcaactcgtggcctattcttcataagctcatcttgcttaacctcaacaatctctggcatctgattcctccctctccttcctctcctcgcaccactatccatagctacaaccgcttcaggcaatcccgtcattgcctcaaacccaccaccattccaagtattacctccatagctactaccatcatatcccacactactaccactaggaattgtttcgtatccaccatcataaccagtagcataatagttatctactccaacgatttgttccgtttcgctattactatgactaaacgattcatagctctggttttgttgatcactaatacctgaatccgtttgaggaaatgcaattgaaggtgtttctgtttcgagattcgatcttcgacctgatcctgatcccaatgaaggaagagcacctagtgtttgtgagcttttaggtgcaggcatggcggataagaacgatcttactgatgaatcgtgagatgcggaagcagattccatctgtttacgcttcttcctagctttctcttcttcttcgtcgtcttcgtcgtcaagattgctcggtctagggtttactggaagcctgatctggacgacacgtttcggaattgacgacggattgggattttttttccgtgaaattgaggatttgggaggagggagagatgagaggaaagaagaagattttcctcgagaggaagatgagcctaaatcaccatcttcggaggatttgagttctttaggttgaggaatagctgagaatagagacgaagcggaaggttctgaggattttacagtgaaagcttctcgacgtggttgaagatcttcttcttcgtccgacgaagcgtagctcgctaccagagagtccattgcagagagagagagagagagagagagagagaggaagacttagccgtcgccgagatatgtcggagtatttgtcttatttatatgggctttttcaggagagatttaagacccatttaaaagcccatttggaagtgatgtgaaaaaaaggttttgccaaatggcccaaatcccatactgtaatacattatgggtaaaaaatttcgttaaggtatataacgtatatagcctataagcataataaccccataaatacattatgggtaaaatcatatttctctctctttccaataagaaatcttattgcaattggtttctaaaaaaccggttcgaatccagggagaaagaaaaccggaatcaaaatgatatttctctctctttttattgtggtcaaaccggaatcacaaatcataaataataatcataagaaacgtgaatgggccttagattccgattcaagcccataaaagaaggcccagtttttgttattagattaggacaccggtttgatttctggaagagaaaaaaccggaatttcacatcgtctctaccaatctctccatctctctctctgctcgccgtcgccgttattattccgggcgatcaaaattaagacaagccattttgtaagtttttgcagctacttgagtgatacaatgcttgagagtaatgataaattttatgatgtgggtttctctcagaaccacaaaaattgacaaaatttgattttgtttcttcttcagataacttgtgaccagtccctgtttatgtgggtttcaatctttaacctcaagtcttctggattgaatcatttttgtacaagaaccaaggcttttcgatatttctggtgtaggaccttttctcttgcttcgttgtctgagaataactcaagattccagactgattctagtaggctaccttactctggatcacggtactatcatagttcaagtaagcattttggtgaagattttgtttcgattctgaagaatattgatgtcccaagggattgtgttgagactattagaaatgtgcttgtgaaacacaattggatacagaaatatgagagtgggtttagtactgagcttgatcaatacactgtcattagaattttggatgatttgtttgaggagactttggatgcatctattgttctatacttctttaggtggtcagagttgtggattggtgttgagcactcgagcaggtctatcagcaggatgattcatattttggtatctggaaatatgaattatagagctgtagatatgcttctctgtctggtgaagaaatgtagtggagaagaaaggtctttgtgtttagttatgaaggatctttttgaaactcgtattgatcgtagggttttagagactgtgtttagcatactgattgattgttgcattagagagagaaaggtaaacatggccctgaagctaacttacaaagtggaccagtttggcatctttccttcacgaggggtttgtatttcgttgcttaaggaaattctacgagttcatggcttggagttagctcgggaatttgttgagcacatgcttagtcgagggaggcatctaaatgctgctgtccttagcctattcataaggaagtattgctcggatggctattttgataaaggttgggaattgcttatgggaatgaaacactacggcatcagacctgatattgtggcatttacagtttttattgataaattgtgtaaggcagggtttctaaaagaagcgacttcggtattgtttaaactcaaactctttggtatctctcaggattctgtatccgtcagttctgttatcgacgggttctgtaaggtggggaaaccagaggaagccattaagctcattcattcttttcgtcttagaccaaacatttttgtgtacagtagctttctgtcaaatatatgttccacaggagacatgctcagagcttctaccatatttcaggagattttcgagttgggactccttcctgattgtgtttgttatactactatgattgatgggtattgtaatctaggcagaactgataaagcttttcaatacttcggggcgctgttgaaaagcgggaacccgccatccttgacaacatctacaatacttattggagcttgcagcaggtttggaagcataagtgatgcagaatctgtgtttcggaatatgaaaactgaaggtctcaaactggatgtcgtaacatataacaatctgatgcatgggtatgggaagacacatcagctgaataaagtttttgagcttattgatgagatgagatctgctggtatctctccagatgttgcaacctacaatattttgatacatagcatggttgttagaggatatatcgatgaagcaaatgaaattatcagtgagcttatccgacgaggctttgttcctagtacattagcattcacagatgtgattggtgggttctcgaagagaggggattttcaggaagcgtttattttgtggttctacatggctgatcttagaatgaaacctgatgttgtaacatgcagtgcattacttcatggctattgcaaagcgcagagaatggagaaagctattgttttgtttaataagttgcttgatgcggggttaaagccagatgttgttttgtataatacgctcatccatggatattgcagtgtaggagatattgagaaagcatgtgagttgattggtttgatggttcaaaggggaatgcttccaaatgagagtacccatcacgcacttgttttggggcttgagggaaagaggtttgtgaactcagaaacgcatgcatccatgctacttgaagaaattattgttgcaaaatggcacctgacatcgggaggatgataacagattacattctgcagcaccacttcttctttcgtcttaatgtccacctttttcagggttagatttagttctctccataagttttgttagccttgttatctgaccaggatatatcaatcaaccctttcacttctctctataagttttgttgttttgtttctttgctaaaatccatctgctttgttgcatcttgcagattatggcacttttttggccctttatttgctcctgtaataaagggctttcattatttcaagttccgtagtacaacctaatagtagtttggctcctgaacgtcttacttatggaaatgggcatccatacaatgtccaagcagtgcagtctcgagtgagtagaatgcagcagcacaaaactattaaaatgagcattaggagagaacccttttgtgtgcctgataactgagaagtcactggaatgagtataaaacaatgtgttggactaaaattacgtactgtgaaattgatcaaaactagtaatcagaagagaagttattgtttctttggtatggtagtcactggatttggttttcttgcatattgactctgttccatgttttatttccgacgtttaggagatcagaagcatatgaactctatcactccagagggactacgtctacatggagaagttgaccaaaagattcatcggtactttagaaaagtaatgtgctttcagctacttttttggcatgaaacttatcagatgatcccgaacagtctcaagtaagctttcttgaagctgttctagtcactgatgaatcaaaacaataagtaagttatccagagaatctgttattctcaaggtatcgtaaaaagccctgacttctcttgtgtattgtctaaggaaaaggagcttaaaacctgggggaactgcggaccttaacctaggaaaaacaagacaggaaacaggataagctggagaaatcaagaaaagtcatgtcgggaaaaccaagagcaatggagatagatctgatgtcttgcttacatatagccggaggaagatgagagggaaatcaattggtgttcgagttaatggctttctagtttatactcggaagaagttaaaattcagaggacattttgctagacatgacctaagcgaaaccaagaataatggtgatcaactttctattgtcagatctctagaactcgtagacgatacccaagttaccgaagtgacatgttcttttgatggaacaaatgacagctggttggtattccactgatgctggggtgtctgagacagatacagacaagtagtagcagccctttcaggcagtgtaaacattgtgatatgccaggaactatcgaaaatatgttaatttgtaatgactgaggtatgcacttcgataatcaaaagtcctttgcatttttgagtcctattgtaatatcgaatatatgtctcttgttaattagtattgttcctttacccattcaaagcttgaatcgaggaacatagtaaatgaaaaaaaaatcacacattgagttacagaaaatatttctttagcaaatttggaagaaacaatatcaacatatcaccatatgtatttaacttgtgtatcagtcaatatactttatacctagagacaacttaatgtacaatatcagcaaatcaccatctgtatttagcttgtgtatcagtcaatatactctctacctagagacaacttcatgtaccgtatcagcaaatcatcatccgtaactgcagtgatttgatgcttccttgtgaagctttgacaaattcccttttgatgaagatgttgtcggctgcaagacaaatgtgaacaaagactgcatttaaaacataatatacaaaattttcaagtcttttctacaatatatttcgtaagatatcaagtggctcaattcctacacaaataaataatgcagcaaaactacacaatgaaagcccaaacaagagacaatctgcaaatcctattctattttctctccggcttacctatatgttttctagtagaattctcctacaagcaaatgatttaaaattcataaatcaaatgtaagagaccctaccaacaactccaaataaattttgcaacaagacaaaacaaagttaacaatggcagagtatagaaaggtaaactaaactcacatctatctcctccaaacccaaaagaaccaccctctcgtttcttttctggaagcattttcttttcttctaggagaagcatcctctttctcatgtcacagttttcttcttccaacaactttattttctttctcatatctaagtgttctttaccaaaccataaaacagtttcttcaaatctctagtttgtgtgagtcttcttatgtgtatttgacgtttcacaagatctgaaagtatacaataaatattgtccataggtatcatgtgttaaatttcaaaaaacaaaaagtttctaatatcaacaatactaacctgatacgatatagcccatgaatccagtgaaagaagtcactgcaaaaaaggcatgaatacgcgaattatttttaggagaatatgaggagaaaaatcccaattatggatatatatatatagatatatcttttagatgattatggattcctaaaaaaacatagaaatgtataggtacataagagatacttatagcatccgactcaaaataaattgtatatatggcatcagactcaacatagttgattaacactatttcgatcaatcttgattttggctaaagtttggaaatacatatactttattttctttttaaaaattgttcaaattgaatttatcacggtacaaaagttggtagacaaaaaagagggaaaaatttgtacatgttaaaataagcctatcggcggataaactaagcactaaagttgtaagcccttgtgtattaggatttctttgcaaataaatcactataaataaaaaaaaattatgtgatcaaaccgagctatagctagattggaccaagtaagccgaaaacggtaagtcaaatttgtgcttttgctaaaccaataaatcaaattgactgaatattattttgggattaaaacgaaactaaaccggtatcaaactaaaatacgttatataatccctttctcttaaacttatcacacacaatctgatggacaaaaagaaaaaacttatcactattgccgatattttaaattaaaattgaacccaactcaaatttgtgcttggctaaatcggaactcaaattgaaatcgatctgcatatattcaaattaattaaggattaaaccgaaagtaaatcgatatcaactcaaaattggttattgattagtctgtttgtttgtttgtcgcttgcggttgcggcaaacactaccgcaggttgttcgttttgtcgtcgtcgacgctgccgcaacttctatcgcagtcgcattgtctaagttttctgttttgattatcgaaattgtagtaacaaagaccactttttttggactgttcaccattgtctaagttttcttatttatgtgaattaattgatctttttctgttctattaattttttatataatctttacaagtactttaattgttgataaatactttcttttcttttttttgatcaaatgataaatactttataaaattttagtggtgcataggtttaggggggagcagtgcaagaaccagaggcccataaccaaaagggggcacacacatttattttttctttgaaaacatactcaataaaaacaaatttgtgtaaatataagagaaaagaagaaaaataatattaaaaagaggttcatatatatttgcatttctttaaagcctaacgtaattcttctctttataaatttgttgtgtccaaattagatgttgatttactttagaccaacaattgcaaaatatttattgatttatggggtcaaatctcttttgcaaaatgatattgttgctttattttttgtaaatgatgttttctttatgtttattcttgtaaaaaaattatttcaatatataagggtccagttttttttggccccagagcctagcatatgcttgagccgacattggctgtacttagactattcataagcagaatcgctctgatggctattttgattaaggttgggaatcacttatggggatgaaacactatggcatcagacctgatacgtacttctgtttccgataattctgttatcgactatagtgaagtggtttgtgtatagtaggaaaaaaaaagtagatgaaatttaatagttgtagttttagcaaacatgtaactggaggttttaattcgatttttttttccaatttggagattttatattagaacaaaccaagttgaaggttttgggaaaatgtctaaatatggagattttcatctgggattctgccttttatatattacatacgactataacacctgatcataacttaaatttacctaattacatgattaatttcttcatttagttcacacagtatataaacctaaaacttaaaacttaattagttttatttgagaattcctcatgattatagtctattgatgattattttttgaaagtcctttaatattacttgttcagtaatgaatatataaagtgtttgatcaataaagataattcatttgaaaccaaaaaaacaaaggattttcatttgacttccaacactacgtggccttcaaaatataaaagaaaagtggcaatagatataaatatgcttacgagaatttactttttcaatatcttgttcagtaattatgtcttgtataaaagtggaattatgtcttgtttacgagaaactggggttcgagcaaatttgggtaagagacgagttatggataatatacattgagtatataggcgtagaaagatttttctctctttgaaaactcatatggtttataagaggagaaggttacatgttgtgtgtttacatatctagaatgacatgctatgtatgagttatatctgtcttcatagatgacattggattatttatgtaaaccaaatcatatagatattgttttcattaaactaaacattcaatcgattttttttttttttttaacacaacctaaacaagcgattaacttgttcatttagtacactaaacttttaagtttccctttaattcacatatatctcgacaacatgtaacacttaattaatcatcatcgccggtgatttccacaactctcacgttacgattctcctcaatctccggcagctgtggcggcgacgaagaagcatctttctcaacgaacacgacaagaaactcgtcctccatccacgccgtgacctgatccgtcaaggcgttgttaggaagcttaaatctgctcatgaacttgttgtcgccagtacagatctgaagatatccttcttcatctacgaacgcaatcacttcgtcttgatccactcccggaagatacgctttgaaaacgtgagccgtcggagtctcggtccaattgagctgcgtattgacggtggatgatgaagtttgtgggaatatttctcgagaaagtgagggaaagtggtgagaaagaaagagagctggtgatgggaaatcaagaaaggtgttcatgagttcaaatggttcccagattctatcgccgggagatagtctccggcgattgctgatcggaatcatcgacatcttcttcttctctattcttagaaagtaacagaagctgagttataaatcttgatcttcttactcaagagaattctagagttttcttgagagtgacgtttgtgatgattatgaagcacagtaactgggcctagcgtggaagcataaagcccaatagaaaaggcctttttcttttttttcttcttattcccggaatccgacaatgttcaaagtgtgtagtagattgatgaagaaaaccagtgtcattttggtagataatcgtatggaggaattttttcttgcaaaagtgatatatatggtggaaaaatatatatgtaaacatagatgtttattgctcttccgcatttgtgttaaacaaatagtgtaacaatatcaaacagtttttttgtttcgtccattcgattgataaagacaaagatcattacgcattgcgaaaatcgaacattttgattaaagactacaaaacagaacacctgacattaactactactcgagggacgaatcgatctttcgtacggttcttgagaaagcaagaatgtcctctggcttgctagcgccatggtcgttgtctttgttgccatcatcgtcgttggaacctctgtcttccactatagattcacgaatgatggttcttatcgtgttgtcttcggcttttcccgcctcgttggtgacgactctctttttctggtctttctccattctctctttcgttgcctccatatctctctcgttctcttttctctagctggtgcaatattttcttgaaagacttctcgacacgagatttgagaacacgtggcacgttagagatgataacgtggtcgtgttcgatgtgaaggtgttttcttcgactgatacgtggagggatgagtcaaacgaagagaaaatgttacaagaaagcccctcagaccatccttatcaatggactcttacatacaattctaaacaattttgatatacaaaataatgtttaaatattaaaaagattcttacaaaagtaaaaaataaagaagaaaactcttaactaagagccattttccatctcttaagcacactttttaattttttaattcttattttgtttaatataatattttgatattgttaacaatctattgataaggatgctctcaaacgagtgatgtatttcgaaaatgaccttttgaacgatcgttaaaatgagtttcattcaactttcatctaaacaaatcgttttgaatctacgtgtgaaagttggtatccgtttagaaaacaaccggactgctaacgtttaactcaaaccggttttaatattttccaccaaaagaatttgttttagcttctttgtagtatttataatggagtaactcaaatgaatttgacgtttattaagcttaattagggttaatcatttagggaagcaattttgatactattttgccaatggggtggtacttaaaatggagcttgtgaaatttttggccatgaatggatgttcttttccagttcagtttttggatttggtttttattttttttaattattttaaacaaaatttagattttagttttagattttgttattagatatttgtttttttttaaaaaaaaattggttttgaagaaaataatgtagttaaagtaaaaaatagattccttaaattatagaagaactaaaaatctaaaatcttttaacgggagattatatcaaaactctttcttaaactccaaggaaacaaattttacaaacttgattggtatgacaattattttttgaagaatgaaaaccaataactctgtcaaaaattgcaaaacattcaattcgtgtattcacacttatgaaaaactccacgaacaaagctaacaaagttgctttactttttagttacgtcaatttaagttgatactatatatttttaaaaatatatattcgtatagttagttgatatattcgtatactaacttgatctcactcacctcgaacattatcggttttggtgggatttgaaagtgaatagagatgaatgagatcatgaactttattttacaaaaatcagagtaagaataacaaaatttggtaacgggtacatatgattagttaccgattaaagagattgacgtgtcaactatattatcaataggaatattcgtaatttttttactcaagttccagttcaatgctttttgatagttcttttttaataactagtgagaacaatccttttgatttggtcaaaagatgccaataaaacattaaacactgatagaaagaaaagagtaatttgcgttagtatttgactttttttataatcaggtggttaagaaactttgaccactaataaaatgccatacttctttaattacctaattttattaatggcttggatatttggattaatttaaattgattacttccttttaaaactctccaccgtacatgcatctcctatttccgtacacacacatttgttataccatattaagcttttaaactctctttcttctctgatcattctcttcttcttcaaacaacatatacataaaatcatacacacacgtatatatatatatatatatagatagtgtgaaagatgatatgcgaggaggcatatcatcagcaaccgcaaatacaaaaggaacaaatgatgacgatggatcaacgtaataatcatcaacggaagagatcaccattatcctcaccatcatctccatcatcaccatcgtctccatcatcaccaaagtcaccatcattcaataataatgaggaagagaggctagaggttgtgaatttgagtgggatggcattggagtctctccctaatccttcactcaatttagctcagatttgcaagcttgatctctccaataatcatcttcaggttcatatctaaatacacacatatacacatgagacatttctcttgcatgattcaataccatatcataagcatgtacgttcatattctagtgctaatttgtcgttttggataatactattaattgggaacatattgactaattaattttgataggatattctgtttacttttggttcagtctcaatctttgtcgtccgatccaaatgtcaatccctagtcaaatttgttataatttttccaacaaattttgatgctattttggatgtgacacagaccataccagaatcactaacagcgagactactcaacttgatagcattagatgttcactcaaatcagatcaaagctcttccaaactccattggttgtctctctaagctcaagactctcaatgtctccggcaactttcttgtatcctttcccaaatctatccaacattgcaggtttcaccccataacttccacaaagctctcacaagacaacactcccaacaaagcataattcccatttttgttctctttttttttttttcaggtcattggaagaactaaatgcaaacttcaacaaactaatcagattaccagactccattggttttgaactcaccaatctaaggaagctctctatcaactccaacaagctaattagtcttccaatctccattactcacctcacatctctccgtgtccttgacgcccgtctcaactgcctcatgattctaccggatgatctcgagaatctcatcaacctcgagatcctcaatgtcagccagaatttccagtatctttccgctcttccatcttccattggccttttaatgaacctcattgagctcgatgttagctacaacaagatcactgtcttgccagagtccattggctgcatgagacggttaaggaagctgagtgttgaaggaaacccgcttgtgtcgccacccatagaggtgatggagcagaatttgcaggtggtgagagagtatctgacacagaagatgaatggtggctcaccaaggagtcccagcaaaaagaagtcatggggattcggtaaattggtgaagtatgggacgttcaatggcggatcaagaagctggaatagagaggagagagaagggttcatcatgcctgagtaccgctccatcgacagtcttgcttcgcctaggtattctggaatgttctctccacgtcgtctcttttctccaagaacctatttcagcagataaaacagacaacagccaagagttttcacattcctataagccatgtacacctctgtagcatcaaggccaaaacaatccaattttgtctatcattttaatagtagcatcaaaaaatgtgtaaagagtatttcaatatgttcatcagattctagaattcttgtttttttcatatctatgcttgcaccaggtccctatttgactatttctatacacaccaaattttgttcacgaataaagtttgttctttcagaaaacctacccccttctctgcctgatcctttagctataagcaaaagacttaagatttatacagacaaagaaagcaatacttaaaacctaacatacaaggcctcacattctttaaccgtctagaactcactcagttacatactctgacaattgctgagaggaatcaacaatctttattcctctcttcaatttcacatatagtttgatgatcaaaattcaaaacaatgtacgtcatataactaagtatcaaaactcaattcatagccaaaggagaatattttcactttacaaactcctagttcctctactacaagttaagtctgtctgaagattgaagtccggcacacgaatccacttaaagatctcaacttttcttgacttctgactatagaatttgcacaatgaggcaaagagaactcaattgaacaataattactaggactttaattcaaatccaaagagacatgcttcaaattggtgactacggaactgagttcgaacactaaaaaagacacaacttttcaagtgatcactactcttataagtcaagttcccattacacataatctaaaagctaataaagataaccaggaatcttaatacggataaagagcatactcatgacataagcgatcacaatggaggagacaccagcaacagcataagaagctttaacactcttggctttgttcttatcaagcgctaaatcaagcataacaatcccaattccaccgagaacgaacatgaatccagaagagagaccttcaatgatatattgcccgttaacccgacccgacataaacacaacgggtcgaatagttccagtagtcggatcctgagttgatccgatacccggaggctcgacaattacgtcgtagacgaaaccggagactactaaaaagtaggtaaggagaattagagcgtatacagtcatcggagaaggaagcgtgaacgatggaatcttcagacggaggcgcggtggtcggagaaatgagaatgggacgattcggagaaggtggaatattggatccattgaggattgatctgaaccgtctgatacactggagccggtttgcgaatcggatcttggagccattttatcgaatcctccttggatctcttcctctctcaccctatcgacggaatcaggaagagtttcagaattggctttgtttggaaactaggataaagctatccattacacgaataaacaaacgtctatcaatttccttctttcgattttatccccagaagttatcaaagatgcaaaagagaccactttagttctaacttgtattaaattagaaaattcagactattttcgtaattttgttagaaatttgagactatcttcgtaattttctcacaaaatttcttagtttggacgttctgccgttttaatgtataacaaacgacacgtagttctatcttagattgaaaatccggcaagatttggttgctttaacgaaagtatctatctcccgtcatcttgcttcctcgttaaaggaagcaaaagagtttgatcccgtcgtcgagctttcgaactttcgatcttcagcttttctcaggtgacagacgtcgttgtgattcaaatctttttccggtgaacttaatttcggaggctattcgatggcatacgtcgaccatgcgttctcgatatcggacgaagacctaatgattgggacttcgtacaccgtcagtaatcgaccaccggtgaaggagatctcactcgcggtgggtctactcgtattcggaaccctaggaattgttttaggtttcttcatggcgtataaccgtgttggtggtgatcgaggtcacggtacgaattacgattccttattaatcaaaattgttactaattttgcccttgtgtcttcgtgattagcttagattgaggaaaattagtgacaatctgggtgatttcttattggtaggtctatgattaatgtttagacttgttagtttcctgaagaaacctagtttgggagatttagggaatatcttgaggatttgagtaaactgcctagtgttggacttggtctaggtctttgtttgtaagctttcttgggatcgattaggagatgttaagtgaatcatgttgaacactctttctcaaacaaatctccagaggcatgagagatttggtttgctctctctgataattccccagtggttagttagcttcagtggtgcttgtcgtcagattttagtcgaaatcaaactaatgattactgagaactcactcattgcttgtttgattgttggtggtgaaacagggattttcttcattgtactgggatgtctactgtttatcccggggttttactatacacggattgcatattacgcttacaaaggatacaaaggtttctctttctcaaatataccatccgtttaagccttatgacttggtgtctcttctctcttactcaatgtataggttgtttacgtttttattacttgacttatgctctttagtgtgattttacatgacttgaatgagccatgtttgatacatatgtatctcttttggtttctccttctctatgttagatcattagtcttcgataaccatccttgtataatgtagaccaagctaatcacatgtgatgtatgtttgatatatatcctctgttggtttctccttctctatgttagatcattagtcttcgataaccatccttgtaaaatgctaatggtccctcttcaaagctagagaagtttagaacttaaaacaattgattttgggtagtaatgactacctctttggtttttcatgatataaatacttggagtacacctccttgcaactggaattacaactgaaacaaacgtggagtacaactcctacaaagttgggaataatggaaattggagtcgtggaagactccactcttattgcaactgaattcaaatgacttagttttggacaattgtactttggattgggccagagagtccttatgggctttctcctttcttcttcgcttctgcacttatcaaatgaagaccaagctaatcacatgtgatgtaattggtgtgtttagactataaagtagaacgggaaataacaagaatggttcagtatagtatactagaaaaattggctaattcataacccccctccccccaaacccacagtttaactatgttcagtctcctgagtatatgaccgtgctaaagcatacctcctgactcctactcatatttttgaatttcgtacctaatcttttgtttttggtggaatacaggaggaggcaatgacttggttgtatcataactcggttctcttcttctttctttcgacaaaccctatgttcgagtgatgaaaatcggtttgagtgaaaaaagatgaacaagtagtgtagttatttagggttttaaaactcgggtacacatcaacttaaaattttaattttacaaaaacgactaccgctgaccttttcttgtatttggattttacaacgcatattgtcacgaaattctgtttgagttaattaataaagatatgccaaacaattgatgaaattttctttatttcgtaaaaatgtgatttctttaccatattaattactatatctttactgttcaaaatccaaattattacatgtattataattcttgattactttttctactttttgggaaaattattacacttatttcattggtataagtgaaatgaaaaaaaaaaatctatatcaatgaataatatacactttaaacggatatcatttgctttaaattaataatttatttttattttcttattaaagtatttaaaagtatctaattatagttcatagatttgttcaatttcttgtgcatgacttttctttaatatatatatatatatatatatatatatatatatatatatatttattaaagtatttaacttaatcatctataaaccaactagaaacgatttagaaaatatcaaaacattttggataatcttattatgatcggtcgaataatggccaatttaattgtgctatacattctagtcatagaagctatgatagtcataggaagcgagtcttctgattctcgtgatgctgaaataaatcgactcttgaagaaactcaacaaacctttccttaaatccatcaaggtttatttaatttgtggatttacacaaaagaatacagttaacaacacttgtttttaattttcgattgctcttacctctttagttgtgtatgttttgtaattcttaaatagagtccagatggagatatcatagattgtgttcatatgaaaaatcatcccatttatgatcatcctttattcaaaaaccacaccattcaggttcatactttttgttttatcagtattgttttagtgtacaatgttatatgcattttgtttatggtttattcatattttattcaaaaattacaacattcaaaaactgatactaacacaaaaattaatgaatccgttgaaaatgttttaactatatacatttgactttgtcatttttatctaatctattactttaattctaacaattttgtgttgtagatgagaccaacttcttacccagaaggatggagcaataaagattcagataacgaaaaacataaaatggttcctcaactttggacaatcaatggaaaatgtccaaaaaatagtattcccatcagaagaacgagaaaagaagatattttacgagcaaaatcaattgaaaggtttgggaaaaaagatcccaacaatatccatcaacataaaccaacgaatccaactaataacgacggtacacatgaggtgcatatatcattcatcatttttccttttatgagtatatatgtttttatagtttcttacatatttacatacttaatatacagtatgccatacttaaagtgggagaaaattctcctcgagctaaattttatggaacccaaacgcttataaatgtgtggaagccttttgtacaacatagaaatgaatttagcttatcacaaatatggatgtcggctggaagttataggccctgtttgtttgatcatttggaatttgcatccaaatgatccatccaaataacccatttgaatgattcatcttaatgatgtttgtttgatcatctgctaattcatctaaatgcatcatttagatggagctttgtttgtttgatcatttggatgaatcattcactttctcatatatatataaatgactaaaataccctctgttaagtaacaagtcaattgctacattcttatattaatcaaagtaaagtttgaaaaagagagtttggttttgtgcttcaaatcttgtcgtcgttgatcatttcccatttcaaacttcaatttcagattactaaacctgtaaagaagagcaataacctgaatcatcaccaattctccaataagagcaaacatgcatattggctagtacttacctaacgattcaaccatgacacattctcaaaagtgattcaatcatgacacaaactagaatcagaaaccaaagtatggtcttatgcatattaccaaaccacaacactaaagcaaacaacatcaagagacactagaattgcagctgctcaagaatacaacaactagattgagagagagactattcaacaatgagctaaaaccagaaacatagtccattcagctgtcattatgtcaagctattcaattgaatcaagtctaatccaaactaatgaacactatgttcaacgaattacttgtcagctgtcactactagtcacaaaatttaaaacgtgtgtaatcaaccaacttatgtagtgacgtgaccattcagctgtcactattagtcacaaaatttaaaaccaagacagaaacagacaatagcataagacagagacagtcaatagcataagacagagagatggaacctgttaatatgggagtcttgttcctttggccatctctgtagtgatggaatctcgtatattctccattactctgtcaccagtaggcacatatggaacatgcccatcatcagacattcttatgctcccatttggatagtaaccaagaccggttctgttgtgagtcagcttcttaaaaccttcatactgcttcttacaagtagtaaacttgatcccaaattttctccatgtatgtctttccccataaacctcataaaatctatctataatagtctgtctcccagcatcattgacattctgattcctaatatttcctttaagcttctcctcaattcttagttcaaggtagaaacgagtttgctcatcattccacgcaagattcttagttgatcatgtgtttttgtacaaaatcagtctaaattacagaaaatattacagtaaatctaagtttagaggagaatatactcacatcggtaccattgatagttgtcatctgtagcacacaatgaaaacaaacgttttgtagttgtgtttgaacaagatcaaagataccaaacaaataaaacaaagatcagagataacaaagcaaacaatacacaacttatgataacaaagcaaagcaaataaaacgtgtacaaagatcagagataacaaagcaaagcaaagaaaaactatttgatattgaacaatcatgagatattattcttgactatttctacagtatttgaactcaaaccttagacgaactcatgctactactacagaaagccaaatgcaaccactaattaatactatttaatatcgaaagcaatatatttacagaggacgtactcgagaaaccaaagctttcttacttggagacaaaacttgctgaaacaaggactgaagagaaaaaatcttttataagatgaaattctcccttataaataagcagttataagctataaacacaaaaacaattccactttggatgcaattgaacacgtcaaggaggcagctgaggtttgtaactatggatggtcaatctaaagagggctaaagtgcagatgctaaagtggcagcaccaaatggttatgttgctcctaatgtagagacaacaaagcctcttaagagcaaatcgaagactcaaaagcaacacaaagcaagcaaagcaacacaaagcaatataaggaacacaagccgtaaactaaagctaatcgaagaatcaaaagcaacacaaagcaaagtaaagcaaacccacaattaaacaatgtaaccatggtggatcaaacccaagaacaagtgattgcaacaaggatacaaagagaaacaacgtgagagacatggagcgagagagaggaagcgagagagagagagagagagagagagagagagagagagagagagagagagagagagagagagagagagagagagagagagagagagagagagagagagagagagagagagagagagagagagagagagagagagagagagagagagagagagagagagagagagagagagagaaacacaaacctgctacactggcgaagaatcggcgacggcgatttgtgaagaatcggcgacggcgagatcaccggcgaagaatcagcatcattgacggctatgaatctcaattttgagtgttttgtgtcgaggagagggtgaagaagagatgtgattttgggtgtaattccatatattagattagggtattatttttgttataattttggctgaatcagcttcagcagaatgaacaaatcaaactcagtcagattttttttattttttggatgaatttagaaaaaagcattcaactgaatcattcgaatgatctattaaaacatgaaaaacaaacaacaattttcatcttcattgagatggttcatccaaatggacaaacaaacaggaccatagtactcaacttgaaaccattgaagctggttggcaggttttagtctttcttgcaatatttgcatgtttatatataaatatattctaattttcttatattttattcattgttttgttattgattaggtgtgcactgtactttataatgatactaaccctcgatactttgtctactggactgtgagttaacttccaaagtattgttaaattttctttgttttttttgttgacaaaaaatctcctaactattttttgttatgtgtgttgtttgattacgtgaaaacagaatgattcatatacacaacatggttgctataacaatctttgctccggctttgttgttgtcaaccaagcatttgctctaggcgcggccgttcctgaagtttctatccgtgatggtctacaatacgaaattttcacaagtatatggaaggtaaaaataagggctctttttcatcatataatttcaagaaatactcttttatatatagaaactgaaactaaatatgttctattgttataggatcgtagttcaggaaattggtggttgaaatttggtactcatttaattgttggatattggccttcttcattgttcaatcgcttaggagatgctgcgagccaagttcattggggaggcgaaatagtaaacgtaaaggagaacaaccaacacacgtcaacacaaatgggaagtgggtcgtttgcaataaatggatttagaaaggctagttattttaggaatattttagtacttgatgaaaacaatactacgaagcaacctgtaggtgcttctacatctgagacggaaggaagttgttatgacatcaggtatcgcactgatcaagcatggggaagtttcttttactatggtggtcctggtcgaagtcctttttgtgcttgattagatatgcatcttatatatgtaaaatattgtgtatcaatctatctatgtcagttatcaccagcatatagtattatatgtggtggtgaaaataaagtttaagatatcattatagttttgagactataactagtgtaagctagtgtaaaaaaaaaaaaaaaaaaagaaaaaaaaaaaaaaaaaaaaaaaactagtgtaagccaaattcatcaatagggttaaaaagatagtttaatggattgagtattgagttctcgaggaagttatattcttgtctaaagtgttatcacatttaacaaagtgaaacggcaacgttttggttgccacaagataaacaaaccatgtcgttttcgaattgtgaaaacagcacgtagttagaaaattcatcaatctgaaaaggaaaagggtttcaaactctctctaggcggtctccgaattagcaaattgaaattggcaaattgcaagagttttcgattcaacaatggtgtggtttcagtgcgatgattgtggcgagaatctgaagaagccaaggctaccgagacacatgagtatgtgcactgccaccaaggtacactaaaattgaaactctctgatgattctcttcttctcttaacctctctctgatgattattttcgaatcttctgaccatcacagttttcttgcattgactgtggaaacatgtttgggcaagttagtgttcactatcataatcaatgcatcaccgaagctgtaagtatttatttgccaattttgatcaatcttatgatgctaatcactaatggtttaagttttttagatttagttacgtttttttcttggtaaataggagaaatatggtccaatggtgcgatctaatggcgaaagttcgaaacaaaagcacgatttcgatataaatgccgagttgttcaacagtcaatggttttgtaggtactttacacacatctttagccttccttccattgtctgttaatggaggctttgttccaaacttagtcttgtttgtgtgtgttctcttgtggtgaggtacttaatattttctatttgcagcttatgtaatgcaactatgacctgcgagcaggattattttgcccatgtctatgggaagaaacaccaagagaaagcaaatgaggttgctgatatggactactcgaaacaacaatctgaacatccagcagttgacaagaacaatttaacacaacaacccgacttagatatatatgtcgggttatcaaacgactatccatggttctgtaggtaggtaatcttacattgtttaggacattattgggtaaacctagctcaaaatgtattgttgtttgtgtgttctcttgcggtgagattttatgaagacatgcattaaatatgatttatttcgttccagcttgtgtgacataaacgctaccagcgagcagactttgttagcacatgccaatggcaagaaacaccgagtgaaagttgaacgttttgatgctgaacaacagaaacgacaatcaacacaacattccacggtggataagaaggactactcaaaacaacagatcgaagtcgatataaatgtcgggttatccaattgttatccatggttttgtaggtaatctcttgatcacatatttcacctttccactaccattttctatatcacgttagaagaacggatatgcgcttttgatgtgagattagtgatctgttaattatggaataattgaggaggattgtctacaatttttaggagtataataatgtcgttttagaaaaaacctatctatttaactttggatttgtcaatgacttattgaaactttgtgtccttagtaagagtgttcacaaaatctacatgccacctgagttagttagtcgtaactaggataattctaagtaggatatgcatcagctattattgagtaaagtcgtgtatatggttggttttgcaccattggtatgggttcatggatttctctttgattctgtactgtaataaataaagaagatttctgtgtttgttcttaacatttccctttgggtgagatttcaagagttaatgctttgaatatatctatttggttccagcttgtgtaacgtgaaggctacatgccagcagaatttgctatcccatgccaatggcagaaaacaccgagaaaatgtcgaattgtttgatgctacacaacaacaacaattagaaaaaactacagtggataaaaaggatacaactgtcaatgcttcggatggtaattccgaacaaaagaaagtagatttgcttgtctcctcaggtgttgcaaatggatattcacaggctcacaaaaagagaaagctagagacctgcgatgaaacatggaaaagggaggtagttcaggccgaagaagcaaaaggagggggtgagcaaaagagtgaatcaaagaaagccaaaaagcaagacaaagagaagaagagaaagaaggacaagaagcagactaagtcagactctgatttcgagcatgacaaggaagatatcaagcagctgttggtagcttactcgaaggaagagcttgttaacctcatatacaagactgccgagaagggttctcgattgatctctgccatccttgagtcggctgaccgtgacatcgctcagcgcaatatatttgtgcgtggctttggatgggacacaacgcaagagaacctcaagacggcttttgagtcttatggggagatagaggagtgctcggtagtcatggacaaggacacgggaagaggtaaaggttacgggtttgtgatgttcaagacacggaagggagcgagagaggcattgaaaagaccggagaagaggatgtacaaccgcatcgtggtatgtaatctagcatcagagaagccgggcaaggctggaaaggagcaggatatggctgaaccagtgaatattgatctaaccaagatggctaatcaaagtgaagcagtcttgcccgggatcgaactgggtcgcggacatgtactcgagaagatgcaccaccaacaacaacagactatggacatgttcggacagaacatgcctttttatggatactctcatcagtttcctggttttgatcctatgtatggtgcattaagtggtaatcaaatgttagctggtctaccaaactatggtatgtttggctcgggtatgatgacgaaccaaggatcaatgttgccaccaccgaatcatttaggcatggcagggcaatattttggtgatggggaacaggcttggcatcagagatagctgagatcatttggtaaggctttgttatctctgatatattaatcaggcttccaattttcggttaggctaattactaatctggtatcttcaacctatattatacctggcatctatgtaccaaactaaaccagcttttttgggttttcgagttgtgtgaatatataccaaactaaaccagctttttggggtttgattcgttttgaattctatagttttctgtttgaattctggtttactcgatttggttcggtttataccaaaattaaatgccttgaattcccctggatgcattgctaattgcaataccagctctacaaacatcatgccgtctcatttctaaaaactaagaaaccttgtcgtttttagcgttccaaaacagcgcgttgtctgatacttgaataaacaaactctacattgaattagttcttctggaaggcttttaaaaccctagctggtaccaatcttaaacccctctccgattttgatttctgcttgaaattgttttccccgagatctcaatttcgataatcggaaaacgaaaaagatggtttggtttcaatgcgaagactgtggagagagtctgaagaagccaaaggtcccgtctcacttcaagatgtgcagagccaacaaggtctcactttcaaattttctctatggtaaaaatcgaaactttatgatgattgttgtgttaagtctctctttcgtgtgttgtattgtatcaatagttatcgtgcatcgattgtggagaaatgtttgggagagatactgtgcaaggacataaccaatgcattactgaagctgtaagtaaatggtttatgcattgtattgaacaaattgggttaagttctagatttttggctatgtcttggacttaagagattgaggaattgtttgtgtattgaatgtttttaggagaagtatggtccaaaagggcagtcaaagtcagctaatggaacacctgcaaagccaaaggacatctctaagcaagagcctgactttgatattaatgtcggcttatcaaaccgatatccatggttttgcaggtatttacatctttcaaactttccttccgttttccgctttagatacgaatgcataatgtattgaggttgttaggagaataagtttttgtgtggatttataacgctaatgtagacttttgttttagaatgtattgttgttttgtgtgtttgtcttgtgacgagatttttgtggacatggttttgagtattttgtctatttggttgcagtttatgtaacacaaaggctactagccagcagactttgcttgcccatgcggatgggaagaagcaccgaggaaaagctaaagccttccatgctaggcaacaacaagaacaatccacgactttggataacaaggatggaagtgaaaatgcgtctaatgttgattcagaacagaagaaagtagatttacctgcctcctcaggtgttgcgaatggagaatcgcatcctgagaaaaagagaaagctagagactttggatgaaacgagtgaaggcgaagaagcaaaaggaagtgatctaaagaaagcaaagaagcaggaccatgagaagaaaatcaattggaagaagttgatcacatcggctttgaagtctgtacgtatctttctgcatttcggtttcagtttagcttctttctagcaatgtgactacaaaatgtaacaaatctatgaatttgtattgatacagaacgaagataaaactttgaagatgaagaaactgaagaagctcgttctggaatctattgtggattcaggccgagacaaatctgagcttaaggcagagctagaactaaaggttagatatacctcatcagtctaattaatgtacaacaatctgttctgctgttgagagatcttcacagtagagtctttttgtttttctacaatcttacaggtgaatttgagctccagattcacagttgatgggaagtatgtgaaacttgtggctaaagattgaatctaattcttgagtccagcaacagtatcatgtctccgactgtcacagttttggcatatgattcattactattaatgtctgtaccaaatttggaattttggaatctcatcaaacattattcgtaacaactttataatatgcctcaggtgacatagttattatctccatagttctgttttgcagttcacggcgaaaagagatttttcgagaataaaaaaaaaaagacaagaaatgagttcggttttgtttcgtgagagacacattctatattttaaatacttagcccaatagacccaaaatgagtggacataatatcttcacgtctcacgagagcaacaagaccaccaaatcagtcagcaattcacaaactacacttaacgaaacataaaaaactgttagactcatactatttgtaataattgaatagatctccaatcatacttcaatgtcacaaataaatatgatattttgatctttgtataaatgaattatgatcctaccaaaattaacaatttatatgaacaatgttccacagagaatcacatgtataaacatgagttgcatcatcttagtatagcaacaacaagaaagcataatactacaaaagtaacatgaaactattcaaaattagatgccataatatttacaaagctaggagaacggctgtgttattcagcttcaacagtaagaagtgttcaattgtatagatcatttataacaattcatcaccaatcatagcaagtaatgtaactaggaaacaagacatctaattttttttaaacatgcctctcttagatcaacttacaagggcataagacaatagaaagaccacacaagatacatcaatatcaaacatccaaccttatgatatcaaaaagatcaaagcaaactcttcctttttttatctctaaacttgaactcatctttacctttacaaaaattcaacaacaaaggttacgagaaacacacacacaacataatatcatgatggtaaaagattgtatatgtattagacagtgacctgataatggagggagaaactgaattttattaaggaacataaaaatgtatgtacagagatgtaatggtcctgaggttacgaaaactacaaaacaaaacccaaagatgaaagaagaaaaagagcctccacttatatgtatacatatatcactacaacatcaccatcatcactcctttttcctttctttctttctttctgccacaacagcttcttacagccggaagttaactatcaacctagcttacccagcggatccaaatccagcatccatcacaaaagtacaaagagattcacccaagaaatcggagttataaaaagacgaaaaaagaagcctaagaagaagaagaagaagaagatgtagaaaagaatctatatgacctaattttctggagctaacatccgaataacccatttcctgtattggttattcgcccaaggaagcaaaacttttcttttcccttactctctttttgtcaactagtataaccaacaagactatacagatatagatagagtgagatggagtggtgacctcataactttatgttcagctctgagatatcatccgttggtattccaagctccgtcatatcgaaatcttcttcgtcgtccatgttaaaccatgaattaatatcacctggttgcgcatcaaaatctcctaagccatctggtatttgtaactgagataaatcgagaattggctctgtctcctccagtgcctccaagttattatactcgctgtttgcttcattcggttttggtaacgatggtttgggttgctccggaaccctaacagatggagatatctgagttgttttctgcttcggttttgcttttgtttttctttcacccttagcattggacagggaaggccggccgatcttattagttccgcctctagatgaagcctgccctttcccatctctgtccctgtcgcttctcttcccctttgtattacttgagagttgtgtcccaataccaacatcatcgagcagcaactctctcttcttgaccctattggaccatgctgtatcttctttccccgtcgtttgttctagtaaagcattttcagatggtagaacatcagaagatttggcatagttctccgagttctgcccaatgagtgccagcgaagagcttggctgtgagcccatgggcgctgtaagggaaagaaagagagatacaaattagtgaagaggatatggatttaaaagagcttccgtaattttatgtaggcaatagaacatacttgaagttgacgtattatactccttgtccatgagagtatcttcagctgttgccaaccccgcaatgaacatatccttaatttcaggctcactaaagcagcttttgcccgtcttttcgaattgatggcatcgttcaagcgtccttctaacaaaagccaatgcagcctgctttgaaatcttgttgttggaattctttccaccagcgttgtgatgacgccgacttgcctgtaaaagaaggaaacaaagttattaacaaataactacgtataaattggcagtgccagggaagcaaaacaaaatcgaaaatgagccaactttacagtcaatttaccttgcttttttcatatgccatctcgatgagcttttcataaccaagttgatcaagctccctatggaaagaaaaaaaaacaaagatgaaaaaccgtcagatcataattcagatccacaatggagtgcccaaaaagcagagtaagggaaaattcgtacttctcctgaagttctttcatctcgatggcaggctttagtagcctatccacaatctctttcttcttagaaccctgaaaaaaataacatagagacaatcaaagggtgtttttctctagagaaagtaaacatgggacacaaaaatattactttggtccttttacaaggatttcttaagaaacatcagaatccccctaaattacttaataactcgcaatggagacaagaaaaccataatgaaacaacaaatataatatttgatgaaataatgacctcgttgcagatagcctcctccaactttttaatttcgtcagcaataccttcatcctccacgtttgagatactaggctgtaagaaaacacaagaagaataacaaacttcagtaagacccaaaagtacatagcataaataggtttcacaataactaagatactagaccgtataccattaggtctatggatattccaagagactgggcttccagataaatcttttcatctatccccaatttatcatattgaatatctacgaagtcaatgggtgaattatctggaaatttgccattgcagtggtgggctgacttatcaacacccttgaacaaaattgcagacccatcattttctgattcatcaagttccagcctttcattgttcctaaacccattgaactccatattattcagaacactgaattctgagtcatcgtcaagatcaacttgtaaatcttcatttacacccattgagtcctcagatatcaaggctgatagcaatctctggtacagtggagaagccttggaatccgccctgctagttgcaagttcctcaggaaacacagggctatcaaactcagaagatgtcaaaacgggcgtcggacccatggaggagagttctccctgaaagagaaaggaaaaaaacattacaatattgactatctaaaatgcgttgaagttgacatgataagcttccgcagcactgcaaatattgctgtcaaatcacatatgataataattccaacagacacttgacaccattattctacttctttgggattttttcctttcgctttacatttacaaaagtggggtgcagatagatacctaggaaattaaagaattaattgattctcttatccaactataaatccaaacactaattttccttgaaccacattcctactgttttttttgtttttgtttttcgggctcaagcctagttgattaggaatgtggtacaaggaatattagggtttcggatttacagttggataagagaatcaataatttcaggagatcgggtgtggatatttattaccaaacaagaatatatctatcaaatcctcactatgagatctgaaaatgaagaaaaaggtatcacctgttgtttcaagaaattgatatgatcatcagatatatagccgaagtagcgctccatttgcttccagaaagagttgggaaaattctgagctgcatcaatagcaagacaattaatccagaaacaaaagttgggtatgtatcataagagtgactgaggaacaaaatgttttaccaatatttatagctgagttgacagctgccagtagctcctcacgaccatcatttgaaccaactaagaaaggtaacaaatccatgaataaagaaataaatcaggaaaaaaatccaatccaaaaagagcaattcttattacactgaacttgttttaccatgaaaatctagtgttggagcatttgttgccgtagctctctgacgtttgtaggccttacgatcagatagtttcctagtgggtggacgacccaccttactgcacagaactcattaaaaattctatgagataaacaccataacaaattttaatcatacaggaaaaaaaaaataagagtacgtggaaaataagaataatctctacctttcattcttgtcaaaaataggtcttgcactgcgaagatgttttgctgttccaacattcttaagcttatttactccatttgggttaagagacctcgtggaagaaaagccacggcctgtccttccttgccttctcacaccatctccaatctcttcaccagctgcaggcttattactttttcttgattgtaaagcagggatggacactctaggaatattctgtgcagctttcccatcaacctcatcagactgtttacctttgtctttagatttgatctcagggtggccagattcttcactttctgataaggctgcagtggagaagctgctttcaccttttagtttcaattgaggagaagcagctggtgaacgtttatgaaatccaaacccagtttcactacaaccaacatctgatatattatcagagtagggaacttcgtcctgactagaaacaatgggcactaaatttgtccttcttgctatccgggatatcttttgtggtctttgactggcccactgagtgacaggtggtgatgaagaacgatttgatgtcatacgcttgcgttgtgtaactcctgacaatgttggaggcttattcgtacagccagagatatcccattcaatcggggacggagtgttatggagtcctggagacagttttggtggtaaccccgatcctgatctaggtccacgaactgaagcatttgtttttgtgtttgaaaccagacttgaagaattgaattcatcatgaatatttgaccttcaatgaattaaacagagtaataagtacattgacaatgatcagaaacaacagtggctaaatatgggtaagatgatatggtgaaatgaaatctcatgaacaaggtacatgtaattaatagaagaattcaaaatgtgaattgaattacgataataatgcatacttgttgacgcccctgagattcaccctttccttatctgagacaatggagcgttctctcttctcactgtacaaagagttatggtcagaatcaaccctcgccagtggagaatgcccagccaagctcgtctgatgagagaggctatcagatcttccatacccagtagctccattaccagccgattgcctacaaaaataattcaaaaagtcttaccctttatattaaccatcaaaggagacagaatccaattgaacgagaagagtcacgacaataaagaagaagtcaaacaaaacagagtgagtaaatcaatcaagtgaaggaatctcagcatattctgaacccttgaaaccataatctgcaatggattgtagatatcatctgagtaaaggtatttcttcagttaactcaatcaccagtaaaattatggaaataatacgacgggagatattgatggtggaagtacacactcatgcatctccaacacatacttctattgcaggttagataaagtcatgtaaatgaagagcaaacaattgaattttgtgaaattccacttttgatttatttcctaataaactcagaacggtaaataacaaaaggaaagtagtgcaattatgaggtctgcaaaagaaagtttgctagctaagtacatatgagcaaagtaatttgaaaacacacatcgaagaacaaggcgacagtcaatatataaggctaataaatatcagcgttggaccttgtatgtctgcacaaaaatctattacatacatacaacagggcatacctgaacatgtttgagtcaccattcactcttgaccgggaatcgcctgttggtttctgttgtatgccctgcttcaagtctcggtaaccatcaaccactttatttgaagccaagttaggatgacagtccgcattaatagaggagcgttttttcttcatttttgacgtttcccaaccatcaataccagtagaagttcgatcttcaccctgaactgcattatgatttcccacccgcattatttctttatctttgtctacagccgctgactgtcgaacaatacagttgtttcgaacatccatctgcaccacaaaataaagagattaaggtttcccaaagcaatagtgactcacttactatttataagaaacctgagatatgaaaatactatcacacgcaaatttctataaatttttatcaaaacatttaaaaaacatcagttagtttcatactatcaattatattcaggtcataacagtattgtgataatatagcaagcgtaaaagcaaaaatagttgaggacctactaaaatataagaagacaaatgctccttgattaaacacttaaatttgcatgcaatccgacatatataaaaaaatactacattgtagcaaaaaaattgccttaaatgacagaagcttctatatcatatctaaaactagtaaccacgatccaattttttgaccaattcaaaagatgcaccttccagtgatcagaagcatgcaatgacatgcaaacagaagactgcattatagaatataagacatttgttcaagtacgaaccaagataacaactccatatgtaaaaaaaatcagaattaccatggaagtacgtgttcgcttatttggaacaccacttttaggtcgttcatccaacttttgctggtcaagctcaaaaccaccagccagggtctgaccctgaattcccattttacctaggcctggtcctgataccaagcgatcaccagagcggtcaccagaaaacccttcaggtcgagaccttttctttgtaggtacacttgggaaaaacttgttaaatacagaagaagcttcgttgaaaatttttacacgctccctgcgaccacaaaaagtaaatgagtcaaaagagcacctcaaacacaactaactaacttgtggtagttaaaaactacctggccttcacattgttttcgcgcagaccagccttaaatcttttgatctcttctggaataggagatggaataaacttcccttttaaagatccactaggagactcatcgcctagtattccaagagcaatactcacatgccgcttaaagtcaccttgacgaatagacttgtgatccgcggcaaccaccttaggatcaaaacgcaaacactgaaagaaatttgttacatcagtttgtgctattggtgaagtggtcctcaacatgattggatgagatgggacaggatgttccatggactcgcgaaagctactcgatctttccatctgtgcggcaaagttagatctgtatagaggcctatctagcccaccagaagaataatcaaacttcccaggtgctgacattccctcagctctcgaaagtcttatattttataataaacactgaatacacactggagcatgacaagctgtagcacataaatgctgatttctcagactcaaataattgatttaaaatgcacctgccatgtaacaacgggaattaatacattagtaaacaccaaaagagttttccagaacggcatttgaaaattacttgaaaacaaaaaaaatccagagatattttatgtagaacgtaaacatgaaaataggcgagaacgttaagtgaaatatttgatttacactgcccaacacttgaaaaggccaaagaacaaactccaacatctagactatacacaaacaaaggaatccctttatgtagcttcagattaatttggttacttcacgcagtcattgcatatattcggcttccaaagcaaatattcattatggtctttaaacagaaactgccagaacaatgctcaattccataatagcaaaatcttattctaaatacttccactaatctatcccaaattaagaactaaccccaataaagaaatgcattaagaactcacagtagctaaatgtacaatagataaaaaaaaactatagtaaaattcgaaaatgaactaagcaagaacagagatattattcaaattactcaaaacttccttccagaaactatgctttcacttacagagaatccaagtgatatgtgttaagaaagtcctccaaaattcacttccacttagtttgttgaacaccggacacaattagacagctataattaaaccctgagaaagtttgaaaaagatcattccttagttgccttcatcacaaataatctacattgtctattactcactaaaacatattccccaacttagaacaagttatcttccaagcttaactacaaaatttgaactgatccaatccaaaagactgatactttcaccataatctaacttcattaccactaaatcaacattgaagcaagaattcttaatccatggatacttttaaacacgaaaccctaggagagaactgaatcaaacataaacgaactaaaaactcttcaaataagcagcctaatcaacaattaagtaactataaataaaaccctaataatccagatcaaagttcaaagattgaaacaaaggaaaaacgaaacaattcgtacctctgaatcaaaaaccgcggcaaaggaaacaaaaattccgcagataacaacaaaccccaacaccaaaaatcaaagatgttgaagattagatcgtttcaacgagtttcgtgaagaaaataaaaaataagaagctcgaaatcgaaatcaagcaacgtggccatgagaggacgggatcgaaggtgcattggttcgttgctagtttttgatcggcgatgaaactagtactgttgaaactacggtattgcccatgtttaatcccagagaaatacatacccagagaaattaggggtaatttagtaaaatacaagccgacccggctcggagaaaaaagctatgggcctctctggctaatggcgattatactgtttacaatttatctaaattgaaataatgttttgtatctcactaaatcttgatgacttgctaaaatcattattaacataagaagcaggttacttacaattctgtttaaaaaaaaaaaaaaccaagtaattcatagagtattttattcaatacattattcatatataaagaggatttggaagtttttacgattctattaatgggacaaatataccattattaaatttaataattgtataatgaataggtgatagttgtatatagttcacatatttgaaatgtgattcatcccttacatagtacttttgtgatattataattaatgataaaatttgaaaataagaaagtggttttatttccatttaatatatatatttatatatagggaaaaaaaactttaagcatctattaaaattaaagaatagtcttgtggagctttgaaaataagtttttctcttttcaatttcctatcatcgataaatttgacaccatatatatactttaacaattataaatttggctccatatatagactttcctcgtagaatttgatattagttgttataaaaaaaaaccaagataaaatgggttagtataaagattttacaccgggagatgttagctcatttagtgcaaatactcatagggttatctaaatatttagatgattgggttctagagttttgaaatgtcaatgtatattttagtacttagaaacaaaaaaactatcatacactgtttttagttatttcacaatttcatttttaaatttattgaacttggatatttttgttatattgactctgttattacataattttgagtatattactatttacatgctattacagtaaaatgcattttttttgtttagctactatgtttttgttcagatttctctgtttttttatttttctctttttactatttcctaatttggtaagtcgaaaagtattggaagacaacattgtcaaagtgaagttaactaaagtatataaaaaaaaataactacagtattcaaacaaacaaacttcaaagaagtttttgtttgaactattttttcctaatgagattataatcgaattgatgtttgctaataagagccacaacaagatgtataaacaaaagcagaaaagaagaagaagaagatcaaatgcgaatataaaaataggtttatttagatgttgctaataacaataactaagtaaccaccaatggcgggaacaaacggttggaaactgccactaggaaaaaggccgtagaaaaatacatgaacgccaattctgggcagatgcaacaaaaacgtacaaaacaaaaaacacagctgcagaaaaaggagacagagagatttctcaacgtcttctcttctctctgcaactgcaattatgactgtacattgacaaacaaacaaaaaagtttcatggatcaaaaaaaaatagttacagaggattttctttgtagaataaagcgatgtctggattgaagaatcagctttggtgtctcaagtattagaagcaagataattattgttgtgagccatcgccaccagttgagagttttgtgtaatcaattgcagagtcacctgagaattgtaataatgacgttaaaccacagaaattttcggtaatttaaatgctaataacaagacttacttcgggtagagtcagttgatgagcgtggaggtgaaacgcttcctttgatatctgcattaacatttacaagaaactatgagaaaggtaggaggctacatgctgtaatccgcaaaagaaatgagaaaacaaacagtttttgcacctaaagaatggcgagaaccacgaacagcgtcaaagtttctgtacgtatagcccacaaaattgatattttgaggggttatgctcacctacgagcaaaaacaaaggtccggtagaacgataagtacagagcaggaccccgcgaataagcgaaatgatgatataagattttcctgagaattgtagtaccttccatgacggtccagatcctgttcttgctggttttggacactccacctaaggaaagaatccgaatatgataccactgaaaaagaactttttaatccttgagatggcggacttttacctcatcgaatttcataaaattctgggtatcaagttctccattgaccactggcttaaaagctgcatccatctcatagagtttttcccattccacatctttgaaccaagtatgagcctagatgtatcttgttttgttaaaaaaaagaatgtaatagacaaagagtagaaggtgaacagtctttttattatatttacatactttgatttgctcggctccggctccatgagaaccaagcctgtgctcagaatcacaaagcaacctacaaatgagatctcttgcctcaggtgtcaaccttgcaccctcggggaatactaaatgagttctccagctcacaatctaaattccatcaaatgtcaatttagagatataaaagaagatgtgaaagatcctaagaaaaacagacccaacacagaaagcttccaccgtcttaaaatctcattttaccatcaacaagaatattcaaaatgatataagagcaaagtggaaactactgtaaatttagttacaagtagacctttctacatgttgttacagggtcatcggagtaaaatggtggataaccaacgagcatctcatacataatggcccccaaagaccacctgcactcaaatgaatgcatatgagtcgatgatgaaagaaaatagatatgtgtcgatcaactagtagataagcagcaagaaaagatgaaaagctgatcatgaatattttatgtaatgttaacgtagataaccctaatgatataataaggaagggttctatggagaataatctataagatcattaatgtaacgcaccagtcacactctacaccgtatcccttcttcagcaacacctctggtgcaatataatctggggtacctaccgtagaatatgcctgtttcaaaacaagagcacaccaaagccagagagtttagacataaacccaaaggagcagtttaaagcataccccaaagattgatatgataaataaaaggttttaaacagagttttgtactacaccagttttcttctgtttatctgccaatgctgcagctgttccagtgggctcttccaacgccttccacgacgtcctatcgagcagttctcatcaccatcgattgattcatttatattctcatcattcaaaggttcatttacgttcatagccgaaatatttctacaatcgagaggcttacaaagaccaaaatccgacagcttcatatgaccatacttgtccaacagaagattgtctggttttatatccctgcaaaagatctacctcaaatatatatacaatttaattctccattcagaatgatgagaccagaaacaagtagactaacctgtgaacataattatgcttatgtatggactcaatagccaaaacactttgggcaatgtaaaaccgagccacagtttccgtcaaagtctcttccctcataagcaaagtcatcacatcaccaccagacagatactccatgataaggtacaaatattctggatcttggaacgaataataaagcttcacaatacagtcactagcaacttcggctagcaagttcctctcagctctaacatgttcaacctattcagaacgatcaaccagatactatacttaaagcccgaaattttatgcataatcataacataaatgagataactgtgagactcacttgccccctactaagcatttcagacttcttaagcttcttcatagcataaatgttgcctgtctttttctcacggcagagtcttacctaaggaagatacccatttacgaatagttaaagtggcgttcttataacaacaaatgttcaaagatggtaatacccaaaaagactaacctcaccaaaagctcctctcccgataatactcagaagatcaaaatcgtcaacgcaaagcctgttcctcattaatctagtatactctgtctctttcctctgcaaatcctccagcaactcgagttgttctttttctgatacatctaaagatgcaatcttttgttctagcacccaacgcctgcaaatcaaaagaaccctatttccattaatactttagagaaagacctctcagtgtttaacaaaaacattacagctccctaaaaacaacaccattcagataacagaagaagatgaacgagaaatttcgtgaaattctgcaacagatcaaattgtattcttcttttaggaatagaaacaaacagataatgtgcaaacaaaaacggtacctttctttacgttgttgaatgtgtctcatgcgtctattgtaatggttttcaatatacttcttcgctgcagcaactttctccaatgttgaatttgaaaccaacccttcatcctcaaaattatcctcaacctccgacgtcaccttcgccagcaccacctcatcttcctcttgattctccatttttggttctcgaaaaaaaaaaaaactcttttgcttctctctaaattcagagaatctctcgcatttctctttccttggtcaattgtgagaacaatatgattgcgagaacgaaaataagtctctcttcatctccatcgatcaatggcaatttacaagtttggatttttgaaatctagaaaaaggaatcacgaattatgacctggaaatttttggttttactatttttgctatcttcaggaaaaaggaagattaaaccacaaatcaaaaccggacacgtggattgaaggaaaattttgacaaaccggaaaccacagtaaaaccctttttggacaaagtatatatgcataaaataaagaatgttttaactttagtttaaataattatagaaagttgttgttattatcttaattgtattcaataataacataaaaataataataatctactcttcaccaaaaagaattaaaaaaaaaatctacttatttaaatttctttaatttttatttataatcaaaaaatctttataggcatatatttgaataaagatggaattttaaatatgataagaaattaacttcatttttctaattattatgttacaaaagtatttttaaactaattatttttaaattattattattttattttatttaatcaataaatctgtaaaaatattataataatagttattattattattcttcttattattattattattattattgatatttaatttaattggtattaataacatatactctaacttttaaaacgcaagagttacccgtcacttgtttgattggactgataactcatatttcatcaaaaataataataatatgaaataaaaatagtttatttatattaataggggagtaagcctacaacttcatgatctatgtttttataattaagagattcttgtttatagaggttttgaaaatactgaattttgtttgataaattggaagtgtttaacactaagtagataggaatttgcataagttgtagcaatacgttttatttagttgtataatttacatttcagaatttagaataatttttataaaaaaagaaattgaacaagctgactaactaaaagtaagaaagggccacaacttgtagtacacaaaatgtaatagtagacttcatttgcggacatgcatcaccagtgttccaaaactgtcaagttgaggcctgaaacgtgacatagcaatgttataattgttctgtcaatggaaggacagagcaatgttataactgctcaacaacgtgataagtcgggcgaaagtttgggattttcaattcaaaaatgtgaaaatatactaaatatgtactcatatactaaatatactaaaaagtatttttgtgaatttatttgagtttatgtatgttaacgtgtatggccgtttgatatgggaagtggatgtttatttttggccaagggagatagtagtgttgctaatattgtttttttgaacgacttgatccctcattgaaggtttagttctatattaaacttgtctgtaatttgaagaagtcatcgagcaaagccttgggtggctttgtttgtatgtatctttgtttggtttggttaaatgatttttaaaggtaatatgttgaattgatcaatggatgtgaaaggatgatcaagaaactatgttcatgaaaattttgaaatttgtgttcaacttttatgcaaaagatgagcagaattacgatcctttcaaagcctttttttttcaccaccatattttctctcagctattgtaaagtgattggtttagttacatttcacgtaaactttagtgataatcaaaatattttatcttaatgacattagacccttgactttgtattgtatctcacattttttcttctagttatttcttaggttctttaaaaaataattactgtatttaactaaattagatatgccatattttatttcttgttccaagtaccaaagagcctaggcacgacaatgtgtgtattcactctttaatggttctataacaaaattttagtgaaaatggtgttgtttgttttaggctatttatcaatatcttcgaggttcatgattctatttgttatttcattttgatattattctgccatgccctttacccattttgcaccacctccatcatgaggtttgatattgatatccattagaaaatattatgaaaacatctttgacacaaaaaattatgaaaccaaatgtaatattcaacaaactaaaattttcatttttattggtttacaaacataatccaaaccacgtacgtaactctcttttttggtttatcacataaatatcacaatttacaaaccatacatttacatgcatataattaaaaatattgcaccttcaaataaatgtttttacaaaaatccccaatgagaaactagccaattaaacaacgacattagaaaaccggactcttgatttccaatcgcgaatcgcagaccggagcgtatggttcggtgtgagcttgaagtggtctagcttttgtcgagtcaccggtgaaatgttatgtttctcaagccacgctaagatcgctttcctctcgtacgtgaatccatcggcagcaatctctggctcctccattatctcctacatccaacaatccaaataaataaataaaatctaaaccggttcaaatttcttgttactacatttgtgtaccgaaccaggtaaccttttactcacccgtaagattggacagaagtaatgactcggtgcacgtaaattgcttccttctttctttactttcgaattcgccgtctccacaagccgtttcaaaaccggtataacctctgatttaagatccggtctatctcggcatcgaaattcagcacattttaaaccgatccgagccaattcctcggtttctgccaaaggccaatcggtaaccgatttatctagcatttcggttaacgtccctttctttaccgcgttttcgaccgctggtacaatcccgctcgggttacgagccgtcaacaactgaagaatgattatgccgaacgcatatagatccgactttggtctaattgttccggttctgtggtattctggatcaatataatgcaatgtaccggcaagaaccgagtttcggtacatcgtgacattatcgggtgcaacatccgtaaccagcttggctaggccaacgtcagcgattttgctaacgtagttccggtttaacaagatatttcccggttttaagtcacggtgaacaattggttccggtttagagctgtgtaagaaggccaaaccgcaagctacctcgaaaattaccctaaaccggataaaccaaggcaaaggcggtttattttttcggtgaaatatatattcctcgaggcttccattttccaagtactcgtaaaccaaacaaccattctccggacaagctccgaggaggagaaccacgtgtgggtgtcggagttggcttagaacctcaacctatagagaaatattaccaaaccgaaaataaatcaaccggatcaaatcaaaagagttaaccgaaaccagacataatttaaccgatacctctttcaagaactcttgtttcttctccggtgtatctagccggacaactttaacagccgccggagtactatcaaggctacattggtaaactttcccgtatcctccttctccaatcactttctctggcgagaatccttctgtggctgttacaatttcctcaattgtgtattttctgtaccggtgatcagtccctaaaagctgatcgatcactttcttcttctccaagtaagtccttaaagcattcacctccgcgatctgtcgctgacaaaactctcttgcgagcaacgctttcgcggtttcgacctctttcaccgccttcatgtaccgctctttctccagcgccgcggtgttcctctgcaactcttctttctccacagcattgttcactcttttagattcattcaaatattcagtcgaaagcattttaacctaacagaaaccccaaaataaacactttacttggagaaaaagcaagcaaaatgattcaccagtgagtttggaaaactattttatagaaacaataaaatcagatataaaataaacacttctttcacagataagttttgatggccatcacaaatatacaaatttctcttcccaaaatcatctctaatcattttcttgcagattttagggttcaagatcagaaatctataccttgttttgtgtggagaagagctcttcacaagcttgtttatatttaaagactgtactttgtagctcattcttcaaacgttcgacctcttcttcaatctcaacctgtcaaacaacaccaaatctttcaaaaacctcggttacgtcataatagctagtctcatcattgcagcaaaagatgatggtaaagtaaccttcttggattttcttgatgtttccgggggtgaacgatcagagtctcggtgttcgctaacgatgttctcaacatttgattggggcttggtacatgttttatcaaaatctgagtaattcagctgaggaatatcggatcctctccgtcgcctaaaaatctctggagttgttgcactagaagccttactactttgaggcgttttgggtttattacaagtaaggcttaatgcctcaaatctcagctctcttgccgatgctgacctccttgttcctgcctcttcaacatccaaaagaaagagaaaaacttcaggccttcaagacatcatagtttatattatatgcattatcatttatatattttataatatgaatctatacttgatagatgcatgttcgttgcaaatttcttcgtataacaaatttatattcaaagttataatgttatgcaactagtttactttttgttaactaagattgttgttatatatttttcaaaattaggttcaattcaaaaaaatgagtcaattgaccattaaaattatttttatttttgtttgtttaagaatgtcagaattgagaatgtactatatattaaaacaacctaaaaccgctattcatttcctatgaattctgatggatatttgactagctatatgtatattttaccagttgactgtcgaggatcgggtaacgttggagaccgtagagtgtggaaactagccgcccagtctctcaagaagtcatgggcagtcgcggctgcgtgtggacttgtgcacggctctggttaccacgattaaagagaagttttaagaaatgagaaaatattgtgttatcaaataaaatgttttgcctataaattaccatgtttaagaaattacatcaactatggatgtagtattaaacaataattttctttaaaaaaaaaacgaaacacaaaatcctaatttttacctcggttgattaatggatccatagattttgtagtgattctgtctttacacacaatgtatacttcacatgtttctggtgcgtatcttaaaacggtcagtggtactcctgtaccttttgttctcctagaccgaaaatatcgctgttagtgtatataaccgagttaattaagaagaacgtaaaccaaaaccgaactatgtaaatttaccatgtgaatatgtttgaagtaaatgatcccataaccaaactgttaactcctgatttggatatcaatctgacaagtgcttttgcaggatcgtcgtactctagcaatagagtctctaccttacactgaaggttacaatatttcagggagtttaaagtttgtctcttaatttatctagatttataaaccgaaataaaacaaaaccaaccttggtactcctagtactcttgcacattttcaaaaagggaacaaagactgtttcatattcttttttcacgtctcttacatacatttccaccacactctcctccacttcttccaccggcaatctatctccggctgtaacaacccacattctcgtaaacattaatatcaaaatatctttaaattacaatgataaattaagtatttaaaaagatgtcaaacaaaaattttgataagtcgaattagctaatttactttttaacatacaaaaaacggaacaatttcacctcattaaaatcaaactacgaaaaagtaattacttaatcatttgattatcatacgaacataatttgtaagatttgtgaaacttacttttcacattttcttccttcatgttctatatatttggtgtgaaaaaaaaaaaaaaaaaaactcagtaattattatttcctttctgtcttttggtttttacttcattttatctttatatcatttacattaggtttttaataacaataacaagaaaaatgtgaatgattgagagagacttactcggagtaggaatagaagtaatggtagggatgacgtggatcatcacaaatttatcagccttcggtaaaagattatcgacagcccaccgtacggcacgacgacttcctgcaccgcctaatttgtctccgatcaaacccttcacggccaccgccacaaacagctgaccctcttccgcctttggaccaccaccgccactcatttcttgcgtcagcatcaccaccatctaatcaattatacttacgtataccacaagtaaccaaagaataactttttgttgttgtgactgaggaacccttgtgggctgatacacttttgtagttttgtttctgaatttgggtggggaaatgctattccagagatggatattactctgatcacgactatattgtattgatctctttatatatatatatataagagtcgtttaggaccaagtgtttaaaaatgtaaaaaaaaaaaaatttgattagtagccgaacaatgattggtcgtctttcggtctatttgttgctttggtttgtttaatcaataattaaagtcctaagatatgttttaatataaacttgaacaaacaaaatatatgagtttgattgtagaaatgctttaattaacactctaagtctaaagtataaacaaaataacaacatcaaaaactaagtgattgtagtgtaggcgtaataatattttgatagtccgttctaaaattagtttataaatgctatttttttatggaccactattaattattaaatctcaaaagaattatttctaaacaatgttgtttacttaagtgatatagtgcagtacaatataaaatttttcgtattagtttataaatacatagcttaaaaaatataagagaatacgaagtagactcataggattggattatataaaatcagtctattgactttaggaacaaacaaaagatataatttgatctgttttgaattttgttggtaatcaccgatatggatcttgcagtcctggatatataattaatagtaaaatatgtttggccaacattaggaagaaatcgatgggatggaaatcgccttcaaaggaatatatattccatttaatacttttcaaattcgaatttttttggacggccaatttgttaattataattagtgtgcagctttattatctgaagttttctagttctatctacatgatatttgaacggtttagatagagatttttatgtctgtcagttgtataatatgtatcatatactatgaccagttgtaccaatgtgggcaatgtgatcaatataatgtaacctactaacttataacctatgtatttgttgcaaaataattatgtatgaagtaattttgaatttatttgaatttttccctgactttgtccgtgtcaacaaacaattcgaaatgcctcgacttttttagaacaggttctagcaaaataacttagctcagtaagctttcagaataaataaagtagtcattttctatcagaagatgacataatttagttttttcttctgtgcaaacaatgacataacaaaaaacaaatgacattacttagttacggtactagattaatcttgaagtggtatgtggtcgcaacaatctgaatcttttagtaaaaggcatgagattgttgtggccttgtgagataagtcacattttgttccggttaaaatatgaaattattcagtattttttgtcgcagaccaacctatatattaaaattctttataatttttttttaatacattgtcttgaatttccacgatttcttgcacataatagttgtttaggatttgatcatctgatacggtaacgtacagatccaaatttccgatcaaaccggtttgatttggctgagtaatgatgtttgcaattgttttctaatatgtaaccaaaagttgaccaaaacagtctaaatgatttttcattaattttttgctcagcacaaatgaggatatacccgaataattaagaattatatataaaaaaaaaacactaataatgcactgatcgtttacgagaacgacataattaaactaattaaagatcttaacgattgtcgactctccaatgttcttatacacacacaaatataaatatgattagtccaatctatatagtcgaacagtaatttacagcagacttagatcgatctttcgtatagaagaaagagacgttaccaatgacattactgaaataacttcttttttttttttaactacatagaattattaacacattctaatacagcatacattaatacatatatactctcactacgtgtaaatgatagaagacgatcaatattggctagaggtccatctttggttaattgttccatatatgtagatctaagctatatatacataatactttcggaatttttttgtatttcttaaaacattaaatatgcaaatgtaaacggaaacaaatcaaacaaaacttttaatttgatgtcaagaaaacgatatcatatttttttattttagcccaagctgtttttgggtgtttattagtatacaatttatatttaattggagcgaagcctacatatagaaagtttagagcatcatgtagacgtcatgtgaattctaggtccaaaattatgtacacactacataaaatatcataacatcaaacgaaaaacacatataccacacacgaaaaaagggaaaaaagaaaagaaataaccaccatcacttagtttctgattctggacaagtagttcatgaatcatctaatatattagtcattattgatttcttaaagatttattgatcaattcatacatatatttctatttctagccaaatatataatagagctagatttttattttttttgttcataaaaagaaaacagctttaattgataacagttgttcattgttatttttgctacttagacgatggatcatgcatgaaaaggtaccaagtaattcaaacagtactgttattggtagattttagatatatgcataaatgtgggggacaaaaaaaatatagatacataaatataatggaaatggtaaaagaacaaaaatagataaaacatagataaagggagaaagaaaagtacttttttacttaagaatatatttctgtccacaacaagatttgctaggacgaaaaatcagtaactatttctcaattcttctatgtagctctttaaaatactaaaggtcatccgatgaccggcatcaaacccttatccgcaacttgatacgcacgctttgttcctttgcgatcatgcgtgaaatcttctcattctcatgatgataaaccttccttatgtcttgctccttaatttttttctttgttaaagtgccttgctcctctttgtaactcaaagctcatcatttgtacaaaaattagatcattttgtagcctttattatgttatatatattgatgtgattagtgtttgtaatttgatagaaaaaacgtacgactctgagctttacaacggctatttggcaatttacaacggatatggcgacttacgctattttactgtaaagattgaaaatgatatttgtgtgtcgttaggtaaaacattagtgaaaacaaaaggtggatagacaagatatggtcatatctatctaaccatacacagagacgtttgctgccatgcatgcatgatgcatatatatatatatatgtggatataaaatatatttaatttatatacacatagtccatagatagatagataaatagacgtagagagggagagagcaggagacaagaagagagtaagcacgcagagctttcgagcatgagcatgctagaaaaagagccatgtgtgctcactctcttctgtcgccttcgttattgctattcccttacctcctttagttgacttgcttcatcttcttgcatgcatatgattttgatgttatattagcctcggtccctaaaattactatatgatatgatgatatgatatgaaacagtttgtctgattttagggtctatatataaggattgctagggtctatatatgatgatgcatgcatagatttcatcatcatcatccactgaccactagctacgtttaatttatagaaagattccgccggattaaactcttatttcctgtcaatttgagcaacaagattctctcttttcaattatatatacataacacatgtctataatatacgtacaaaccaataaaattggactcttaacaaaattttgagagtgagagatcccacttaaaacgaaataaactatttgtttggtcattgcatgcgtaaacgaccacttgaacaattaagtatacataacataggtctagatctatgtgaaagattcccaaacttaagatctctagctagaacattcattgatcctccaatcaaaaaccaaaggaataaaaagtaatctttgtaagggcgaatgtaaaaccgaaacgtaagctagaggaattgatattaaaatggaagtaaaagcgaatattactaaaggttttggagttaattaaataaagacaaaagatgcaaggacaacgaattatgaacatcttcgaaatacgtttttaatattgttttggcatttgatttgatttgattctccttccacattcccttgttcatatgtgtttgtgtctcacgcaagcactacataagcggtccccctaaatacgtttctagaaacgtcaacgtttattcaatcataccaaaatttacatgtgtattcatcaatcagccgaccataaactacatggtccattagtcattacctatactgcaatttttctagcttttaacagccattatgtacttcacagtttggaatactggtatgacgaagaaaagtcgaggtaaaaaacgtattagaataaatgtttatcgtccaaagatcgcaccagcaaagaataagaaacctaaaccaacaaaggaacaattaatggaccctgaattttctgatgaagacgtacttaccagcttgggttttgatgatggcggttacataataccactaccgaaaaaatctctcatgttgattaatctaccagattcttttcgagatgagttgcaaacgatgcatgtcagtttttatctccgagaagttggcaaacttatgtttgggtgaggacaaatatgctctagtgaatagtactaagaagttgatgcttacagatggtctaggacggcttcatttgttttggatgaattcaattttttttccgaatcagtatttgcgaatgagatttatgtagccctagatgtgagatttatgaaagctggaagtgccaaaaagaaaggtggagattttaattgtaacaaaaacgcacagagtcttctttatgattttttcttggtagatatagatgaggagatatatgggtcaaaatttgaagagacggaagaccaaaagaagtggaacaaaaaattttgaattgatttgtcttcatcatattgtgctattaacattaaacacgaaatagagcatctgaatcttgaattctatggaatctctaaaacgaatagacagatctccgcggaggaagtgaaattctctactcatactgcattcaaaattaattgagtttttcaattacattggaggtttatcctttgatactttcggtttggtgatttgaatgaaatgttggttttgacagaaaaatgaataacacttgcattaaaatcatcaaaaattgaataacactagaatctaaggaggtgtattcgatcttatattttaagttatttgagtttttatataattttgattttttaaagaatttggatgaatttaaggaggttgttatgatttatggtaaaatcctctcaaattccacctaaaaccatgagatttaaaattatatatttttaactaagaaaatccacttaagtctcttaaagtcactaaaatccaatctttaaaatgttttcaataacagaagatttttaaggagattttaaaatcagtaattcaatagcattagatttcatgatacttttaaaaattcataattgaataacataggatatgttagtttgaataagatatcctaggtgttaatttactatttttaaaaaggtaagattttttttcatgtttttaaaaaatgtgagagtttttttacctatttttctattaaaatgaaatgtataaaattaaaattttgtttttaaataaaattactaaattaaatattacaaaatatgtatatattactatttagaattcaaatattatcgatacaaaattaaatttatttcttcaattcgtctatttaagcaagctagtaatttgatcgacaaaaaaaaaacaagctagtaaaatataattaacagaattactaaatcggccggtttagggattgctttctctcagtcgtcaattgcactaaaccactggtggtaatatcgctggcgtttcgcaagtatcaccgggaattgcaaagaagcagaggaccatgtacggagacgctacaaactggaatgaagatgagtatagagaatcaattttgaaggagcgagagatagagacacgcaccgtcttcagaaccgcctgggctcctccggcgagaatctctaatccagacgcatttgttgtagcctccagcgatggaactttagctttccattcactgaactcgcttgtgtctcaatcggcgagttttggctactcgaaaggtcaagatgttatggtggctgaacctgagagagtggttagggcacacgaaggtcctgcttatgatgttaagttctatggtgaagacgaagatgctttgctacttaggtagagacttaaatctctctttgttgattgatgagtctttgatgaattgtaattgagagtttgaaattttgatctggttatgtgtagttgtggtgatgatggtagagttaggggatggaaatggagagaatttgctgaatcagatgtgtctcttcatttgaaaggtgtgtgtgtgccatttttgtggtttttgatatgaatgatgctttttggagcttagtggttgtttttcttatgatctacagagaatcatctgaagccattgcttgaactgattaatccacaacacaagtgagtatgagttttgttcattttttattctacttgataactctgttactgaaaatgctataattgtgggttcaaatgtcagtgttcgtaatagttgtgtgtataatcaccattctttttcttatagaggtccttggggtgcgctttcaccgatgcctgagatcaatgccatgtctgttgatcctcaggttggaattgtatttaaatttcattgcttggttagacagtctcacaggataactgtttcaccctctctcacttctttcgttttgatagtcaggaagtgtatttacagcagctggtgattcttgcgcatattgttgggacgtggtatgtatttgaccatgatagatgtatgtcctatgtgaatccagatatcttaactttctaaaatcatttatgtgtatccaacaatttcaggagagtggtaagattaaaatgacctttaaaggtcattcagactatttgcatactgtagtttctcgtagttctgcaagtcaggtaatgatgttaccataaatattagaaatgcacctatccaaatctgagttccacatttggatttttgtctgattgtagtctctttctccagatattgacgggttcagaggatgggactgcgagaatctggggtaacatgctcccgaccatatttctttatgctgtaatttctagtattaggtcatacgtggttatagaacttttgaaatcatttgagtcttcatgttggtacttaagatccaatgctcctcagttttgttggctgcttcttacaactctatgatgattcattttggtgattacagaactttccactatgttatgttttggttcatgtggtttactttagttgtctagactaagctttgttcgctcaagggcttctttctgttttgtcaaccagattgcaaaacgggaaaatgtgttaaagtaattggttcccaggataaaaagtcccgccttcgcgttagttctatggcccttgatgggagtgaaagctggttggtaagaactaagcaactagataatctaacattttcgcaacctgctatttgtttgaagggattgttgcctccagtaacctaagaatatagttcctttctcctgaagaatcacttagaagtttaaatactgaacatgtatttactgttattggtatgattttctcctctttcaggtttgtggacagggcaaaaatttagctttatggaatcttcccgcctcagaatgcgtacaaacaatacccatccctgcacatgtacaggatgtgatgtttgatgaaaagcaagtaagcagaacaagattagattgaaatttaagcagtgtaatttaaagccttgggaggccgtgggtgttatttgtttatcaaggcttaataggtttatgtagtatctctttgaatcatccctcttcaacgaagtttattaaaaaaattactgacttttctaaactagaaacagaggtcaacacctagttttaattcctgtgctaaagtttaaacatctttttaaaaatgttgtctttaacaagtatcgcactatcagattttgactgtaggagcagaaccacttctaagacgtttcgacttaaatggagctttgctttctcaaattcactgtgctccttgttcagtattttccatttccttgcatccagcaggagtatgtttccaatcccttcttttctccccatttcctatatatgtgtttgcttttctcccatttcctatgttactgctaatattctgcaaatatgttaccccttctggactagaaactcaatgtttaaccgttgatccaattcttttgtatttgcaggtagttgctgtgggaggttatggaggtattgttgatgtcatctctcaatttggaagccatctctgcacatttcgtagcagttcattgtaaaactccttacagtttcttgatttggctcgataccctaaagaggtaccgaaatgtgtcagtcagattattgcagaggttaagaaaccttttctttgtttttcttaggatcttgctcctgactaaagaccaattagttgtttggttaagtgtaattggtttgtggttccgtagttgctatcaaatttgaaccattaaaatgacattggaccggtttagtctgatcacgtacattaactgccgttagagtttcaattttttgcgagtcctgttttcttatgaccaccattgatcaaatatttggatccataactaaatgattctcactcttccaagtaaaattttaccatattatgcaatttaatacatggacaaaacatatagtttccatatccacaaaaataagtcctcaaaaacatcactaatctaaacctcaaacatcactcctgataagagaaaccaaactccagcgatcaacaaaaccaaagaagaagaaaatgaagaagctgtggaagcaacaatctgaatagggaaattgcattgtccctgagatatattctttgtggtaatggtggccaaaccttggaagatacaagcatcctcatcctggttctttacttgaaaatacatgttaaacgcatatgaagcgttcccatttgcatcaagagtattgcaagaagacccgtaaccaagcgcagtgcaatccgaaaaagtgcaggcgtaatctatgttagcagcgagttttgtcaaatctttggcttctgtattaaacatacaccacttcttaggttgatacgtcacgttctcggcaccaatcaacaacttgttctgtccttgacctgatagatctataggaaactttggttgcccgtcgaatttgaatattccccagtggcgttcaaactctcccggtgctatacttttcgcatcctcatcaagtaatccaaacaagtatacctcaatgtaggttggtctcagtggagtgcctctgttttccccaagccttggtaaaagaccgttgtagaatctgtaagcactgcctgcgaaaaatacgttttcaaaacatttcattgcatctaaagaactggaaaatgttagatgtcttaccactatttgcgtgtttgtcaccctctgttggccaaccgacttctccaacgatgattggcatatctccatgaccaacagctttcaaagccgataccaaagtgtcgaaattggcatcgaaaacgtttgtgtaagcaataccattgtcatctactggtttagcaccatcaaagaaggcgtaattgagtggaaaatcatcattcccatagaggcttaagaaagggtagatgttaatggtgatgggtgcactgttattgccaagaaagtcaacaatctgagtcatttgaccgatgatatcaggacggaatcttcctgcagatggcacagggttgcttgatggtgaatcgtagacatccgcgtttaaagggactgtcgctttgacggagcttcctagtccagcttcattcaaagcgttttggatgttttgaagtgcagggaatgtgaggtttataaatgatccattgtatgatttgaggaatggctcatttccaacagctacaaacctgaaaacacatccacaagagattagacatataaacattttgacaatgttcttaccagattaacattttcagagaattgatttcacaaccgaacacattagaaccaatatataacaagcagagggagaaactcactaacgtgatattgacaccaccattgaagttataacgagtgacattcttatgaacccaatctttagctcggtcataacttcccataaccttaagctgatcattaggaatagcaaccataacttcaagaccagagccagaaagtgcactcatagtggtctcatccgcatcaaaaagcttaactttgttaatgttattgtccttaagcatttgaaccactttctttggtggaagcttatgtgtagccattgttccccagttgacacctagcccatctaccataacaatacccatgattccaaatccaacgacgaaggccaacagattcatcgtcctgagaaacaatgaaatggcttaccaggtgttttcacccaaattcaaacccttaacttgaacactcgtaaaatctcacttaaaccccagaaattgaagatatttacattttcctaaatggaggtcaatcaaaacatcataaagttcaaagcttttcacgcaaaatctacgagataaccaaaaataaagccaaagatacgatttttaacaaaaaaaaatgagaatggggactagacctttccactgagagtaacaatcgtcaagcaaaaagattgattcttttttctctctttaacttttccggaaaaaaagttttaagctttgatctttctctgattgagcttgacggtgaataatatgctttgtgattggttcttggaacttggaagtatttggtaaaagcccaaattaaaagttttaagtaaacattgcacttttagaattttattgtattgtttttatggtcagtaaataatgacccaatgtgttttatgtttgacaaatgttttagagtggttattggtagatgaatttttctaattttcagattttattgtcaataattcatggattcttttaaagttttagtaaaatacattgttattgggttgtaagcttttaaattctattcaaaaaaaaaattattcaaatagtttagttattataaattctctaattctaacaaatatatcttaatattaagatatgaaattctatgtttttactcatgaagcacaactttcttaatctatatatacatttttggaggggatttttgaagataatgttgaagatttgaaccataattcaacaattaattcaaatgggtgggttttacccggtttaactctgttcggatcctggataacatgtttaattctgttctgatcttggataacattaatttttggaaaagttacctaaaacctaataattaaaaacgaaaattaatgatttacttaccaaatttaatataaacaatatctctaaactaaccatattttttatttaccttaactaatttcctaaaatatttctacctaatttaaacataaatatataaatcttctttcatttttatttgatcttatactttatttattttgaatttatataaaatatatatagttaataaaatattatatttttctgaatatgatgtaatttaaattttttaaaacggacatatattattcaacctatgaagaaataatatatgtacaatgtcccacatcgcttagaaaaattggacaatggttcagacccatattataaaaggaccaaaatgattctgattacgaatgagcagaaagcttgatttatcaggcgtccaaaattaaaatagttatccgattttactcggattttttattttaaagaattgaaactttaaaatatttcaagaaattataaatattataactttatcaaaagttaaatattataattttaaaatctttttataaagtttatctttaaaaaatgcttgaaatatttataattttaaaacttataaagttttaaagtataagtttttaaaattataaattgaattttacaagaaatttaaatattataaatatataaaaaatatattaatacgagacgatatattacaggaaaaatcttaaatataacaatcaaaattcaatgatgaattttgggtcgatattgtatttttttaagtttcaaattttataatattgaaatttataagaaaatgacaaaattatgtttaattttacgggactgggttatatggtaggacgggtttgggtggataataattacgattttagaatgttccacatcgcttaaaaaaattggacaatggtcaagagccatactataaaaaggaccaaaatgatttcgattacgaatgagcatgaaacttgatttatgaggtgtccaaaattaaaatggtttgtttactagggttatttattttaaaaaattgaaacgttaaaaagtttaaaaaattataaattaaatattacaagaaatttaaacaatataaaagatattaatacgggacgatatactgctagagaaatcttagatataacactcaaaattcaatgatgaaatttggatcaatattaatcattttgaaagtttctaattttataaatatttgaaatttataataaaatgacaaatttgtgtttaatttcacgggacggggttatatggtgtgacggatttgagtggataataacatgggatagtatgctatggaaaaaacatataataacaatcataatataattatataatcttaaacactaaacaaaattaacaatattaaaaaaaaaacttaaaactttaattttttttaaaaaaattttgattcttatattagaaatttaaacattataaatatttaaactttatactacgggtgaaattttagaattgactgtttaggttgataagaatttacgatagaactaggagttaaatcctagaatgacaattaaaatataattatacaattaaatactaccacgagtgaaatcctagaattgacgagtttgaatcgatattaatatgggatagtgtactacgggtgatattttagaattgactggtttgggttgataataatttgcgatagaattaggagtgaaatcctagaatgacaattaaaatataattatacaactaaatactatcacgggtgaaatcctagaattgacgggcttgatttgatatcaatatgggatggtgtactacgggtgatattttagaattgactggtttgggttgataataatttgcgatagaattaggagtgaaatcctagaatgacaattaaaatataattatacaattaaatactaccacgggtgaaatcttagaattgacgggtttgattcgatattaatatgggatggtgtactacgggtgaaatccgagaaacaacaatcaaaatacaattataaaatattaaacatttaacaaaataaacaaatacaacttaaaactttaaaatttgagttataaaatttcttctcgcggtgaattatacatttaaatcaaacaatagcataaatttattaaatcatcataaaaaatattcaattattttttatttaataaaaatataggcccgcgggttaatatctagtactatgcatatccaaaaaattttacaaatttatgaaacaacaaaaaaacacaaacccaaacccaacgatcaaaacaacaacaacctttgatttttcttttagcaaatctcatgtgtagcaaagattattatgcaaatcatgtcacaacccaaatttcgtgagacataaccatggataaaatatacaaaataggatattagaagggaaattgcaaatgccagtaaaatttctctcacctattctcgacaaaaaacattattctgaattgaaataattgattgatactctatacaaaatggtcatgtagaaagaatcatccttataaacaaattaaaacatacctaaaactggagaatatgatatgttaattaggacagctaggaaaaacaaaatattgtaatcatttctaaaaaagcataaatatacaatatctcttatacagagaatttggtaaaatatatcttatacatagaattttggtaaaataaattttgatataaatctattacaattagtgacaaccaatcatgatatttggttaaaacaatccatgcatatttgttaatccacaaaaaaagtttaaatatctaactctgaaatctctaaaatctttacacctatgcatctaccaataatgattctgaaagtttcagaaaaatgtctggaaatatataactgtgttgggttttcatttgaaaattatgatctcttactagtaataacgtcatggaaattgcaacacagaaaaagacttataaagttttctgatatttttctaatttaggattttctttttaaaaaatacaaagaaaaaccgactatagaaatgttggtgtaaattaaacaggaggaagagttttatccaataatacagtatacaagtaacaagatgaagaacctcgggaacttgatacgtttgagggttaacagtgaatcatattttttatataaccaagtcataaactagagaaaccatataaattgaacaaacgaaaaaagacaatctcacttccatggttagtaatctttcatttagaaagatcttaagggaaatatataattgtatattctctctctataccacacaattccgatgaacacacaatctggtatattgtacatttgtttataatgcttggcacgacggcttgtgataaggctttatcgtctcataaaaggaaaacgtagtcattcgatcatctcccaaagtttcaatcttctctactgtcttcgtttatttcaaatgattatgagttgattaattattcaaaacacagaagatctctctatacatatatatatatatatatatagaaacctttcaaaccatttcgcaaattggttgtttctcactttctctagcgtaaatctcgatgagcttaagttaaaacttaccttcagggtcatttgttttgttatgtgacaatcttctagattaatattccacttactacttcctgcttaaaatatttagttacatcacatgaccatgtaattgaatttatcctctttataatataaactacgaaaatctgaagaagaaaaaaattatcgaaaagagaatcatattctggtactagcaaaataaatttggtagaagatatatatatatttttctatatgtaaacttcaaaattaatgcctaagatatgctaaaaatttgcgaaggagtcagggggaaagcttgagaggaccaatgcatggcattgcttttactgacagtaaacagtgtcacgctcacgacccattcttcccgttccatttggttttatttatttcaaagtttaatattccttttgtataacattcaaatcttcacatgattgattgtgtgaaaaccccacagattttactacaatagggggagttgacttaaaatagctattgatgtcgaaaaaatgtattttagttataaattatactaaagaaaatttttgatttgtctgttgtttaagcatatgtattgttaaacttaaaaaaatatgtattgttaatcttaaaaatgtaggagtacacatcaaatactcgagcataatcaaaaccgtattcatagaccgatgtgagaatcaaatagaagataatgtgattttttaaaatatcgtatctccaaatcaatcacttagaagataatgtaattctttatgtgctacataaataaatatatatatatatatatatatatatcttgtatatatgtcttgacaaaaaattgccagtcaaaaaccatgactgaatcaaactataagtcggattgaatcaaactataagtcggatgagtattaatttccattatgtttctatactttacaaaccggaaaatagatattatagataccaaaaaagtagatttgtgtatattattagaagatttggaatttcatcattatcaggatctaaagtacttccctaattaaatcatgtcggttgaaaaagctcaatgaatgtttgaaatttggaaagtttattaaattcggatcttttttttttgtttgtcgtcccaaacatttttattttattacaaataatcaacttatccttactactaaatcatttcatatctttgataccaacaaatcatttcatattctattttgatgtttaagaaaacactatttaccagttacaaaatattataaggattgttgtttagaaaaaaaagtacaagttgaattctttttgtcaaatataaaattgactttttaatatataattgacttattgaacatgattacagaattaatcatctacaaaactttccaagtttataataaatacatttcaaagactattagttcttcttaaaatatttctaaaagtgatcaaagactaccacatataattcagaaaaagtagaagttgatttctttttgtcaaataaataattgacttaaaatagtttggaaagccattgaacttgattatagaattgataatgtacataaaaaaattccaagtttataataaatacatttttcaaatgctatatcagttcttcttaaaatatttcactaaaaaaacactcaaatatagaataaatttattgaataacataccaactgtaaaacagaatttgacaaaaaaaaaaaaaaaatgaaatgaagatgaagacaaaaataaatcaccagaggatcttatgcaaaaaaatatatgaatacacaataaaccatattgatatttttaaaataaaataaaaacagaaaaatatcccaacaccgcttttcaattaaaaatcttccgtcaccattgttgtcatcttcctctctcgtgaatcctttttcctttcttcttcttcttctcttcagagaaaactttgcttctctttctataaggaaccagacacgaatcccattcccaccgatttcttagcttcttccttcaatccgctctttccctctccattagattctgtttcctctttcaatttcttctgcatgcttctcgattctctctgacgcctcttttctcccgacgctgtttcgtcaaacgcttttcgaaatggcgattttggattctgctggcgttactacggtgacggagaacggtggcggagagttcgtcgatcttgataggcttcgtcgacggaaatcgagatcggattcttctaacggacttcttctctctggttccgataataattctccttcggatgatgttggagctcccgccgacgttagggatcggattgattccgttgttaacgatgacgctcagggaacagccaatttggccggagataataacggtggtggcgataataacggtggtggaagaggcggcggagaaggaagaggaaacgccgatgctacgtttacgtatcgaccgtcggttccagctcatcggagggcgagagagagtccacttagctccgacgcaatcttcaaacaggtttaaaatctcagaaatcttcgaatttggtgtttgcttgttgttttatatggaattgagtttggtgattgttttgcattgcagagccatgccggattattcaacctctgtgtagtagttcttattgctgtaaacagtagactcatcatcgaaaatcttatgaaggtttgctgttacttgtttctccttttaggaattgaattgcttgaaaatttatcagagacgaataactttgttgttgctatcattcatgtagtatggttggttgatcagaacggatttctggtttagttcaagatcgctgcgagattggccgcttttcatgtgttggtaaaagaagatgttttttatttccagcaatgttacattgttatacgtataatgatgagtttagtgatcaagttcctctttgattcttctttcttgttgcagtatatccctttcgatctttcctttggctgcctttacggttgagaaattggtacttcagaaatacatatcagaacctgtgagtaattactattctccagccattactgtaatttttattgaagacaagtttgtatcatgaagaacttacaagttctgttttgaaaatgctcaaggttgtcatctttcttcatattattatcaccatgacagaggttttgtatccagtttacgtcaccctaaggtgatactgtttttctggtctcagtttgtgatactgtttttaagtttagttgtctgacccggtgatcttgaaaatggacaggtgtgattctgcttttttatcaggtgtcactttgatgctcctcacttgcattgtgtggctaaagttggtttcttatgctcatactagctatgacataagatccctagccaatgcagctgataaggtaaaatacgaaaaagaagcgtatgtattagtcacttgcactgtgttactgttttaaccaaacactgttatgaactttaggccaatcctgaagtctcctactacgttagcttgaagagcttggcatatttcatggtcgctcccacattgtgttatcaggtaactgcaaagtgcatcaaccattcttatacttgcaagagtttcttgtctaaacctcggatctttgcttttccccagccaagttatccacgttctgcatgtatacggaagggttgggtggctcgtcaatttgcaaaactggtcatattcaccggattcatgggatttataatagaacaagtacgttttcacatcttgctttattagttttccttggtgaaaatcatcatccctgcgttgtcaccacttgacttcatgttcttttgttacattttggcagtatataaatcctattgtcaggaactcaaagcatcctttgaaaggcgatcttctatatgctattgaaagagtgttgaagctttcagttccaaatttatatgtgtggctctgcatgttctactgcttcttccacctttggtatgctgtgatcccatctctttcaaaataatttgcaaattcgaaaaaccgaaaaaggctaaatctcatacgaatttgatatttttagtttcttagagtcggtgatgtaatttcagttactgaacgcaaatctcttgtccaaaggttaaacatattggcagagcttctctgcttcggggatcgtgaattctacaaagattggtggaatgcaaaaagtgtgggagatgtgagctattttactcaaaagaaaacttatgatttttaatgttgtcgttgtttttgggtcatctaactaaccaaattcatgtattcactgtcttcctttatcagtactggagaatgtggaatatggtatggttctcttcctaaacatcaccttcttttgtacacaaaatagaagaagagagctaattaagatcttgttttccttgacagcctgttcataaatggatggttcgacatatatacttcccgtgcttgcgcagcaagataccaaaggtgagtgagatatataccgatatgcaattgtcgagatttgtttctgtgatataaatttaaccctccacacacttgtttttcagacactcgccattatcattgctttcctagtctctgcagtctttcatgaggtatacatactttctacattgccctgtctctagacgcatgaacacacgctagtgaaagaaatgctaatattcaaagcattgtttttacttaacgatcttgtgttacaaatttccttttgacagctatgcatcgcagttccttgtcgtctcttcaagctatgggcttttcttgggattatgtttcaggttaaaaaattactaaactgctgcagtcgatttttactaaactctaatctcatattctgaccaaccaatttgtttgagtaggtgcctttggtcttcatcacaaactatctacaggaaaggtttggctcaacggtatgctctcaaaacccgagaaaatagaacgaataactctttctttcatagcctagccatttaaatcgcaatgctgaaacttaataataaaggtgatctgttttggaatgggatcatattattaggtggggaacatgatcttctggttcatcttctgcattttcggacaaccgatgtgtgtgcttctttattaccacgacctgatgaaccgaaaaggatcgatgtcatgaaacaactgttcaaaaaatgactttcttcaaacatctatggcctcgttggatctccgttgatgttgtggtggttctgatgctaaaacgacaaatagtgttataaccattgaagaagaaaagaaaattagagttgttgtatctgcaaaaattttggtagagacacgcgaacccgtttggattttgttatggtgtaaagaaatttcaatcaaaaaactgttgtaataattgttaccaaaaagaaatgcttttctggaaacgaggggaaaaatagtagttttgttaggttttactgtttggaccaaatctagtaaaaaactttttgtaataaggaaaaaaaaagaacaaatgtgataaatgcatggggattgtatgaaaccttccaataaagttgattggtggtcccgttttggggatggccattatttatttatcttttttttagcgtatttatttatgtcgtatgtatccaaggggagacaagactctaaattgcaataagtgttgaggcccgaacatcatcattgacaatatcagttaatacattacatatggcaaatggtagagaaaatgtcgatgtgcagcaaacacttttacccattcgaattatgttatgaagctttcttttaccttttcaaacacttagctcattagatgctatataaagtgataccttaaatgaatttaatactgaaatctagatttcgagaagaaaatatgcaacataactcttaggatatggaatactaataatctaatatgtatttaataggtggagcaagcaacgaaataatcaaccttttctttgtgttatattaaacctcatcggcaaattatttagctttaatagatatatcttatcttttttttggtgcgaatatagagataccttatctaaaggtccaagtctttaacaatttgcataaattaaattaaaatatttcattgtacaagaaattcaaatgaaactcatagtgtataaacatttagtcgagttacaaagaaacaaagttatttatggttacttctttccttaaaaggaaaagaaaatggttacgagaggaaccacgtgaagatcacgtagagaggttggtcaaacatagaaattcagttggaagtaaatttaatttttaacgctccaccgactctcggagacagctgcctctgactcagcgcctcatgttgacttggcagtctattattaatattgtcgactttttttttttgttggactataaaagcgatattttgtgtcctatttttttttttttttgacaaagtgatatactatttacatttaagattaattatttttattactcaaattagtagttatatatttcaatttaattcaatctgaaattcatctcaattttctatccacgaaagaaagacatgaaaatcaactgaagtatggtttctgtttttatatactttttaagaattttttatgctactagaagaaatttagaatactgtatatatttttggatgaaaatttaaaataatctttagaatgcgaaattagaaaataactacacaataacattatatctctaatttttttttttatatagtttccaaataaacaaaacaacaactgtatcacgttttgttaatttcatttacctaatcaagacattcttaaatttccaaaatttaaggaaagtatatgtagtcaacaaaaatgattatctacttaacatggtatggttctcttctttaagaaatcagttaatataactaaattttgcaaaataatgagatcgcattattgtaaatacatattgtcttttactattttttatttatatttataaaaatgttaccagacaaaggtaacatacaatttatttaaaactcgcacgaaaaaactccattctcttacaatacttttacaaaataaaaatgtaacaaataacttccatacattggctatataaactcttttagaaaaacttcaacataccttatgtatttatttgaagtatcaatatataaaattgaaacaaaagattctttccttctcgtaaaagaaagaaacaaaaaaagaaatcattcgtcgactttattacaaaaccctctcacaacaccatcacttcttcttcgtcttctgtctgagtccaaaatggaagactacagatccagatcgtacggtgacgggagaacatcagaccttcaacaatactctgctcaccgaagatccgacggtccagattcattcagtggtaacggtatgcaagatcttaggtcttacagtacttcctacacagattacccgacccggatacccgaagaccagaacccgaagaaaggaagatcatcttcatcgtcttcttggggatttgtggatccagatttacaaaggaagaagagagttgttagttacagagcttatactgttgaaggtaagcttaaaggttctttcagaaaaagcttcaaatggatcaaagataaatgcaacaaattacttaattaattctgtcaaatgtgttttacataagataataaacttttgtcacttcgatcggttgagtttcaatctttttttgtgtatgtgtgtgtgtgtttgtgtgtgtgttcttagcttatgagttgtgatcgatagtgattttgtaacaacaatacttaatagatgagtaagtgatttcttattcaatttttgacgtatcaaaacaagttacaatgttttaaacattttaattaaaacggtgattattcatttctttatcattgaaaacatccatgagttattattatcatgttttgtagtagtttcgtttcatattatgcgtgtctaaaaagataacttgttttatgcatgtgattatcttgtaaaaacgattagttcaggtatgttaagtaattacggcatgaatgttaaagttcttacgtttttaatttgcgatactcttccttcagttttgatgaataatttttcttatgaattatgaagtggttttgtttcattgtgtgtctaaaagtgtttacacgaaactttgttaattaagtgaatccaacgtttttagcgttacatgattataataacgtcttgatttgtagcgattggtgtgtttgagaaactatttttatttgtattgattagtatatacataagaagggactaattttttgtaaacaatgtatcactttgtaaagactagatatgatttataaaatatgttgttttttttaataatgattggtgagtttgatgaaaatggactgtggaggaaaacaaatagcagtcaaacaccgattagaacaccacttacgtacgtcttctaatcgatattttactgctacttgtgttcctcaagagtacttcaaactcacatcattatacaaataaaattaatatatcttaatcatacttcttgaatttttatgaccaaaacaacatacaaaatcacatattttagaattcaaatattagcatttctcttaatattattatacatgataacaacaaaacacttttagaattttggggcttttccatacacaactctgcaaaatcacgaaaaaatgacatatatacgcaaacaaaactcccacaattctacatgatggattaaggatagtcaagaaataaacctacaagtgtttgtatttgaaatatattacaacttttttttaacataggtgtacgaaggaattc

SEQ ID NO: 251 - DNA, 92822 bp, Arabidopsis thaliana
gaattcgccgtctccacaagccgtttcaaaaccggtataacctctgatttaagatccggtctatctcggcatcgaaattcagcacattttaaaccgatccgagccaattcctcggtttctgccaaaggccaatcggtaaccgatttatctagcatttcggttaacgtccctttctttaccgcgttttcgaccgctggtacaatcccgctcgggttacgagccgtcaacaactgaagaatgattatgccgaacgcatatagatccgactttggtctaattgttccggttctgtggtattctggatcaatataatgcaatgtaccggcaagaaccgagtttcggtacatcgtgacattatcgggtgcaacatccgtaaccagcttggctaggccaacgtcagcgattttgctaacgtagttccggtttaacaagatatttcccggttttaagtcacggtgaacaattggttccggtttagagctgtgtaagaaggccaaaccgcaagctacctcgaaaattaccctaaaccggataaaccaaggcaaaggcggtttattttttcggtgaaatatatattcctcgaggcttccattttccaagtactcgtaaaccaaacaaccattctccggacaagctccgaggaggagaaccacgtgtgggtgtcggagttggcttagaacctcaacctatagagaaatattaccaaaccgaaaataaatcaaccggatcaaatcaaaagagttaaccgaaaccagacataatttaaccgatacctctttcaagaactcttgtttcttctccggtgtatctagccggacaactttaacagccgccggagtactatcaaggctacattggtaaactttcccgtatcctccttctccaatcactttctctggcgagaatccttctgtggctgttacaatttcctcaattgtgtattttctgtaccggtgatcagtccctaaaagctgatcgatcactttcttcttctccaagtaagtccttaaagcattcacctccgcgatctgtcgctgacaaaactctcttgcgagcaacgctttcgcggtttcgacctctttcaccgccttcatgtaccgctctttctccagcgccgcggtgttcctctgcaactcttctttctccacagcattgttcactcttttagattcattcaaatattcagtcgaaagcattttaacctaacagaaaccccaaaataaacactttacttggagaaaaagcaagcaaaatgattcaccagtgagtttggaaaactattttatagaaacaataaaatcagatataaaataaacacttctttcacagataagttttgatggccatcacaaatatacaaatttctcttcccaaaatcatctctaatcattttcttgcagattttagggttcaagatcagaaatctataccttgttttgtgtggagaagagctcttcacaagcttgtttatatttaaagactgtactttgtagctcattcttcaaacgttcgacctcttcttcaatctcaacctgtcaaacaacaccaaatctttcaaaaacctcggttacgtcataatagctagtctcatcattgcagcaaaagatgatggtaaagtaaccttcttggattttcttgatgtttccgggggtgaacgatcagagtctcggtgttcgctaacgatgttctcaacatttgattggggcttggtacatgttttatcaaaatctgagtaattcagctgaggaatatcggatcctctccgtcgcctaaaaatctctggagttgttgcactagaagccttactactttgaggcgttttgggtttattacaagtaaggcttaatgcctcaaatctcagctctcttgccgatgctgacctccttgttcctgcctcttcaacatccaaaagaaagagaaaaacttcaggccttcaagacatcatagtttatattatatgcattatcatttatatattttataatatgaatctatacttgatagatgcatgttcgttgcaaatttcttcgtataacaaatttatattcaaagttataatgttatgcaactagtttactttttgttaactaagattgttgttatatatttttcaaaattaggttcaattcaaaaaaatgagtcaattgaccattaaaattatttttatttttgtttgtttaagaatgtcagaattgagaatgtactatatattaaaacaacctaaaaccgctattcatttcctatgaattctgatggatatttgactagctatatgtatattttaccagttgactgtcgaggatcgggtaacgttggagaccgtagagtgtggaaactagccgcccagtctctcaagaagtcatgggcagtcgcggctgcgtgtggacttgtgcacggctctggttaccacgattaaagagaagttttaagaaatgagaaaatattgtgttatcaaataaaatgttttgcctataaattaccatgtttaagaaattacatcaactatggatgtagtattaaacaataattttctttaaaaaaaaaacgaaacacaaaatcctaatttttacctcggttgattaatggatccatagattttgtagtgattctgtctttacacacaatgtatacttcacatgtttctggtgcgtatcttaaaacggtcagtggtactcctgtaccttttgttctcctagaccgaaaatatcgctgttagtgtatataaccgagttaattaagaagaacgtaaaccaaaaccgaactatgtaaatttaccatgtgaatatgtttgaagtaaatgatcccataaccaaactgttaactcctgatttggatatcaatctgacaagtgcttttgcaggatcgtcgtactctagcaatagagtctctaccttacactgaaggttacaatatttcagggagtttaaagtttgtctcttaatttatctagatttataaaccgaaataaaacaaaaccaaccttggtactcctagtactcttgcacattttcaaaaagggaacaaagactgtttcatattcttttttcacgtctcttacatacatttccaccacactctcctccacttcttccaccggcaatctatctccggctgtaacaacccacattctcgtaaacattaatatcaaaatatctttaaattacaatgataaattaagtatttaaaaagatgtcaaacaaaaattttgataagtcgaattagctaatttactttttaacatacaaaaaacggaacaatttcacctcattaaaatcaaactacgaaaaagtaattacttaatcatttgattatcatacgaacataatttgtaagatttgtgaaacttacttttcacattttcttccttcatgttctatatatttggtgtgaaaaaaaaaaaaaaaaaaactcagtaattattatttcctttctgtcttttggtttttacttcattttatctttatatcatttacattaggtttttaataacaataacaagaaaaatgtgaatgattgagagagacttactcggagtaggaatagaagtaatggtagggatgacgtggatcatcacaaatttatcagccttcggtaaaagattatcgacagcccaccgtacggcacgacgacttcctgcaccgcctaatttgtctccgatcaaacccttcacggccaccgccacaaacagctgaccctcttccgcctttggaccaccaccgccactcatttcttgcgtcagcatcaccaccatctaatcaattatacttacgtataccacaagtaaccaaagaataactttttgttgttgtgactgaggaacccttgtgggctgatacacttttgtagttttgtttctgaatttgggtggggaaatgctattccagagatggatattactctgatcacgactatattgtattgatctctttatatatatatatataagagtcgtttaggaccaagtgtttaaaaatgtaaaaaaaaaaaaatttgattagtagccgaacaatgattggtcgtctttcggtctatttgttgctttggtttgtttaatcaataattaaagtcctaagatatgttttaatataaacttgaacaaacaaaatatatgagtttgattgtagaaatgctttaattaacactctaagtctaaagtataaacaaaataacaacatcaaaaactaagtgattgtagtgtaggcgtaataatattttgatagtccgttctaaaattagtttataaatgctatttttttatggaccactattaattattaaatctcaaaagaattatttctaaacaatgttgtttacttaagtgatatagtgcagtacaatataaaatttttcgtattagtttataaatacatagcttaaaaaatataagagaatacgaagtagactcataggattggattatataaaatcagtctattgactttaggaacaaacaaaagatataatttgatctgttttgaattttgttggtaatcaccgatatggatcttgcagtcctggatatataattaatagtaaaatatgtttggccaacattaggaagaaatcgatgggatggaaatcgccttcaaaggaatatatattccatttaatacttttcaaattcgaatttttttggacggccaatttgttaattataattagtgtgcagctttattatctgaagttttctagttctatctacatgatatttgaacggtttagatagagatttttatgtctgtcagttgtataatatgtatcatatactatgaccagttgtaccaatgtgggcaatgtgatcaatataatgtaacctactaacttataacctatgtatttgttgcaaaataattatgtatgaagtaattttgaatttatttgaatttttccctgactttgtccgtgtcaacaaacaattcgaaatgcctcgacttttttagaacaggttctagcaaaataacttagctcagtaagctttcagaataaataaagtagtcattttctatcagaagatgacataatttagttttttcttctgtgcaaacaatgacataacaaaaaacaaatgacattacttagttacggtactagattaatcttgaagtggtatgtggtcgcaacaatctgaatcttttagtaaaaggcatgagattgttgtggccttgtgagataagtcacattttgttccggttaaaatatgaaattattcagtattttttgtcgcagaccaacctatatattaaaattctttataatttttttttaatacattgtcttgaatttccacgatttcttgcacataatagttgtttaggatttgatcatctgatacggtaacgtacagatccaaatttccgatcaaaccggtttgatttggctgagtaatgatgtttgcaattgttttctaatatgtaaccaaaagttgaccaaaacagtctaaatgatttttcattaattttttgctcagcacaaatgaggatatacccgaataattaagaattatatataaaaaaaaaacactaataatgcactgatcgtttacgagaacgacataattaaactaattaaagatcttaacgattgtcgactctccaatgttcttatacacacacaaatataaatatgattagtccaatctatatagtcgaacagtaatttacagcagacttagatcgatctttcgtatagaagaaagagacgttaccaatgacattactgaaataacttcttttttttttttaactacatagaattattaacacattctaatacagcatacattaatacatatatactctcactacgtgtaaatgatagaagacgatcaatattggctagaggtccatctttggttaattgttccatatatgtagatctaagctatatatacataatactttcggaatttttttgtatttcttaaaacattaaatatgcaaatgtaaacggaaacaaatcaaacaaaacttttaatttgatgtcaagaaaacgatatcatatttttttattttagcccaagctgtttttgggtgtttattagtatacaatttatatttaattggagcgaagcctacatatagaaagtttagagcatcatgtagacgtcatgtgaattctaggtccaaaattatgtacacactacataaaatatcataacatcaaacgaaaaacacatataccacacacgaaaaaagggaaaaaagaaaagaaataaccaccatcacttagtttctgattctggacaagtagttcatgaatcatctaatatattagtcattattgatttcttaaagatttattgatcaattcatacatatatttctatttctagccaaatatataatagagctagatttttattttttttgttcataaaaagaaaacagctttaattgataacagttgttcattgttatttttgctacttagacgatggatcatgcatgaaaaggtaccaagtaattcaaacagtactgttattggtagattttagatatatgcataaatgtgggggacaaaaaaaatatagatacataaatataatggaaatggtaaaagaacaaaaatagataaaacatagataaagggagaaagaaaagtacttttttacttaagaatatatttctgtccacaacaagatttgctaggacgaaaaatcagtaactatttctcaattcttctatgtagctctttaaaatactaaaggtcatccgatgaccggcatcaaacccttatccgcaacttgatacgcacgctttgttcctttgcgatcatgcgtgaaatcttctcattctcatgatgataaaccttccttatgtcttgctccttaatttttttctttgttaaagtgccttgctcctctttgtaactcaaagctcatcatttgtacaaaaattagatcattttgtagcctttattatgttatatatattgatgtgattagtgtttgtaatttgatagaaaaaacgtacgactctgagctttacaacggctatttggcaatttacaacggatatggcgacttacgctattttactgtaaagattgaaaatgatatttgtgtgtcgttaggtaaaacattagtgaaaacaaaaggtggatagacaagatatggtcatatctatctaaccatacacagagacgtttgctgccatgcatgcatgatgcatatatatatatatatgtggatataaaatatatttaatttatatacacatagtccatagatagatagataaatagacgtagagagggagagagcaggagacaagaagagagtaagcacgcagagctttcgagcatgagcatgctagaaaaagagccatgtgtgctcactctcttctgtcgccttcgttattgctattcccttacctcctttagttgacttgcttcatcttcttgcatgcatatgattttgatgttatattagcctcggtccctaaaattactatatgatatgatgatatgatatgaaacagtttgtctgattttagggtctatatataaggattgctagggtctatatatgatgatgcatgcatagatttcatcatcatcatccactgaccactagctacgtttaatttatagaaagattccgccggattaaactcttatttcctgtcaatttgagcaacaagattctctcttttcaattatatatacataacacatgtctataatatacgtacaaaccaataaaattggactcttaacaaaattttgagagtgagagatcccacttaaaacgaaataaactatttgtttggtcattgcatgcgtaaacgaccacttgaacaattaagtatacataacataggtctagatctatgtgaaagattcccaaacttaagatctctagctagaacattcattgatcctccaatcaaaaaccaaaggaataaaaagtaatctttgtaagggcgaatgtaaaaccgaaacgtaagctagaggaattgatattaaaatggaagtaaaagcgaatattactaaaggttttggagttaattaaataaagacaaaagatgcaaggacaacgaattatgaacatcttcgaaatacgtttttaatattgttttggcatttgatttgatttgattctccttccacattcccttgttcatatgtgtttgtgtctcacgcaagcactacataagcggtccccctaaatacgtttctagaaacgtcaacgtttattcaatcataccaaaatttacatgtgtattcatcaatcagccgaccataaactacatggtccattagtcattacctatactgcaatttttctagcttttaacagccattatgtacttcacagtttggaatactggtatgacgaagaaaagtcgaggtaaaaaacgtattagaataaatgtttatcgtccaaagatcgcaccagcaaagaataagaaacctaaaccaacaaaggaacaattaatggaccctgaattttctgatgaagacgtacttaccagcttgggttttgatgatggcggttacataataccactaccgaaaaaatctctcatgttgattaatctaccagattcttttcgagatgagttgcaaacgatgcatgtcagtttttatctccgagaagttggcaaacttatgtttgggtgaggacaaatatgctctagtgaatagtactaagaagttgatgcttacagatggtctaggacggcttcatttgttttggatgaattcaattttttttccgaatcagtatttgcgaatgagatttatgtagccctagatgtgagatttatgaaagctggaagtgccaaaaagaaaggtggagattttaattgtaacaaaaacgcacagagtcttctttatgattttttcttggtagatatagatgaggagatatatgggtcaaaatttgaagagacggaagaccaaaagaagtggaacaaaaaattttgaattgatttgtcttcatcatattgtgctattaacattaaacacgaaatagagcatctgaatcttgaattctatggaatctctaaaacgaatagacagatctccgcggaggaagtgaaattctctactcatactgcattcaaaattaattgagtttttcaattacattggaggtttatcctttgatactttcggtttggtgatttgaatgaaatgttggttttgacagaaaaatgaataacacttgcattaaaatcatcaaaaattgaataacactagaatctaaggaggtgtattcgatcttatattttaagttatttgagtttttatataattttgattttttaaagaatttggatgaatttaaggaggttgttatgatttatggtaaaatcctctcaaattccacctaaaaccatgagatttaaaattatatatttttaactaagaaaatccacttaagtctcttaaagtcactaaaatccaatctttaaaatgttttcaataacagaagatttttaaggagattttaaaatcagtaattcaatagcattagatttcatgatacttttaaaaattcataattgaataacataggatatgttagtttgaataagatatcctaggtgttaatttactatttttaaaaaggtaagattttttttcatgtttttaaaaaatgtgagagtttttttacctatttttctattaaaatgaaatgtataaaattaaaattttgtttttaaataaaattactaaattaaatattacaaaatatgtatatattactatttagaattcaaatattatcgatacaaaattaaatttatttcttcaattcgtctatttaagcaagctagtaatttgatcgacaaaaaaaaaacaagctagtaaaatataattaacagaattactaaatcggccggtttagggattgctttctctcagtcgtcaattgcactaaaccactggtggtaatatcgctggcgtttcgcaagtatcaccgggaattgcaaagaagcagaggaccatgtacggagacgctacaaactggaatgaagatgagtatagagaatcaattttgaaggagcgagagatagagacacgcaccgtcttcagaaccgcctgggctcctccggcgagaatctctaatccagacgcatttgttgtagcctccagcgatggaactttagctttccattcactgaactcgcttgtgtctcaatcggcgagttttggctactcgaaaggtcaagatgttatggtggctgaacctgagagagtggttagggcacacgaaggtcctgcttatgatgttaagttctatggtgaagacgaagatgctttgctacttaggtagagacttaaatctctctttgttgattgatgagtctttgatgaattgtaattgagagtttgaaattttgatctggttatgtgtagttgtggtgatgatggtagagttaggggatggaaatggagagaatttgctgaatcagatgtgtctcttcatttgaaaggtgtgtgtgtgccatttttgtggtttttgatatgaatgatgctttttggagcttagtggttgtttttcttatgatctacagagaatcatctgaagccattgcttgaactgattaatccacaacacaagtgagtatgagttttgttcattttttattctacttgataactctgttactgaaaatgctataattgtgggttcaaatgtcagtgttcgtaatagttgtgtgtataatcaccattctttttcttatagaggtccttggggtgcgctttcaccgatgcctgagatcaatgccatgtctgttgatcctcaggttggaattgtatttaaatttcattgcttggttagacagtctcacaggataactgtttcaccctctctcacttctttcgttttgatagtcaggaagtgtatttacagcagctggtgattcttgcgcatattgttgggacgtggtatgtatttgaccatgatagatgtatgtcctatgtgaatccagatatcttaactttctaaaatcatttatgtgtatccaacaatttcaggagagtggtaagattaaaatgacctttaaaggtcattcagactatttgcatactgtagtttctcgtagttctgcaagtcaggtaatgatgttaccataaatattagaaatgcacctatccaaatctgagttccacatttggatttttgtctgattgtagtctctttctccagatattgacgggttcagaggatgggactgcgagaatctggggtaacatgctcccgaccatatttctttatgctgtaatttctagtattaggtcatacgtggttatagaacttttgaaatcatttgagtcttcatgttggtacttaagatccaatgctcctcagttttgttggctgcttcttacaactctatgatgattcattttggtgattacagaactttccactatgttatgttttggttcatgtggtttactttagttgtctagactaagctttgttcgctcaagggcttctttctgttttgtcaaccagattgcaaaacgggaaaatgtgttaaagtaattggttcccaggataaaaagtcccgccttcgcgttagttctatggcccttgatgggagtgaaagctggttggtaagaactaagcaactagataatctaacattttcgcaacctgctatttgtttgaagggattgttgcctccagtaacctaagaatatagttcctttctcctgaagaatcacttagaagtttaaatactgaacatgtatttactgttattggtatgattttctcctctttcaggtttgtggacagggcaaaaatttagctttatggaatcttcccgcctcagaatgcgtacaaacaatacccatccctgcacatgtacaggatgtgatgtttgatgaaaagcaagtaagcagaacaagattagattgaaatttaagcagtgtaatttaaagccttgggaggccgtgggtgttatttgtttatcaaggcttaataggtttatgtagtatctctttgaatcatccctcttcaacgaagtttattaaaaaaattactgacttttctaaactagaaacagaggtcaacacctagttttaattcctgtgctaaagtttaaacatctttttaaaaatgttgtctttaacaagtatcgcactatcagattttgactgtaggagcagaaccacttctaagacgtttcgacttaaatggagctttgctttctcaaattcactgtgctccttgttcagtattttccatttccttgcatccagcaggagtatgtttccaatcccttcttttctccccatttcctatatatgtgtttgcttttctcccatttcctatgttactgctaatattctgcaaatatgttaccccttctggactagaaactcaatgtttaaccgttgatccaattcttttgtatttgcaggtagttgctgtgggaggttatggaggtattgttgatgtcatctctcaatttggaagccatctctgcacatttcgtagcagttcattgtaaaactccttacagtttcttgatttggctcgataccctaaagaggtaccgaaatgtgtcagtcagattattgcagaggttaagaaaccttttctttgtttttcttaggatcttgctcctgactaaagaccaattagttgtttggttaagtgtaattggtttgtggttccgtagttgctatcaaatttgaaccattaaaatgacattggaccggtttagtctgatcacgtacattaactgccgttagagtttcaattttttgcgagtcctgttttcttatgaccaccattgatcaaatatttggatccataactaaatgattctcactcttccaagtaaaattttaccatattatgcaatttaatacatggacaaaacatatagtttccatatccacaaaaataagtcctcaaaaacatcactaatctaaacctcaaacatcactcctgataagagaaaccaaactccagcgatcaacaaaaccaaagaagaagaaaatgaagaagctgtggaagcaacaatctgaatagggaaattgcattgtccctgagatatattctttgtggtaatggtggccaaaccttggaagatacaagcatcctcatcctggttctttacttgaaaatacatgttaaacgcatatgaagcgttcccatttgcatcaagagtattgcaagaagacccgtaaccaagcgcagtgcaatccgaaaaagtgcaggcgtaatctatgttagcagcgagttttgtcaaatctttggcttctgtattaaacatacaccacttcttaggttgatacgtcacgttctcggcaccaatcaacaacttgttctgtccttgacctgatagatctataggaaactttggttgcccgtcgaatttgaatattccccagtggcgttcaaactctcccggtgctatacttttcgcatcctcatcaagtaatccaaacaagtatacctcaatgtaggttggtctcagtggagtgcctctgttttccccaagccttggtaaaagaccgttgtagaatctgtaagcactgcctgcgaaaaatacgttttcaaaacatttcattgcatctaaagaactggaaaatgttagatgtcttaccactatttgcgtgtttgtcaccctctgttggccaaccgacttctccaacgatgattggcatatctccatgaccaacagctttcaaagccgataccaaagtgtcgaaattggcatcgaaaacgtttgtgtaagcaataccattgtcatctactggtttagcaccatcaaagaaggcgtaattgagtggaaaatcatcattcccatagaggcttaagaaagggtagatgttaatggtgatgggtgcactgttattgccaagaaagtcaacaatctgagtcatttgaccgatgatatcaggacggaatcttcctgcagatggcacagggttgcttgatggtgaatcgtagacatccgcgtttaaagggactgtcgctttgacggagcttcctagtccagcttcattcaaagcgttttggatgttttgaagtgcagggaatgtgaggtttataaatgatccattgtatgatttgaggaatggctcatttccaacagctacaaacctgaaaacacatccacaagagattagacatataaacattttgacaatgttcttaccagattaacattttcagagaattgatttcacaaccgaacacattagaaccaatatataacaagcagagggagaaactcactaacgtgatattgacaccaccattgaagttataacgagtgacattcttatgaacccaatctttagctcggtcataacttcccataaccttaagctgatcattaggaatagcaaccataacttcaagaccagagccagaaagtgcactcatagtggtctcatccgcatcaaaaagcttaactttgttaatgttattgtccttaagcatttgaaccactttctttggtggaagcttatgtgtagccattgttccccagttgacacctagcccatctaccataacaatacccatgattccaaatccaacgacgaaggccaacagattcatcgtcctgagaaacaatgaaatggcttaccaggtgttttcacccaaattcaaacccttaacttgaacactcgtaaaatctcacttaaaccccagaaattgaagatatttacattttcctaaatggaggtcaatcaaaacatcataaagttcaaagcttttcacgcaaaatctacgagataaccaaaaataaagccaaagatacgatttttaacaaaaaaaaatgagaatggggactagacctttccactgagagtaacaatcgtcaagcaaaaagattgattcttttttctctctttaacttttccggaaaaaaagttttaagctttgatctttctctgattgagcttgacggtgaataatatgctttgtgattggttcttggaacttggaagtatttggtaaaagcccaaattaaaagttttaagtaaacattgcacttttagaattttattgtattgtttttatggtcagtaaataatgacccaatgtgttttatgtttgacaaatgttttagagtggttattggtagatgaatttttctaattttcagattttattgtcaataattcatggattcttttaaagttttagtaaaatacattgttattgggttgtaagcttttaaattctattcaaaaaaaaaattattcaaatagtttagttattataaattctctaattctaacaaatatatcttaatattaagatatgaaattctatgtttttactcatgaagcacaactttcttaatctatatatacatttttggaggggatttttgaagataatgttgaagatttgaaccataattcaacaattaattcaaatgggtgggttttacccggtttaactctgttcggatcctggataacatgtttaattctgttctgatcttggataacattaatttttggaaaagttacctaaaacctaataattaaaaacgaaaattaatgatttacttaccaaatttaatataaacaatatctctaaactaaccatattttttatttaccttaactaatttcctaaaatatttctacctaatttaaacataaatatataaatcttctttcatttttatttgatcttatactttatttattttgaatttatataaaatatatatagttaataaaatattatatttttctgaatatgatgtaatttaaattttttaaaacggacatatattattcaacctatgaagaaataatatatgtacaatgtcccacatcgcttagaaaaattggacaatggttcagacccatattataaaaggaccaaaatgattctgattacgaatgagcagaaagcttgatttatcaggcgtccaaaattaaaatagttatccgattttactcggattttttattttaaagaattgaaactttaaaatatttcaagaaattataaatattataactttatcaaaagttaaatattataattttaaaatctttttataaagtttatctttaaaaaatgcttgaaatatttataattttaaaacttataaagttttaaagtataagtttttaaaattataaattgaattttacaagaaatttaaatattataaatatataaaaaatatattaatacgagacgatatattacaggaaaaatcttaaatataacaatcaaaattcaatgatgaattttgggtcgatattgtatttttttaagtttcaaattttataatattgaaatttataagaaaatgacaaaattatgtttaattttacgggactgggttatatggtaggacgggtttgggtggataataattacgattttagaatgttccacatcgcttaaaaaaattggacaatggtcaagagccatactataaaaaggaccaaaatgatttcgattacgaatgagcatgaaacttgatttatgaggtgtccaaaattaaaatggtttgtttactagggttatttattttaaaaaattgaaacgttaaaaagtttaaaaaattataaattaaatattacaagaaatttaaacaatataaaagatattaatacgggacgatatactgctagagaaatcttagatataacactcaaaattcaatgatgaaatttggatcaatattaatcattttgaaagtttctaattttataaatatttgaaatttataataaaatgacaaatttgtgtttaatttcacgggacggggttatatggtgtgacggatttgagtggataataacatgggatagtatgctatggaaaaaacatataataacaatcataatataattatataatcttaaacactaaacaaaattaacaatattaaaaaaaaaacttaaaactttaattttttttaaaaaaattttgattcttatattagaaatttaaacattataaatatttaaactttatactacgggtgaaattttagaattgactgtttaggttgataagaatttacgatagaactaggagttaaatcctagaatgacaattaaaatataattatacaattaaatactaccacgagtgaaatcctagaattgacgagtttgaatcgatattaatatgggatagtgtactacgggtgatattttagaattgactggtttgggttgataataatttgcgatagaattaggagtgaaatcctagaatgacaattaaaatataattatacaactaaatactatcacgggtgaaatcctagaattgacgggcttgatttgatatcaatatgggatggtgtactacgggtgatattttagaattgactggtttgggttgataataatttgcgatagaattaggagtgaaatcctagaatgacaattaaaatataattatacaattaaatactaccacgggtgaaatcttagaattgacgggtttgattcgatattaatatgggatggtgtactacgggtgaaatccgagaaacaacaatcaaaatacaattataaaatattaaacatttaacaaaataaacaaatacaacttaaaactttaaaatttgagttataaaatttcttctcgcggtgaattatacatttaaatcaaacaatagcataaatttattaaatcatcataaaaaatattcaattattttttatttaataaaaatataggcccgcgggttaatatctagtactatgcatatccaaaaaattttacaaatttatgaaacaacaaaaaaacacaaacccaaacccaacgatcaaaacaacaacaacctttgatttttcttttagcaaatctcatgtgtagcaaagattattatgcaaatcatgtcacaacccaaatttcgtgagacataaccatggataaaatatacaaaataggatattagaagggaaattgcaaatgccagtaaaatttctctcacctattctcgacaaaaaacattattctgaattgaaataattgattgatactctatacaaaatggtcatgtagaaagaatcatccttataaacaaattaaaacatacctaaaactggagaatatgatatgttaattaggacagctaggaaaaacaaaatattgtaatcatttctaaaaaagcataaatatacaatatctcttatacagagaatttggtaaaatatatcttatacatagaattttggtaaaataaattttgatataaatctattacaattagtgacaaccaatcatgatatttggttaaaacaatccatgcatatttgttaatccacaaaaaaagtttaaatatctaactctgaaatctctaaaatctttacacctatgcatctaccaataatgattctgaaagtttcagaaaaatgtctggaaatatataactgtgttgggttttcatttgaaaattatgatctcttactagtaataacgtcatggaaattgcaacacagaaaaagacttataaagttttctgatatttttctaatttaggattttctttttaaaaaatacaaagaaaaaccgactatagaaatgttggtgtaaattaaacaggaggaagagttttatccaataatacagtatacaagtaacaagatgaagaacctcgggaacttgatacgtttgagggttaacagtgaatcatattttttatataaccaagtcataaactagagaaaccatataaattgaacaaacgaaaaaagacaatctcacttccatggttagtaatctttcatttagaaagatcttaagggaaatatataattgtatattctctctctataccacacaattccgatgaacacacaatctggtatattgtacatttgtttataatgcttggcacgacggcttgtgataaggctttatcgtctcataaaaggaaaacgtagtcattcgatcatctcccaaagtttcaatcttctctactgtcttcgtttatttcaaatgattatgagttgattaattattcaaaacacagaagatctctctatacatatatatatatatatatatagaaacctttcaaaccatttcgcaaattggttgtttctcactttctctagcgtaaatctcgatgagcttaagttaaaacttaccttcagggtcatttgttttgttatgtgacaatcttctagattaatattccacttactacttcctgcttaaaatatttagttacatcacatgaccatgtaattgaatttatcctctttataatataaactacgaaaatctgaagaagaaaaaaattatcgaaaagagaatcatattctggtactagcaaaataaatttggtagaagatatatatatatttttctatatgtaaacttcaaaattaatgcctaagatatgctaaaaatttgcgaaggagtcagggggaaagcttgagaggaccaatgcatggcattgcttttactgacagtaaacagtgtcacgctcacgacccattcttcccgttccatttggttttatttatttcaaagtttaatattccttttgtataacattcaaatcttcacatgattgattgtgtgaaaaccccacagattttactacaatagggggagttgacttaaaatagctattgatgtcgaaaaaatgtattttagttataaattatactaaagaaaatttttgatttgtctgttgtttaagcatatgtattgttaaacttaaaaaaatatgtattgttaatcttaaaaatgtaggagtacacatcaaatactcgagcataatcaaaaccgtattcatagaccgatgtgagaatcaaatagaagataatgtgattttttaaaatatcgtatctccaaatcaatcacttagaagataatgtaattctttatgtgctacataaataaatatatatatatatatatatatatatcttgtatatatgtcttgacaaaaaattgccagtcaaaaaccatgactgaatcaaactataagtcggattgaatcaaactataagtcggatgagtattaatttccattatgtttctatactttacaaaccggaaaatagatattatagataccaaaaaagtagatttgtgtatattattagaagatttggaatttcatcattatcaggatctaaagtacttccctaattaaatcatgtcggttgaaaaagctcaatgaatgtttgaaatttggaaagtttattaaattcggatcttttttttttgtttgtcgtcccaaacatttttattttattacaaataatcaacttatccttactactaaatcatttcatatctttgataccaacaaatcatttcatattctattttgatgtttaagaaaacactatttaccagttacaaaatattataaggattgttgtttagaaaaaaaagtacaagttgaattctttttgtcaaatataaaattgactttttaatatataattgacttattgaacatgattacagaattaatcatctacaaaactttccaagtttataataaatacatttcaaagactattagttcttcttaaaatatttctaaaagtgatcaaagactaccacatataattcagaaaaagtagaagttgatttctttttgtcaaataaataattgacttaaaatagtttggaaagccattgaacttgattatagaattgataatgtacataaaaaaattccaagtttataataaatacatttttcaaatgctatatcagttcttcttaaaatatttcactaaaaaaacactcaaatatagaataaatttattgaataacataccaactgtaaaacagaatttgacaaaaaaaaaaaaaaaatgaaatgaagatgaagacaaaaataaatcaccagaggatcttatgcaaaaaaatatatgaatacacaataaaccatattgatatttttaaaataaaataaaaacagaaaaatatcccaacaccgcttttcaattaaaaatcttccgtcaccattgttgtcatcttcctctctcgtgaatcctttttcctttcttcttcttcttctcttcagagaaaactttgcttctctttctataaggaaccagacacgaatcccattcccaccgatttcttagcttcttccttcaatccgctctttccctctccattagattctgtttcctctttcaatttcttctgcatgcttctcgattctctctgacgcctcttttctcccgacgctgtttcgtcaaacgcttttcgaaatggcgattttggattctgctggcgttactacggtgacggagaacggtggcggagagttcgtcgatcttgataggcttcgtcgacggaaatcgagatcggattcttctaacggacttcttctctctggttccgataataattctccttcggatgatgttggagctcccgccgacgttagggatcggattgattccgttgttaacgatgacgctcagggaacagccaatttggccggagataataacggtggtggcgataataacggtggtggaagaggcggcggagaaggaagaggaaacgccgatgctacgtttacgtatcgaccgtcggttccagctcatcggagggcgagagagagtccacttagctccgacgcaatcttcaaacaggtttaaaatctcagaaatcttcgaatttggtgtttgcttgttgttttatatggaattgagtttggtgattgttttgcattgcagagccatgccggattattcaacctctgtgtagtagttcttattgctgtaaacagtagactcatcatcgaaaatcttatgaaggtttgctgttacttgtttctccttttaggaattgaattgcttgaaaatttatcagagacgaataactttgttgttgctatcattcatgtagtatggttggttgatcagaacggatttctggtttagttcaagatcgctgcgagattggccgcttttcatgtgttggtaaaagaagatgttttttatttccagcaatgttacattgttatacgtataatgatgagtttagtgatcaagttcctctttgattcttctttcttgttgcagtatatccctttcgatctttcctttggctgcctttacggttgagaaattggtacttcagaaatacatatcagaacctgtgagtaattactattctccagccattactgtaatttttattgaagacaagtttgtatcatgaagaacttacaagttctgttttgaaaatgctcaaggttgtcatctttcttcatattattatcaccatgacagaggttttgtatccagtttacgtcaccctaaggtgatactgtttttctggtctcagtttgtgatactgtttttaagtttagttgtctgacccggtgatcttgaaaatggacaggtgtgattctgcttttttatcaggtgtcactttgatgctcctcacttgcattgtgtggctaaagttggtttcttatgctcatactagctatgacataagatccctagccaatgcagctgataaggtaaaatacgaaaaagaagcgtatgtattagtcacttgcactgtgttactgttttaaccaaacactgttatgaactttaggccaatcctgaagtctcctactacgttagcttgaagagcttggcatatttcatggtcgctcccacattgtgttatcaggtaactgcaaagtgcatcaaccattcttatacttgcaagagtttcttgtctaaacctcggatctttgcttttccccagccaagttatccacgttctgcatgtatacggaagggttgggtggctcgtcaatttgcaaaactggtcatattcaccggattcatgggatttataatagaacaagtacgttttcacatcttgctttattagttttccttggtgaaaatcatcatccctgcgttgtcaccacttgacttcatgttcttttgttacattttggcagtatataaatcctattgtcaggaactcaaagcatcctttgaaaggcgatcttctatatgctattgaaagagtgttgaagctttcagttccaaatttatatgtgtggctctgcatgttctactgcttcttccacctttggtatgctgtgatcccatctctttcaaaataatttgcaaattcgaaaaaccgaaaaaggctaaatctcatacgaatttgatatttttagtttcttagagtcggtgatgtaatttcagttactgaacgcaaatctcttgtccaaaggttaaacatattggcagagcttctctgcttcggggatcgtgaattctacaaagattggtggaatgcaaaaagtgtgggagatgtgagctattttactcaaaagaaaacttatgatttttaatgttgtcgttgtttttgggtcatctaactaaccaaattcatgtattcactgtcttcctttatcagtactggagaatgtggaatatggtatggttctcttcctaaacatcaccttcttttgtacacaaaatagaagaagagagctaattaagatcttgttttccttgacagcctgttcataaatggatggttcgacatatatacttcccgtgcttgcgcagcaagataccaaaggtgagtgagatatataccgatatgcaattgtcgagatttgtttctgtgatataaatttaaccctccacacacttgtttttcagacactcgccattatcattgctttcctagtctctgcagtctttcatgaggtatacatactttctacattgccctgtctctagacgcatgaacacacgctagtgaaagaaatgctaatattcaaagcattgtttttacttaacgatcttgtgttacaaatttccttttgacagctatgcatcgcagttccttgtcgtctcttcaagctatgggcttttcttgggattatgtttcaggttaaaaaattactaaactgctgcagtcgatttttactaaactctaatctcatattctgaccaaccaatttgtttgagtaggtgcctttggtcttcatcacaaactatctacaggaaaggtttggctcaacggtatgctctcaaaacccgagaaaatagaacgaataactctttctttcatagcctagccatttaaatcgcaatgctgaaacttaataataaaggtgatctgttttggaatgggatcatattattaggtggggaacatgatcttctggttcatcttctgcattttcggacaaccgatgtgtgtgcttctttattaccacgacctgatgaaccgaaaaggatcgatgtcatgaaacaactgttcaaaaaatgactttcttcaaacatctatggcctcgttggatctccgttgatgttgtggtggttctgatgctaaaacgacaaatagtgttataaccattgaagaagaaaagaaaattagagttgttgtatctgcaaaaattttggtagagacacgcgaacccgtttggattttgttatggtgtaaagaaatttcaatcaaaaaactgttgtaataattgttaccaaaaagaaatgcttttctggaaacgaggggaaaaatagtagttttgttaggttttactgtttggaccaaatctagtaaaaaactttttgtaataaggaaaaaaaaagaacaaatgtgataaatgcatggggattgtatgaaaccttccaataaagttgattggtggtcccgttttggggatggccattatttatttatcttttttttagcgtatttatttatgtcgtatgtatccaaggggagacaagactctaaattgcaataagtgttgaggcccgaacatcatcattgacaatatcagttaatacattacatatggcaaatggtagagaaaatgtcgatgtgcagcaaacacttttacccattcgaattatgttatgaagctttcttttaccttttcaaacacttagctcattagatgctatataaagtgataccttaaatgaatttaatactgaaatctagatttcgagaagaaaatatgcaacataactcttaggatatggaatactaataatctaatatgtatttaataggtggagcaagcaacgaaataatcaaccttttctttgtgttatattaaacctcatcggcaaattatttagctttaatagatatatcttatcttttttttggtgcgaatatagagataccttatctaaaggtccaagtctttaacaatttgcataaattaaattaaaatatttcattgtacaagaaattcaaatgaaactcatagtgtataaacatttagtcgagttacaaagaaacaaagttatttatggttacttctttccttaaaaggaaaagaaaatggttacgagaggaaccacgtgaagatcacgtagagaggttggtcaaacatagaaattcagttggaagtaaatttaatttttaacgctccaccgactctcggagacagctgcctctgactcagcgcctcatgttgacttggcagtctattattaatattgtcgactttttttttttgttggactataaaagcgatattttgtgtcctatttttttttttttttgacaaagtgatatactatttacatttaagattaattatttttattactcaaattagtagttatatatttcaatttaattcaatctgaaattcatctcaattttctatccacgaaagaaagacatgaaaatcaactgaagtatggtttctgtttttatatactttttaagaattttttatgctactagaagaaatttagaatactgtatatatttttggatgaaaatttaaaataatctttagaatgcgaaattagaaaataactacacaataacattatatctctaatttttttttttatatagtttccaaataaacaaaacaacaactgtatcacgttttgttaatttcatttacctaatcaagacattcttaaatttccaaaatttaaggaaagtatatgtagtcaacaaaaatgattatctacttaacatggtatggttctcttctttaagaaatcagttaatataactaaattttgcaaaataatgagatcgcattattgtaaatacatattgtcttttactattttttatttatatttataaaaatgttaccagacaaaggtaacatacaatttatttaaaactcgcacgaaaaaactccattctcttacaatacttttacaaaataaaaatgtaacaaataacttccatacattggctatataaactcttttagaaaaacttcaacataccttatgtatttatttgaagtatcaatatataaaattgaaacaaaagattctttccttctcgtaaaagaaagaaacaaaaaaagaaatcattcgtcgactttattacaaaaccctctcacaacaccatcacttcttcttcgtcttctgtctgagtccaaaatggaagactacagatccagatcgtacggtgacgggagaacatcagaccttcaacaatactctgctcaccgaagatccgacggtccagattcattcagtggtaacggtatgcaagatcttaggtcttacagtacttcctacacagattacccgacccggatacccgaagaccagaacccgaagaaaggaagatcatcttcatcgtcttcttggggatttgtggatccagatttacaaaggaagaagagagttgttagttacagagcttatactgttgaaggtaagcttaaaggttctttcagaaaaagcttcaaatggatcaaagataaatgcaacaaattacttaattaattctgtcaaatgtgttttacataagataataaacttttgtcacttcgatcggttgagtttcaatctttttttgtgtatgtgtgtgtgtgtttgtgtgtgtgttcttagcttatgagttgtgatcgatagtgattttgtaacaacaatacttaatagatgagtaagtgatttcttattcaatttttgacgtatcaaaacaagttacaatgttttaaacattttaattaaaacggtgattattcatttctttatcattgaaaacatccatgagttattattatcatgttttgtagtagtttcgtttcatattatgcgtgtctaaaaagataacttgttttatgcatgtgattatcttgtaaaaacgattagttcaggtatgttaagtaattacggcatgaatgttaaagttcttacgtttttaatttgcgatactcttccttcagttttgatgaataatttttcttatgaattatgaagtggttttgtttcattgtgtgtctaaaagtgtttacacgaaactttgttaattaagtgaatccaacgtttttagcgttacatgattataataacgtcttgatttgtagcgattggtgtgtttgagaaactatttttatttgtattgattagtatatacataagaagggactaattttttgtaaacaatgtatcactttgtaaagactagatatgatttataaaatatgttgttttttttaataatgattggtgagtttgatgaaaatggactgtggaggaaaacaaatagcagtcaaacaccgattagaacaccacttacgtacgtcttctaatcgatattttactgctacttgtgttcctcaagagtacttcaaactcacatcattatacaaataaaattaatatatcttaatcatacttcttgaatttttatgaccaaaacaacatacaaaatcacatattttagaattcaaatattagcatttctcttaatattattatacatgataacaacaaaacacttttagaattttggggcttttccatacacaactctgcaaaatcacgaaaaaatgacatatatacgcaaacaaaactcccacaattctacatgatggattaaggatagtcaagaaataaacctacaagtgtttgtatttgaaatatattacaacttttttttaacataggtgtacgaaggaattcttaactaaattataaagttgttttgaattatgctatgttcctacgcttatacgataaatgatatatttcttgttgattactgaattttggtttgcttatgcgataaaatgaagtcagacgagtctctctttccttctgttttttttttttttaattgtatattacgtgactttgttgtttgtttgttgattccaatttattacatgttatgtttggctatgccaaaatcttaaagccgaacttttgaaaatgaagccctgcatatatagtaagagattacgttgtaattataggttttgaatacgtaaaagtctctccctaccgacatagtgttcgtcttcatgtttctagaaagtacaaattgagtaagtaatttttgtcaaacaaatttgaccaattagacaaataaaagttcatataaattttcaagatatgaaacataaaacaagatattaacttactcttatcccccactggattttatatcattccgcaaatattatcagagaggaaggatcttaaaattcgaagagtttctctatacaaatggaggagacaaatgaatatttgaagaatcatagtttaagcactttcgtttggtataataaatctatattatctctctcttatatatcatcagttctctagctgtgaaaatagcctttcttcagaagaatcatagacaacgtcactgagtgagtacaggttttgttttatagctgctttgtatgaatcagtcagagagctttgctttggggttctacatcgtctccatttgattgtggcgttgctgctgtctcatcgcctgcattgttattgatccgtaaaccatcaatgcctttgagtgcggtttcatagtttgcattgtcactcccgccactaaatggttcacgactgctcgtgtccacaactcgtcttgacgatgatccctctgatcggcccaagttcaaagatccaggtagctgagaaatcaatggatcacaatgaacatcccgactcaaaagaaggtacccgagaagaaaaaaaaacagcatgacaagaaacttaccagcttgtcctttgcaattgcagaatcatttccattcttgtctttctgcttcagggtaaaatccggatttgtcctctgatttgggacatctatggcagacaaacacgcccttagtatataaatcaatggacaactatgcggctgcattttcataaagaaggataataagcattcaaaaatatacctggacgcttctcagaattgccaaccgcagggtttaatccagaactagttccaacaccaccatcctgaaaaaagaaacatagaaagatcttgcattattcatctgtgtatgtatatgtatcatgaacgggatagaaactttaaagtatcaagagtgtacatggggacgaggttgagggtttccagattgtgattgctgatacttgtatactgtccagtcaaacacaaaatcaaactgaaaacctgggacaaacaaaatactcattttgagtcaacagatgcttctgtatgaacttaatagcctgagaggaagaagagagatagagaaaatgaatgaccttcccggataaaaaggttgcggaatagtctcttcaaatatgcatagtctggcttatcatcaaacctaagtgagcggcagtaatggaagtaagatgcaaactctgttggatgacctctgcataacgtctgcaaagttacagtactatctatgatcaaccgtctctacctgatcataatcctttgaaacatggattcgtataagtttctaaatgtaaaccatataagaagaacttacttcgatggaagttgaaaccttcttttcgctgatcttatcatacttctgtttcttgtttccagctttcagcccttgccaagggagactacaagagaataagatattagagatggattgggagacaagaatcagaacagaaagaaaagttacttaatgactctcaccttcccttgaggaaatacatgaggatgtaaccaagcgattctatatcatctctccgactttgctctaccaagtgaaaaatgtcaaaaagtaatcagtgaaagaggagaaaaagatccgcgattatcatgagggtttatagaaagtgatggagtataccaatccctaggtgagtgttcaagctggcatacctcggagtcccaattagacttttattctccctgaatcatttacacgtaaaatccaaacaataaagaacccgttgtcaggaaatctgaagctgacatacaatatgctgaaaatgctgaatctgtgacatccaaaatcttgttacctgtatgggatatgtctatgagttgagctgtctctatatttcttagccaaaccatagtctatgatgtagacctagagaaagagaccaaaatcagtcatacaatagcgagaccccaaaaacaaatccaactgagagaatttgcaaaagtaagaaaacctgatttgcccgcctccctaagcccatgagaaaattatccggctttatatcacgatgaagatacgacttagaatgaatgaactcgagacgatttatctgacacaagataaacccaacagtgagagagttacattaagaatgacaagacaccaatccaaagcataattaccatttgatcagcaagcataagaacagtcttcaagctaaactgcctcttgcaataactaaacaaatcttcaagacttggaccaagcaaatccatgactaagacattgtagtccccctcaacaccataccatttcatatttggaatcccagctacattaacgaacatacacaagaaatgaataaccaaatgagaattcaataacaatagagataaacatttcattgcatacttccaccctgaagaactctatatatcctcgactcatatgacaattgcggatgcgcagtcttcacactttcctgcacacacacaaaaaaaactaagttttgatgatccaagttgggactttgaagagatgaaacactcacaagcttaatagcaacttcttcgttagtctgaacatcagttcctgcaatcaaaacagtctcatcaaacgactattgaagagattttatatgtatagagaggggaggaacgaaccgaggtaaatctctccgaaagagccgctcccaattttgcggccaaggcgaaacttgttcccaacacgaggttccatacccaattgaaaaaaccctaactttgtggttttatctatctactacgtcgagcggatttctcgatttctcatgcggaggagagtgaagtgcgatgatcaaaactagggcttttgcgaagaagaggggaagaatcgagcaggttgaaattggaagtgagtaggtgaggaaatttagggagattccatggtgttttggttaagcaaccagaagcaagcaagatgaagaagactgcgcgtgtgtgtgtgtctcgcttagcctgttgcttttggtcttttctattccttttctcaatttattaaatatctttattcggtgaaaaaaatatacagtatatttcttagaaactttataataagaataaggattttgtttttatattttcctaaattccataaatctcttaagtttacaaattcatatatcttttaacatttaaacaaataaccagacttctagtaatatatataaatttatttagggagtgttattggtttgtgatgtattcgaagtttcagtgacttaaaatgttatgaagaatttgttgttattcaataaagatttttcaattttttgttaaagtttggtgttattagtttaagatttgtaaaaagtaatataaaatcttcataaatgtagagttattggattcatatttttataaagttattaaattttttgtgtaattcatttaaaacaaagaatctatgattattataatgaattaaattattgtgttattggtttatgactttctacccttttttttataaaataaagttgtgaaaaatatcataccctttttttttacaaaataaagttgtgaaaaatatcataaaaataaagaaattgtttgagaaactttacaaaattattaaaaactaatcaacaagtttattaatgaccttaaaccaaaataggtacatataatattagatagatcatgcaaatgcgtttggtggttatgttacttttgtatcatttgattggcatgatgttctacatttttttaccatttctctattcttaagtcgaaatctttaggaccaaataagcatttttccctaaactaacaaagcagcatctcactagatgttttccaatcagatttgcttactatagtgtgctaatatgaaatttgagtgactcatgacaatgcatcaatccagattaagcattaacatgtgatcagctagcattcatgagaatatgagaattgtcttcgagctaaaagaaagtagactcttttttcacttgagaaactcatgacatactttttttttatatacatttgttttttgatgattaggttaaacttttgtaataaataaatttttagttaaataaataaacttctatcatcaaaagactcgtgagtttcttcctatgttgcaatgaaatggaaacgaaaacgcgaatacgaaacgtttcggaaacgagaaacgattttttcttaaaattagggattggaaacgattttttcttaaaattagggattggaaacgtatacacatacatacatatatatatatatatatatataacattaacataaaactatattaaagaaaaaatggtttaaacaatacaagtccaaaacatcaatattaaataaataaactaaaattctaaaagataaaaattaaaaggttcaagttcaaatagttaatttagaccaacattttcattttcattagtttcatcaaagataatataaagctcttttcaaatctggtttatcaaaagaaatatcttaaaactcaaagtcttccaaaattagttatatgtattaataattttaataattttaattttagttattaaattttcaaagttgaaaaaaatttgtcgtatgtctatttgggaaacatgagtttctatctttaaaacgtaagtttccatcgtgtttccaaacataaatttttaaaaaacgcgtttccgttacgtttttcatgtttccggagagtttctgttttcgtaacgtttcggaaatgggaaatagacctcggggcgagtttccatgcaacctagatttcttctaaccaatagaaatgctcttaaaagcctttttttaaaaaaaatcaacagaaatgctcttaaatgttaaaaacaaatattcatgccaaattttgatgtaaaaatttgttattttcgctttagttgtgtcttatttcggtctggtcattttctcaaagcccttttagttatttatatatatattctctgtctcgtatttgtccccaaaaatctagggttttaaggtttcttatccttcctcttcctccgccagattcttttcttgcgaagatgagcaacgacaaggacagcatgaacatgtccgatctctccaccggtaagatattataatcttattgtcctatagaatgaggcctggattctcttttgttctcttgatttattgaaaaaagcttctcttgttttgtgttttgcttatagctcttaacgaggaggatcgtgccgggcttgttaatgctcttaaggtgagttttttcttcacgatatgatttgcgtatgactatctggagattgggctattcatctttgtaacttttagggattgttttctcttcctgactagttttgagaaattgatttgattcttatggcttagagaatttgactttggttttgaggattgtctatgcatcttaatttggttgtttgaaagtttgtgacttttcctgatttgatttacgtgtttgctgcagaacaagttgcagaatttggctggacaacactctgatgtccttgaaaacttgactccaccagtcaggaagcgtgtcgagtttctaagagagattcaggtgagtaaattttcagcttttagatgatcttggattttgtattggttttgaattagctggctgttcaggtctaatgagtttttggtggagcaaatttatctgattccttttgtattttaacctttgcagaaccaatatgatgagatggaagcaaaattctttgaggagagagcagctcttgaagctaagtatcaaaagttatatcagcctttatataccaaggtttgaatacggtctttgattctgcgagattcttatggtctttagtttcctattattagaatatctttgaaacacatgatgacacctcaattgataaaggtttaataagacttctctctgttgctacttacgtgaatgattagtgcttcatggttttcacttctttctgcatcattcgtgattgtaactgatattgatggtcttctgccttctgcatcacagcgatatgagattgtgaatggtgtggtcgaagttgaaggtgcagctgaagaagtaaaatccgaacaaggagaagataaatcagctgaaggtgtgtttatcgattcttttactgaaacatgtttatttttagtatcttatgatgatgatggtgaactcatgatttttatatgatatgaaactgtctttctgcagagaaaggagtaccagatttctggcttattgcattgaagaacaatgaaattactgcggaagaggttcgttattagaatattcttctttttggtttataaaatggcgattctctttatcattatgtggttttttccacggttttagataactgagcgagatgaaggggctctcaagtatctcaaagatatcaagtggagtagggttgaagaaccaaaagggttcaagcttgagtttttctttgatcagaatccttacttcaagaacactgtcttgaccaagacatatcacatgattgatgaagatgagcctatccttgagaaggccctcgggtaatgttttgctctatcaagtatttactgtttatgttctgaagacaataagtctttattgactgtcgtttactgctgttcaggacggagattgagtggtatcctggaaagtgtttgacacagaagattctaaaaaagaagccaaagaaaggatccaaaaacacaaagccgatcactaagactgaggactgtgagagtttcttcaactttttcagtccacctcaagttcctgacgatgatgaggatcttgatgatgacatggtatttccatctccataagcagtttagtttttagagtcagtaattaagattgtgttggattttaatctgatcatctaatattcacaggctgatgaactccaaggacaaatggagcatgattatgatatcgggtgtgtacctttctatttcatattcagttctcttcacttagttcagttctaggatctgagtctgtccactgtttatcctgtagttcaacaatcaaagagaaaatcatctcgcatgctgtgtcatggttcactggtgaagctgttgaggcagatgaccttgatattgaggacgacgatgatgagattgatgaagatgatgatgaagaggacgaggaagatgatgaggatgacgaggaggaggatgatgaggatgatgacgaggaggaagaagcagatcaaggaaagaagagcaaaaagaaggtaaattatgtggttttgttctacttaaaaccttcctacataggaaactaaaacctctgaaactgatttggtggtttatcttttgttttgttgcagtcatcagctgggcacaaggtttaacaatcaatcaatctcgatcttttttttttgttgataatgcaatggctaacctgaggtatccttttttaatgaacagaaggctggaagaagtcaacttgcggaaggtcaagcaggtgagaggccaccggaatgtaagcagcagtgaagaagtgaagaatcttggcttagttatgatgaagaagaagagtgaagagtgtctttgagccgaggttgtgtttctttaatttgcagagtcatggtccggtttattatatatcagttttgggtgattggtttgctatttaaaaaaaaaaaatgggttctttggtttggtttgtgtctcttgatttttccttttgtaatgatcttatgaatttgtttcgagttaatgtcgttctctggtcagatttcgaattcaattctatttatcctccctcgttaatgagagaatttgtgagacaatctagtttacttaagattgatcgaattttataaaccaacattaccaaaccgtcaaataattaaaaccaatcaatcttatttatcggtttgcataacccatcaatgagccggtttagacatcggtttgagtttctctgggaaagacaaaagtcaaaaacatctctgccgacttgtaaaagaccgatcaacagaaacccaaaaaaaatagttgaaacggagggaaacgaaaacctaaaaccctaaaaaactcttccttttttttttccagtgaaatttctcttcttctccgttttcatacaagtctgacttctgggtagttggaattttccagtttttggtttgtttctgtatctgtggtttaaaaaagtggagaagaagctttttagtgcttttctatggcgaggattctccgaaacgtttattcactgagaagctctctgttttcgtcagaggtatgtttatcgtgtttctcatttgggtattacgagaaattaaaaaaactctgttactgtcgttttcattgcttatttgggtattcattcatgagaaagaatccgaaatgttgtctcttaatttgaattcattctttttttctgggtaatgtttattgacaagggtttcatggggttttgcagttacttagaagaagtgtggttggaacatcgtttcagctccgaggctttgctgccaaaggttgtcttaagcttttaccttttgtttctatgaatcgattttactcaaattggtttttgattttgatgaatatatgtatttccacagattactagagctaaatccgtttgcgtttctgattgcttagctcactgtggttgttaaagttgaggtttttgccattaactctgcaattgtttttgttttgaagctaaaaagaaatccaagtcagatggaaatggatcatctgaagaaggtatgtcgaaaaaggagattgctcttcagcaagcacttgatcagattaccagttcatttggcaaagggtccataatgtatctcggtcgtgctgtttctcctagaaatgtcccggttttctctaccggatcttttgcccttgatgtagctttgggagttggtggccttcctaaggtatatatacttatctcttttggtgatattattctttccccaatatgtgtgttttagagtttttataggttggttctattagctaagttaattgaggtttatgtataagtctgtattctctttgaagaatctaataatattggtctccccattgtgaattccataggggcgtgttgtggagatatatggtcctgaagcatcgggaaagacaacacttgctcttcatgttattgcagaagcacaaaaacaaggaggttattccttgtttcttttaactcctcggctatgttctttacagagccatacgtcgtatcctaaagaagttttttgcatacaggaacctgtgtctttgtagatgctgagcatgctcttgattcgtcacttgctaaggcaatcggtgtaaatacagaaaatctgcttctatcacagcctgattgtggcgaacaggcccttagtcttgtggatactttaatccgaagtggttcagttgatgttattgtagttgacagtgtaagtaaggtgatttatatgggatggataatgggttgatgcttttgctattggatctatatttcgctctctcatgttttcatgtgattttgttttacaggtggctgctcttgtacctaaaggagaacttgagggcgagatgggtgatgcacatatggctatgcaagccagattgatgagccaagctttgcgtaaattgagccattctttatcgttatcgcaaacacttctgatctttataaatcaggtaagagaacgttactagctgagatttgtattcgaaatgtaaagtctcttatgcaaatgtatctttacttccccatgtttcatattcaggtgagatcaaaactatctacgtttggaggatttggaggtccaacagaagttacttgtggtggaaatgctttgaagttttatgcttctatgcgtttgaatatcaagcgaattggacttatcaagaaaggcgaagaggtaaacttccgaaacccgcttacacattttgggttcgaaggtcttatcctacgacctgtcttatgttcgtgatgtgtgtttaactgatcacttaacctttctattgtctccttagttcttcagaatgattaaatgcttgtgtttgaaacctgagattgtatgcttgtgcagacaacgggaagtcaagtctccgtgaagatagtgaagaacaaactcgctccgccgtttagaactgctcagtttgagcttgaattcggcaaaggaatctgcaagatcacggagataatcgacctgagcataaagcacaagttcatcgcgaaaaacggaacattctacaatctcaacggtaaaaactaccatggaaaagaggctttaaagagattccttaaacagaacgaatctgatcaagaagagctcatgaagaagctccaagacaagctcatcgccgatgaagctgcagataaggaaactgaatctgaatctgaggaagaagattccctgagagttgtggtttcacctgacaacacagatgatgaatcaccagctcttgttgttggagctgctgcagtggttgttgaggcagcatgattagcgacctccggtttagtataatattcttcctttggcctagagttttccggtttaacgcggtttggattcggtttccttctcctcatgtaatttatgtgctagttaaatcacatttacatataaccgttgttgtgggtgagaaaattttgtagtttttatggggaaatttaatgttaacgaaaagcagaatatttaaatgttattgatcaattttacttccaccaaaatgctattattatatagtaactatattatagttttagatattagacctcacaaatgacatatcacattaagttaatcaaaagatgtcttgccctggagataacagtttcttgggatcaaatagatctttcctcttcgaaaaatcatcccattttgatccaaaatgctcaatccaatcttctttactagtataatgcattagatattgcttaatcttaatacctgaatccttgcaaaacctaattatcttctcgttaacgctctccacttctggaagatcctttggggtagcggattgtagtagtccgataatatatataacatcttcatcgatctctggtatcatcgccgacatacgattgtcccatctaacaataacagcataatcagttcatagaaatttatttactttggttcttgaagataaatatgaatgaagagaagtatgtacttattccggtttgttggatagagaagagcgagtcccgaagctgatttttgcttaagaagaatgtctttgacaacaccgttatgaaaatcgagaatccgagatttaggaacgtagaggttaagccaaggatgaggaagttcccataatcccaaagatctgagtttattttcttcgacatgtacacggttcaagaaatcgaagtaggccacgtcgtgcattgatatgaacccgggcaagtaacttaatgttttcgttaatgtgtcaataacctacacaatagtagattatgagaagcataagatgcaaaaaaaaatgtaacgatgatgatgatgaatatcttaatgtggtgcaatgatgaatcatttaaatatcttatggtatgataaaaacgatgatgaaaatgtaaatgtgtagtaccttgctgatgatggggagattgggatcatcataatacttggctacttcaagaacatagatgataccgtgttgcttgactagatcagcgactttagattgatctgaaggtgggaaaaaagaggtgtcaacgacaccgtttgatagaaatatttgaccttctaaatagtcgactccaatatcgtttgccattgatatcaaacgttcttggtcctttgtaaaagttgtgaaatcactgtagagcatccgaaaccatttggcctacacaatttcatttagagaaaacaatcccatttaatttatacacacatatataaagaaaccatattacagtatagtatttcaatattttcttgaaaataattatataaaatttgtgaatagatgaaactaaaacagaacgtcatcgtatattatgaccaaatctgttttttaaaatgataaccaaattgtaacgtttatcggttgtaagattctaattagtcagaagactatattctaaactttggagtatatttgagtagttgactaatgaaagagcttgactctaataaacaaggattatatattgacatcaaaaagatttgcacgcataagacaagattagacaacaagtcctaggattacaaggactatactttataaaataatccatatcttttttttattcaatgcatagattttgttcaaattaatgcaacttaagcatttgacctaaattccaaacttgtacctaactttagttttaggataccatctaagaaagcttcatgttttgtgatccatacgtctctaactctcttagtgtaatatcataaaatgttttaatcagacattatccgattagtaaaataattatttccgttaggttatattttattttatctcaataaaaatcactaaataatcaagctctgacataagaatcattttctattgactaaaaaaatttagaaattgaaacggaattactaatgaaaaatgaatgctgactaaaacaaatggtaaaatatgatgatacgtacccgtttaggtgcatggtccaaaacaattctggctctcgttataattccaaattgacccaaacctcctaacactccatagaacaattctgggtttagctgtcgcgagcatgtcaacatttcacctttccctgaaattatttattcaaaatccatattaacaataacaatttaaaaagtgtaaattcaaagaaaaattctgaaatgttgctattttaaaaatataccacctctttattcgaaagaaaataaatgatatatttgaaatactacacaaatctaagaaaaccgaaaagctccatatgcatgcgtcatgcatgtacattacaaaaatcccaaattaacacgctaccaattgtgaaaatttgtctttaattatttatatatgtacgacaataaatgtgtgtatatgtaattactttatttctcatgaacaacattcaatatgtacaaaaaacatatagatgcgttacgcattttgtgtttcgaagacttacgtgtggtgcaagaagtttagcacaactataaaacataaaacctatggtacaaaaaatgaaaaatactataaaacaaaaacagtttttgttgttgtatgtacatcaaagtttagaagatgcgtaccagtaataacgtccaattcaaggacgttactaacaagaggaccgtttcgaaacacttgaccaccaattccaccattcgacaacgttcctccgacggttatatgcaaataatccgtccaagaaaccggcgacacccctttctccgccgtcttcttaagcacatccacccataacgtcccggccgccacgtcagcgtacttcttgtcttttgaaaccaccacgtcagtgatacacgtcatgttgacgattactccgccggagaccgaggcttggccgtttaaggagtggccttggccacgagccgctacttggaatgtactttttccgtttgcggcgtattggaggagacgagagatatcagcggtggaggaggggcagattacgccgccgggggtcacggtggttatgtttccgaagtcatgagaggctgcggagatgatggaaggatcggtagagagggtgaggttaagggatttaggtaaatcaattttaataccgtttgatgatttggtgatcattaaaaccgtgattaaagtgatcattaaacgaagattagccatttgtttatgtttctctctctctctgatttgatttttgaagaagagaattacaacgaaagaattagatatcgctataatttgttacttatatagacaccgtaggaatgtatgtataacataaaatatggaatcctaccaaaaaaaaaaagacaataaatattgaagtcaaaatgaaatctcaaataattcctaaaaatgaaaaaaggaaatcttactgttttgtcaacttgttgaattaatacttcaaggcacatcctcatatttagatatataataaatcttgttgactatagttagccatatctatccataaatatctttttagaatttgaatttagtattaaccaacaaaaaaatttacattaattttcttggaataaaatcgagtaaagctttcactaaggtttgttgagaaaaatattaaagagtgaaactgaattaaaaaaaacttatgtttatgtatgtgcatttccatgaaccagcatgtcataacataaaagcctagaggggagggtcgaggggagagtcgggtagttcaaggagttgatttggttgcaaatgattcggtgaatatgccgttgaaagtaaactgccgattggagaggcatgcattacgttcttgccaacttgactaaagatcatatacgtaggtcgtggtttatttttgcgggaaccaaaacttttgggattttgattcaaagacatcataacagataagatgatcgagatgtagtaagacaaggaatgttttacatggatgtaggcgtgttctgactcatgtaagtacttagaacgaggatttacggaaacaacccttttatgttatgaattttacgttctcgaaaattgtgaattttttttagagtagcctctctaataggtttatatatgaaatttaggaggattatttggaaaattccttccgcttaatgataaaattcattcgttttaagttttaaccttatgtttctcctctttcacggtcatgctctcgactgatcttttcataactatatatatgacatagtttgagtatctaagtactgtgaagtgaagattagttttttataaaatattttaaaagtctatgccaccatttctctgacaagttatatctatacgatttctctctctctcaattgataaaacaagcaagaaataaataaaattgttttgattatagtagaacactatagtttgataaacgaagaacgagaaaaaaatctacaaaattgtgattatagtagaacactatagtagtcgagttatttatggacaccaaaaataaccactagaacttttaattctggaacaaagttgggaatatcttggtagatatggcaccgataatcacaatgatatgatgtttcgctaaagtcatgacaggtggcgaaatggtctttgtttagttatagttgattacttgatctttgtttgcatagagataattgcaatttttctttgttctttactagtataactaccttaaactattgaagagatttgaagaatatcagaactgttgtcatatttgtttgcagtttctgttctataacttctgttaaaataatcactttctgacattgttgcagatattggttgaggaatgctctgagtgttcagagaaccgtataggacttaatcgcagcgggtggagctggatgcgtctttaagataacgaattagtttctggttcttgtgatcagttgtgtttaatgtatattcatgggtgatagatttaatcactcataatcttatgttacaatcctttgtgctattttagttatgttcattagagtatttatgataagaactcactagctgcgaggaggagatggaacttgccagagaaccactcagattcaagaggaggacaacaaagatgaatggacatgggtttggtacttatttggaagaatactcctactaggttactgtttgagatgatggataagcttctgaatgagagaatgacgaagaggagtggatgtgtcatgtaaaccaaatactgagctactaagaactgatttcaagaatttgtttagattttgatttggaatcatagcaaaaccatatgtgatacgttttggatcagaaaaaaaaaacgatccaaggcagccaattgttgcgggcaggcccgtctgccatctttagataattagatgtaactaaaatattattattattattaaataagaatggattttgtcaatttgtttttgtctaattacttatctgattagaaatagtttgatttcaatgattggatgattagtccatctgtccatatactatgaaaactatgatatataccacattttcacattctaccacttctttcatcctttttttttaaatctaccatatttcccaaaccaaaaaactaatttacactcaaatctatctttttagtttatactgttactagcaaaagtccaacgcgttgcatggtgtaattaatatacttaaatgtataataaaatgtaactaaatatatactgaaacattttttgttacttttaaaatataataattatatttatattttatattgcactaatttgttgttagtggtagaagctttttgtacactacaaaactaaacatttgtaatatttggtttttaaatagatgatgttttcaactttcaataaataattgattaactttttagtattggttttaactatttatactatgtaaattattttattattggttgaattgtattcaaacatctaataaatgatgatttagtttagaaaataaaaaaataataattagattaatgtgcaatagaaataaagaaggatcatcatgtctacttaagtgaaaaaacattagatccaaaatatcgtttggttaaagtgcattttattaaccgtgtgaatgaagaccatatgtggcaacactacatgaagcttgttttattgaaatataggatttttataggcttttactcgacggtggccattcacagaatcctattagacaaaaaagaatagtcacaaatcctaaatatctttagtttgatattttggaaacattgacaagtgcaccaataaaaacttgcactaaaattctagtgaaagtcggattagataccaaatattggaaagaaaaaatgatgcatgctagagacacacacttaaaaattttgtaaagtgaaacggattaaagaaccaaattaactaaaccatttatcaagttaactaatttaccaccataattaaattttaatattaaaactaaaatatacaatgatcattttaaattgaatttaattatttatataaatagaaaaccattttccaataatatttctataatatattttatcatttaataataatatattagcatcaaattatattaataatcgaccacaacctaatgacccaaaaacaaagacgaccatatagaatttaaacttatgaaaatcttaaatatagttatgtagctaaaactatacacgagattaatatatattgtggtgtgcttgtgacaatgaagacaacaacgacgcatgctacaaaaataagtcaaattttctattggaatcatgaacccactcaaccactgttttcttacacaattggtttttagcgataaaaaacaccgtgtaatagtaaaatcttgaaattgagtgtgagaaatacataacgtcgctaatagatacatgaactgttcgactactgtttttatacacaattagtctttagcggaaaatatcgtgtaatgataaaaattttgaaattgagtatgagaaataatatatctgaaattataaactttttaaccaatgaaaatcataccgagagtttaaatttatatctagaaaataagcatggccattagacaccaaaaaaactcttaatttactcacttagaagttaaaacacattttccccattgtttttgatggtatgcattcaataaaacgttagtaattgaataaataaaaaattatggtaatttggatatattgtagttatatgcaattatgcatttaataataggttttaaaatgaatgagtagtcaacgacgtcgctatcgatttttttttgtgattagttattgatttcctttataattttctttttttttttttattttctttataattacgatcatatgtttataaaaataatatttttaatgattttatgattagaccttcactattgggtcttcatatacaatctttacaatttcatttgtcatttttactcatctttgagaaacatcagaatcgtattttacttcatctgactctgtttgttttaccgcttatgttgaaccgatgaaattattgtttttgttttcatgtttttatttatttattttacatgactaattttatgatttaaatccatgattataaaccttaaattgttttattttagtggatatttataatttagggaaaattagtaggatttcctattatttctagtaacgtgaagtcattgtagaaaacaaatagtcaaagaagttatgggtccaatataaatcattataaatttagattttttctaaatttttatgttaaatttttaaattaaatatttataataaaaatgaaattttaaatttttagacaccaataactaaaatgttaataaaattattttttatccaaaattataaaattaatatcataacatctaaaaattaatagttaattgagatgataagggtaaaattgaaattttatttttgttatgagatcgtgagtatgaaaataacgacatttaattgcttgggtattaaattgcacagttttattatttcatgtatttaccttccaaccaaaaacaattaggtattaaacgtccaaacaaagaatattttaggtttgtttttggattttttccctttttattgtttatagttgaataattttattcccgtgtaaagttctcaaacgatacgtttcttctttattatataagatattatttctttattttattttttgttttctctctctttcttcttctctttttttcctctctaaatatattattcctctctttcttcccttcccttgaattttaccacaataataaattttcaaaagtcaaatagacgatctaaacttgttctcgatccactattattcattcgattgtaatttgttcccgatcaaattctattactcattcaatatgaacttgtccccggtataattatattactcattcgatttgaacttgtccccgataaaggtattagatctggacatgccatgcaagatgggtaatataattagatcgggacaagttctattactttttctatagtcttttttaaaattaacactctgttaaatttagggacaactggctttgatgattgtccttcgtcatatgaggtgggtttatccgctagaaatcttaacttacttttcggggatttcattcactatatttcataattattgtctacggtaaatgttaactacatttaatgcaacattttgttcttattctccgccataaagctgtttttctggcacaagttaccatttttctctaacacaaactttcacacttttaagggacaaaattgtcaataaaatactataataccataaatatggtagttttagaaaggtcaatacaattgtggtagatttggaaagaatcttttcaaaagttgtaaactagtcaatattcccaaaatttagggtaatataatattagtttttttcaagtcaaatgtaatctcaatttacttccaaaacaaaacaaaataaattaatgtgttgaatttttaatgcacatcatatatttggatctctaattaatttctttgactgcattctgcaaacattatctataaatacttatttgatagtgtaatttttattcatccttaaattactcaatcaatttttatttctaaaagaacaaattattgttatggaaccactaggagatcgtcgtccttgctgcgtatgtatcaccaaaaatagaaattgtcctagattctgcgaatatgcggaatactttccatatgagttgtatactttttttaaaaactttttttccttactattatcttctgctaaacattttacttgatattaattaattttaattttcaggcgaagtcattatgaaagtactaatgaattgtttggcacaccaaagatcattaagatgatgaggcatgctcctgaagaaaaaaaacaaatgcttgcaacttccataatcatggaaggtaatgcttggacaaatgatcctgtaagtggtggatttggtatggtgcaaaagatcatgtggaagattatgttacacaaagcctaccttcatgaactcgaggagaagattaaggaagagaaggaaaaaatcgagcttcatctttaagtgatacattgtagcatatattatttatgcatcaaataatgattatttaatataaaatcatatttaagatgaatattaaattaccgtcgagcaagttaataccttatatttcttattcatatttcttgtgattaaattgtttgtgtatttagatgatcataaatgaaactttgaaatctagagaaacatattgtacatataataaagtaaaagtataaaaaattgataattttaaaaatacgagaacttctcgtttcttgttctaagtaaaataacattccaatatagaattagggtttagttgcctttggaaaattgctttgtaaaaagctagatattatgtttcgtttagtatatctttgactcatgatatttgacatttgattaaaaatcatgtttgccttacatgcataatatcttaaatgcttgtatcacatgtctctaactaccacgaaaaactttgtgtataaaaaattcaaatctttaatttttggacgacaaattcattagcgttactaatttcattgtacctatcagttttatgacgataataatacaatttatttcgtcccaaaaaaaataatatttatttattaagttaataggaaaataggtgtaaatatacaaatatgtatatgtaatatgcaattagagaatatatgaaacaccactatactatcaacattaatattagtaagatgagaaacataaattagatgatttgagtcaatatttttccctagtaatcttagtaatagttttttttttcttttatttgcatagttcatatacatatttgtatacatatatgttgtgcagatctaaaatttttgtttaatacctattttgcacctctaccaaataaattgtgttagaattttaaaaaattcataatcacaacaaaatttctaacactatttaatttgttgatcataaaaaatctgaatttttatgcacaaaacgtttcttaatagtcaaaactagtgatataagaagtgcaatgccaagaattatagagatttgaagcgaaattttaaaatgacatgattatacataacttttaagttctaaactataatcataataaaaaaaattaagatattaaatagagcgaacagacgtttaggtttttttcggatttaccatattcatcagattaatccatgctggattgagaaaaagcctcaagcttggaacaactacatgtaaatcataacctcgagatattttaaggctttcaatgtcccaaagaaagttatttggtgtcgaatccatgagtgaaaattgagcttttcacatagaacaaagagggatatgaaatagtacaattttatgttttaaataaagaagataaaatgaaaggtaaattttataggtttagccagcagagaacaaatgaaatgaatgttttaagtttagacaccaagaacaaacttagggttcaagtctaagcttagtcatatacttctgaacaatattggactttattgttcaagtattaaacaaacattgaaatcttcttaaatcacttttcaaaatgcaacgaggatctattctttttttttttttcagaagaagctacaagaaagaacaacaagtttggatatgaattataaagttagtaatccatgtaagagacgcttatattaattaatttatactgttaattatttcatccgtaatttttattattattcaataaagtatttattttactgaattaaaaaataataattatgggtgtttggatattcggtcgggtattttgggtttgagtttttcgggtttagaattttaagatccgttcgagtaattcaagattccgggtcgggtttggttcggtttcgggtttagttatatattgaaatatcaaaattttgtgtccgaatctattaaattatttgaaaatttcaaaaattccctaaacaacccgagtagttttgcttgaatatatttaaaaatacataaaagtaactaaaatatccgaaaaatcataatattgtctatatgtaaatataaatataaatattttagttatatttatatttaagatatgtttgggtaccagttcgggttcgggtttttcaggttttgaagtttagattcagtcggatatttgaaaatttcaggttcgaatttagattgggatttttggattgggatttttggatcgggttcagatcggttttttcggattcaggtattatgtccaaagtaaaaatggtaaacggtggttgttttgtttgtatttgtaaagcagaagagagagagatatagagacactgaaagcaaagaccaaaaaagaaaaattaaaaagagagagaggaaaatggagagcgacgaagcagcagcagtgtctcctcaagcaacgacaccgagcggaggaaccggagcttctgggccgaagaagagaggtcggaaacctaaaaccaaggaagattctcagacgccgtcgtctcagcaacagagcgatgttaaaatgaaagaaagtgggaagaaaacgcagcagtcgccgagtgttgacgagaagtactctcagtggaaaggtctcgtccccattctctacgactggctcgctaaccataacctcgtctggccttcactctcttgcaggtctccccctttctcctttcctctccttctagggtttcgtttcgtaatcgtttcttagctttgaacattctcatgtttggaatgaatttagtaaaatcttacacatacattttctcgatttctgggtttaagtgagattgttgcgattgttctagttagggttttggatgtggctctgtcttcataccttgatatatctgatgttctattcatgaattgttactattgattaccttgttggttactaatgactaagaggaattttcagtttctctgagtgtttatatctgatgaagtctttagttgttgtgctaagagtttccatttggtgaattgttgtttgatttttttatagatggggtccgcagcttgagcaagcaacctacaagaatcgccagcgtctgtacctctcagagcaagtaagtttttagctttctcttgtatcttgttgtctcatcttctttatatacttctcatcgtattatttgtatttttcttggttgtgtcaccagactgatggaagtgtgcccaatactttggtcatagcaaattgtgaagttgttaagccaagggttgctgcagcagagcacatttctcaggtattatgtggtttaatactaagcttgtgtcctttccatatcctactccacactacaattggtttcatgtttgacacttatatactatcttctgaaaatgtgttctcagttcaatgaagaagcacgttctccatttgtgaagaagtacaagaccatcattcaccctggagaggtgtgaattctgcccactcttgagatatttctgtattgacattgttctttttagttctatttggtttgttaattgtatctgcatccctgtttcatctgtccatgaagttattcgtttggcacgttggtgaaagtaaattttgatgtgtattcattactaatttgcaattgcaggttaacagaatcagggaactcccacagaatagtaagattgttgctactcacaccgacagtcctgatgtgagtgctgcttctattttgttatggtcatagcaacttgaaatatgtcggtttcatatttctgtatttggcagtcaaagagcatcctttgttcggacatatgtccagtttcagagttatctaaatacaatatgttgatttcaggttctcatttgggatgttgaaacccaaccaaaccgtcatgctgtgcttggagctgcaaattcccgtccagatttggtatgtccacttctgagaatgttgttttatgctttattcttgtttgtttctcatcattggaagtgataaatctctttgatatcttcttaaatagtgcttcttgtttgcatcatctgaatgaaccatttttcatgcagatactaactgggcaccaagataatgctgaatttgctcttgccatgtgcccaacggaaccctttgtgctctccggaggtttgtgtttctgtaatttgtagagtccaatcctgtggtttgccagtttctcatacaaaagttcttctcttaggcaaggacaagtcagttgttttgtggagtatccaagatcacatcacaacgattgggacagattccaaatcatctggatctatcatcaaacagactggtgaaggtactgataagaatgagagtcctactgttggcccacgaggtgtatatcatggccatgaagatacagttgaagatgtggcattcagcccgacgaggtaacttcttagaacagactccttctattgatatcgtgtttgtttatgcatactgcagatattttcatgattttctaataatacttctggtgaacttttataccgtgaagtgcacaagaattctgcagtgttggtgatgattcttgccttatactatgggatgcgagaactggcacaaaccctgtcacgaaggtactctatcttttgaatcctatcaaaagtttgaagatttacctccttttgatattatatcttacttttttgttttccaggttgaaaaagcgcatgatgctgatcttcattgtgttgattggaatcctcatgacgacaatctgatcctgacagggtatggagaaatacatacaaatagatgattaatacatacttagtatctaattaagaaattgatgaatatttcaggtcagcagacaacactgtccggttgtttgatcgtaggaagcttaccgctaatggagttggttcgcctatttacaaatttgagggacacaaagctgctgttctttgtgttcaggtataatcaactttttttttttttttccttctttgtatgaagtatatctcttaacccactgacactatcttgttattcaattcagtggtctcctgataagtcatccgtctttgggagctctgcagaagatggtctcttgaacatctgggattatgacagggtgtgtacatagttcactcagatgtctaaaattaatctttcttcactatcatcactgaaacatattcattgtactcatgtttggtttgtttaattaaccatcaggtcagtaagaagtctgatcgtgcagctaaaagccccgctgggctcttcttccagcatgctggtcacaggttcttaaagacttatcttgatttttcttgattgctttctcattttacttgcttctaagttcccttgtttataaaccatattagggacaaagttgttgatttccactggaatgcttcagacccttggactattgtcagtgtttctgatgactgtgagactactggtggaggtggaacattgcaggtaaccttgaaatctttcttggtaccttgataagcaattttattgacataccgttaaatgttgtttatactttcttctatggcagatatggcggatgagtgacttgatttacagaccagaagaagaagtcgtggcagaattggagaagttcaagtcgcatgttatgacttgtgcctccaagccttaagagtaaagaaaacccattgtctatctatctatcgcctatggtaaactaatgcgggttttagcgaggagtcttggtttttgtaaggctggtttgtcttttgagatattggtggtagcttttaggacctttccatatcagttaggggtacatggttctggttcatgatcctgtttcatcagactcttaggtgctgttttgttcaactgagatgttaatcaaatcggaccaactttatgtgttttggtttaaggtttcaatacttggcctgaacctaatgattccttctctgtaactagtcgagaccaacccggctacaaaaaaaatagttgcattgatgttcaaatgcaaagcagaaggggtcattataaaacaatatagtaataagcatcgcaaaatttggaaactgggttcttgatgattcgtcgcatcttaaataatgtttgcattgtcgttttcattagaaaaaaactgttaatcacgcttagcagtaggattaggtgattttcaattcacagatttattcgtaggattttgaagaaattttaagtattaacagtcactaaacaatcagaccattgcaaatcatacatagatcacctggtcatttcataaaactaaactatatgataatgttttactttattgggcttaacgttaatggtcctcccgcttaataggctttatgaagtctcttgatgagctagagactttaaaaatccaatcacaaagcctacatgagaccgtcaagatcagtcagagaagatcaaacgaagaagtttttgttccaaaagatactaaagagagaaacatgaatcaatgtattgcttgaggaataaggtagggaagctaatcaatcacaagtagacgaatcggagtatttcataaaattagggtttttagacctacattttcttttctttttccgacgatacttaaattgctcgagaaactctattagtgagaaatcccccatcggaatctcgatggaatcatctccttctggatccgaacctccgcagaaagtcgtttctaaactgcagaaagtaggctggcgagctacgatgatcttcaatctcggttttgcaggttagagaaatcttcattactttcttagtaaggtttttagttttacgtccgtaatgtgttcgatgtaatgcctagctgagaaagttctttcctttttctttattaatttttgagaatagaaaatacgaattcttctagcggtcgtctgatatatatgatactacaatttatcccttgaactgttgttgttgtccttgctttgattctcgaagaaagctgattgcattactctgagagtgtttgattctccactctattatcagatattagaacatgcttattgaaaggacattttttggatctgtatctctcagtcactgttgatgttttcagcgacattgaattaagcaaatgtagtatctagaaactatctatatctctgtgtgcgtgtgtgtatatatcttggctaagcatttttgcgttgaatagaggattcacacaggttcttgtaaattttctggttcatggacatgattgcacatcttattatcttgtactcaatacttttcaaatgtttcagcatctcgatttttagctggcagaactacaagcttggtctaaatcagaattgagaaaagcatgcttgcttgatttcttatgatatagcattcatgatagacaacttcaatgtttgctgatttgatcatttggttctgcagcttatatatttgcgataaaacgagaaaaggacattgatgcggacgagaagaagaaagttaaaaagggcagcgaggctagacataaaggtgtgaaaaagggtgctgttaacaccgaaatcgagaagaaaggtgcagaagaaactgataaggctaaggaagcagaaactgcaataccggagaaggaagaaaccaaactgatccctgaactggatccactgtttgaatttacagatgcaactgatcaatccatgtttcaaactgtggcaactgaacatgtaaaggtagcaaggaaaccaattccagaagatgagcaaaaggagcttttcaagtggatattggaagagaaaaggaagatagaaccaaaagacagaaaagaaaagaaacaaatcgatgaagagaaagctattctgaaacagttcattcgtgctgagaggattccaaaacttctacctgatgattccgttgattcttcacttcgtgattgggacaaattcttctccaagtagaacgaatacagaaactagtgtgtacttgttttttgttagtacaccaaatgaccattgttggctttttagttttactactctgattgttactctaatcaacgaatagtttaaatgtgatttcttgggggttgagagtggcacttttataaaactttggggtaatgtttctatttcttataatataaaggacttaaaatataaattcaataaaaataagggtgtttctgagaaagagggtataaatagcttaaaccctagagaaactgaagaatcctaaattgatcatcgtcgtcctttgagtaatttagaaaatcaaaatgggtcgcaacgtcaaaaccaaggcaaagaggaagaacaaggtttgaactttttgaatcccagctttatcttgtttcgattctccaatctgatgttctcaaaccaaaacctaattgtgtgaattggatttatttttgtttggttttgaattataatagaagaaagcagaggcgtcttcttccgagataccatcgataccaactagggtttggcaaccaggtgttgatacccttgaagatggagaagaacttcagtgtgacccttctgcttataattctctccatggcttccatgttggttggccctgtctgaggtaatatcatttctactcctatacatgtgttcatgaagctgaaagcgtgagacttaagggataattcaaatgagaagcttcttctttgtttgtcaacagtgtaaagaaatgtgtttgcaagtttacgattcattaagttaagaaaactactgtttgtgaatgattacagtgaaagttttggtgatttgatggctttcaattatttttctcagctttgacattttaggtgataagttgggtttgaaccgaactgagtttcctcacacactttatatggtggctgggactcaggtaagttttgtactttttatatcttcatatgtatttgtgcttttagaatcctgtgtatacgttttctttttttctttaggctgagaaagcagctcataactccatagggttatttaaaatcaccaacgtatctggtaagagacgtgatgttgtgcctaagacatttggcaatggtgaggatgaggatgaggatgacgaagatgacagtgacagcgatgatgatgacggagatgaagcttctaaaactccaaatattcaggtaattcttgattcgttttaactcttgtgttattcattcatatctcttgtctcctaaggcgggagagtcctcgtggttgatattttctctcaaaattttggtatacaggttcgaagggttgctcaccatggatgtgttaaccgtatacgtgcaatgccacaaaactctcatatctgtgtctcttgggcagattctggtcatgtacaggtaagattatatttttgtctactttcacagcttgggtgtctttttttgtatgtgtctttgttaatgtggattagcttttgtgtttcttgacaggtctgggacatgagctctcatcttaatgctttagccgaatcagaaacagagggtaaagatggaacttcaccggttcttaaccaagcacccttggttaacttttctggtcacaaagatgaaggctatgctatagactggagtcctgcaaccgctggaagacttctttccggtatagttatctcagaaatttctgcgatactaaataattacatgcttttcggcatggtcaatgtaatttttttttctccactggctaggggactgcaagagtatgattcacctgtgggagccagcttctggttcatgggctgttgatcctattccgttcgctggacacactgcaagtgttgaagatttacaagtaaaactgccactttacagctaaataatatgtttgcttgtaccatttccttttggctgaacaatctgtttctttattccagtggagtccagccgaagaaaacgtgtttgcctcatgttctgtggatgggagtgttgcagtctgggatattcgacttgggaagtcccctgcactatctttcaaggcacataacgcagatgtgaatgtcatctcatggaacaggttcttgtcccactatgctgtataacttaattctgtttggttttgtgcttcccacgaatgttgtagtcttaatttttcttctttcatgaaggctggctagttgcatgttggcctcaggaagtgatgacgggacattctccatccgtgatcttagactgatcaaagtaagttaaaaaccgtagctatatattttccttagcaatctcttaacaagattctgatatggtggcatataaatcttgaactagggtggagatgctgtggtagcacattttgagtaccataagcatcctattacgtcaattgaatggagcgctcatgaagcttcgacacttgcagtcacttccggtgataaccagctcacgtaagcaagaatacaatacacaccgattctctccagaaaaaccaaaactctgtcttaattgtttttggctatctgttgtatttacaggatatgggatctatccttagagaaggatgaagaagaagaggcagagttcaatgcacagaccaaggaactagtcaacacacctcaagacttgcctcctcagcttctctttgttcaccaagtaacattcttacttcaactatcattagcttggtttatttgatctatgtatattttgtctgaaaacctcgattatttttttggggaaaaccagggacaaaaagatctgaaggaacttcactggcacaaccagattccggggatgatcatctcaactgctggtgatggtttcaacatcttaatgccttacaacattcagaacacgcttccgtctgagctaccagcctgaaagacaaggtcttactctgaaaactcttgaagtattactcatagttttgtgttgtcctctctctgttctctttccttgtatcattgatggcaagttgcaagaattatacactctttcacaagtttcaagttttcatcatcagtttatttactgatttcagttgtgacaaaatgtcaaattttgatttacattctcctctccagtaacagaagccacaagcctaataatagtttaatccttaacaagtaaaaaaaaatcaagtagattaattgttgaattctgctcataacattctccaatttgaaaattacaagtagtggataaactttgattaaatgatcgaaaacactcatgtagaatgtaacaactatcatgacgatgatgagccatctcccaaagacaactaacaaattgtgttgttcaacaatcgcagtcttggtaaactccaccgctatggaaaccaattccttctgatgtttggtgtaaccatgattagctccttccacaatctccagcttatgattcggtataacctttgcaaactccttagcatcttccccaggtaccacggtatcatccgaaccatgaactgtcaaaactttgcattgtttatcaatattgagacaagcttgatgcatatcagtgtttaacctatccattaaagactcttgagtaacacgaaaacaagatttgccctctgtagcatcaataaacccctgttccttaatcttttctatataaccatctccgagacgcacatcattcttaagatcaaaacgtccagagatattgacgacattgcggatataatcgggaaacttggaagcatagagaagaacgacatcaccacctttactatgaccaagaatgacaggaactagacggttcatgatgttagaggaggacaagtgttgaataacgtaatgcagatcatcctctgcttcactgttgaagttaccataatagaaagttccttcactatctccgttaccagagaaatcgaaacgaaaagagctgattttttctttctccaaagctgtagccacgtttttgagaatcttgttggtcttgtccgatctaaagccatggcataagaccacaacttcttttgatccagtttcgtgaagcagacccacgagcttctcgttgcggcggttcggaatcacgatcttcgttggcttcatcgtctttttgcttcaggtggtaatcgtagagaagaaaacaatgaggccccctattgatgtaaaaagaataaggtaatggaagtatggaactggaactctcgccaaagatcaaattgcatttttctgtggagatacgaatgagactcgtaatcactttttcttttttttgctaaactaaaactcgtaatcacttattcttctcatgtcgatattcagtggaaatttggaccttactcgtaagtagactcctcaaccatggtgaaaactccacagttttaaagtcacatttctattgtaaaaacagtttttgttttttgtttgaatgaattttacacacaattagaaaataaaaagtgtttgttgatacaacaaaaaaaataacacgtgaagacttatgagctaacaggcttcccgtttagtttagggaaaggatcttgcttgcttagaactaccactttgctcttgtgagctaaataacctttcacaaggtttttgtatatcaatatcgtcattatacattccacctgcaaatacagtattattttgacaactgtgagtttatagaagatttcaattttagaagaagtcaaaagcaatgaatgggatggtattgtagaacaaacctcgtccagatccatgtccatatctagccatcttagtgctttggcaatcccttcaagcttcagctggtgagctctcgctggatcactcagcttctggtttatataactgaaacattgataataataagagttataaactcaagaatcttggatggtatcatagcttgtctttgcttacattttcttcatgagtctctggtagacttggagctctagcttttccaagacaagatacacacccgacctcaagaacctgtataaaagaagagtattagatcgagatattaagttgttcggtgatagaatcaaaatactcatcatatagagacttgcacaactctactctcgacccaactgcaaatcctaacccctagacaaatccagaacatcccaactctttctgccccaattttcttttaacctgttagctctctacctaagaaccaggtgttactgacctgtcagcagagctatataatccactacaagcagcctatactaattccaatactcatgctctagagtatccacaaggactctatcatttggattagatgagaaaagcaagatatcgaaagaaatacataccgatcttcatgttcttgaagagcatgccggagaagccttagatcaccctttctcagagcttgcacaatctttgtgtactggacacgtagagaaataggattaagagagatatgatatcactcagcagatgcgaaataagttttgacatagattcgaagaaaattttatagaacaacagaaaagtcgttacctcatgcagattataatttcgcaggagctcatcttttggtataattcctaaagaaagcttcaccggtaccaaatactttaatatcatcctgattcacataaggccacattagctgattaagcaacgcaatgcaagagtaaggtaatcacagagtaaaaccagaatcagaccttatatttcgttctcttttggggttgcaattttgcaaggcatatgatagctttgtatcagcctgcaagatccaaaaaaagagattaaatgttactatcaatatttggattgacactacgaaatgaactgtgatggtaagaaaaaatctcttagtgactcacagcaggaaaattttcgttgaagacttctaatcggccggtataatacatgtatgtaacctggtgtttgcgaagaataaacagaagataataagtaaccgaataaggaggccaaaaactaaaactgtttgcagagaactgcgccagaccttatctcttcttggaaactcctcaaagtcaaatatccgagcagtttcgatacttcttattacacttcgacaaagattgacggttccaagctaaaatacaaaattggggatacctgtttagtactccatttaatggttaaatcataaatatcaaactgttgccagaaagcatatcaccttaaagtaggtcttgaacaattggcaagtcacatataatgctccgactcgttttggacctttcccctatagtttaaaactacataaggagccggaaaaaatattgaacacaaatataaactaatattcctgaagatatatagatagatcaaagggaaaacttacagcaagaactccaaaaactttcatgagaagagacccagctgcttttaatttctctggagactttccattagaagttaaatctttatcagcctgcaattccatgtggaaaaatcatgctttcagaactgactcctcgacacaatgaaaccagacaaggttaagattttgaaaaagggatatacaaatgagatactaccttttccgcaagaactcgaatttcataacaaactacatacagagcttccaatgcccaagcagattcccaattacgaaactcctgaacaaatgcactgcacatatagaatccatcagatatcagacattgtgaacagacaaaaaaaaaagcttatcaccctgaaatcatattagacatcaatagaggagcagagaggaacaagaagactttacttggcaaacttatcgaaagcaaggtatgcttcgactagattcccaactcggtaactttgtagagaacgaaacacatgagccagaatctcgccatattcagagaatctatcagactgtctaatcaaactgctagaatcctgtatcagtcaaagaaaagaaaactcaaaggattcagcactttcacagctctctacatataaataaaaaccctaaatctaaaatccatactcataaactcaaacatagacatagagtgttcactacaacaactcaataggagacactttcacggcctaaattcatactcattggtgaagcaggaggacccaattggaaaatcatactcattagtgaagtaggaggatcctagattgacattgattgaacctaaaagatacacactttgctaacataaagataatgttcctagtgttttgagccctaaattcagaaattcatactcattggtgaagtaggaggacccaattagaaaatcatactcttaaggatcttacattgaatcgatttaacctaaaagttacaaactttgctaacataaaaaccatgctcctagtgttcacaattcatacgagaacccaatcggaacatatcagaagcatcctggatttgaaatcgaacctaactttaccaatttacaaggatcatgccactaatcacaggaacatactccaagctgctaatttgaatcatgggtctcgatttaacagagaatatatgtacctggaagacgttgagtgcgtcggcgagtgagagaagaggtggagaattggaagagaaagagaggagacggcaaagtgtagaagagtcttggtacgaaacggcgtcgcagaatcggtttaggtattcagtgattctccggtgagcttcacccatactaacgtacgccattgtcaccttcttcgtctgcgtcttccttattctttgagagagacacgaaatcaaataagtcgccaggaaaaaaaaggaaataacggagttgagaaaaacgacggcgtttggtaattaactaaattgttactacgtactagtcttttctggtattagacttattgacatatgttagttgggccatttaaggcccatatgaaatacaatcattaaaatgtttgaaaatttatttgtaaaggatttgaaaatatcattagtgttggaaggattttaaagttcctgtaatcggtggtactgatcatgaattttttttagagtttttaagttcatataatcgttttatagatcatgattaatttgctttaaggttttttaagttcatgtaatcgtccgtaatgttgacatctgtatgtaaatatgtcttcttagcccgatggtgacgtgaggaactttcttgaagggacatgaaatcaatttataccatgcatataactcaacaagttgccaaaaactcgaagaaatgaatataatcaacttgtcaaaagtaattaactgatcaaataaatcacttgtttccaaatgtgatttatactttcacacttctatatattcccattgatattccccttctttcatagttagcaaaggcctctactacatgtacatgataaataaataaataaaaatcacgctaatcatataattatcaatatattttattcttgaacacacaattaatagaaattttgagttgagagaagtcaatccaggattagtatttatgtgtaatgctaaaagttgaagataacgagaaacttgagaggtttttaaggttcctactttatttttggtatgaaggttcctactaaaatatgctcttatatatcattttatttaaaaagcattccatttgaaactaatctaaaaatctttagattcattgttcaccactcatagtaagagttgcatgtggaccatcttatattctctactttctcatacttcgtatttggaacctttattccaacaaattcaatgtgtaaagccatcattacgttcatttatttttgcctttttgcgtacataaaagaaacatcataacttgacatgtaaaaaaaaaaatcattgattcgatttgagacttttgaaaaccttgtcaattttataaaatttggccgatttgatctaatccacataatccatcccttatagacgaaattaaattttcaaaggggatattaaaaaaaaatatcaaaaaatggaaaaatttaatatcaacaattttttttttaacaatactccataaacataataattgtattaaatttaattttttaatacaataaacatttttaacaaatttaaaaatataaacttttcttattctctatgtgttatccatcacatcaatttcaacactttttttttttccgtcaatttcaacacttttaagaattaaaaagtctcattttctttttattcctttttttttaaaattcctttatttttcggataattaaatgattctctaagcttcatagcaatgaaacactttgaattcgcatttcggcgatatagtctctaataacaacctcgccgtgtgctcttgcctcaccaccgcatcttctttctccaccagaaccgctccgacgatcctctcgtatcctcctccaccaccattagccacataatcaaccaacgccgcctgtactggtcccatactaggattatacgccgccgattccatataccaacctctgtacactttcccgtcacaatccaccagcgaaactcccgatggacataaactatacggcgcgtacgatctattcgccgccgctaaagccgtttgtttcaaatcggcggatgaatcggtgtttccgttacaaatcgaatccagatctgagattttgagatggttatcgtgagattcgagaagaagaggatgatctttcccgagaagatcgtcgggaccgaatctgtgtggcaagaagcttccgagacgtaagaatccgtctgaatcggcggcggaatcggaatcggcggagttgtttggatcggtgataaggattttgatttcaggtgcgtcgcgaatttcttggaggaattgacggcaatggccacatggtgcggcggagacggcgaagaaattgagatgacgttcaccgttgagtgtgagattggtgacgaggaactgttcggcgtggattgagtggtggagagggagatttgggaattcgacattgacgcctaagaagatccgacctgatgatccgagtccgacgactgcgacgttgaatttcgaaatcggagttcgagcgtaggattgtgctggtttgactagcgacgggaggagctgaatgacggaaacgccgagttgtttcgcggcggattctgcttctttggattggattacgaagcttggcttatccattgcgggttgatccggtttgggtcgcgtaaatgggtcgggttatttttagatgggagagatccgggaaatgaggaattatgaaatggatgctggacaaacaaactatttatagatacaacaacgtaggaaactacattacgcaaatgaagttttggttcggtttcggttatgtttcggtttacgtttggtacaaaatagaaaaattatatcagaattgaatttacaaataatatgatttcggtttgactaagccgcatggaatcattgttatgaaaactaccaaaaatgcaatagagtattagtgtaacgtaatgttaaaatcgtggtctaattaagaaaacacctagtagtttcatcaaccacgttacgaaactacaataatctccggataatattattttagaggtcagaaatgaattaaactatagctaaaagacagcttagtttcatataattttgatagtattaaacattttaattccggtgttgtcaattttaagttcccaaaaaaatagttaagaacaaaggtgatagtactattgttgacaaaagaaaacaaagattaggttttgttcttatcgttggaatcaacgtcacagaccaaaagagaagtctttgttgataattacgttttaaccaacggttaagtttttcttaatagaagaaactgagaaaactctatgacaacaatcagttttccaattagggtcagttgtttgtttacatagataagtgccattttgtcgaacataaactgataaacatagaaacaaaatccataaaaagaaaaaaaccttttccacacacaaagaaatcataatatgacgagctatttccgaaaactccaatctcaacaaactacaaacaaatttatagacacaaacacattttagacccaaccttgtttgtatttgcggaagagatcctcagtctgagcattcctaaacgcgctacaagcaataacataaacccatatgagaacaacgactgtgatgataagtatgagatttgctttacgccattcttttctaaggtttcccaataaaccagctttgcatgagttgcaattgtaacaaagctggctttggtcattgctccataagtaacagtctgcgtctgcagccatattggttggatttagccacagtgttgggttcacaaagttgtagccacatgcggttggtggtttgcagcagccggactgtaaaacaacaaatgttcaagaaattgtcataattagatttgaccaaatatatgcttaaccatgttttcaaatatgataatcatagtcttaaagatatttacactttttttttattggtaaaaaatatttacacattgtaaacacaaacgctaccatttgcgtctgccctttgtgtttacaacaaaaatttcattttgcttaacatggttaatattatgggttcatgtggagaaaaaaaaagtatatactaaaggcaaacacaaacaatcaagagttcaagagtcaagacctaaaacaatgaaacactagttttagtctgaaagctataaaaataaaacgactacaagaaacctaaaaaattgcttgcttggtatgaaagtacataaaaaaaatgaaaaaacatgttgaatcttatcacagaataatcttcttttacttatgagtaaattttggttctgtctcgaggacgagaaattgtataactctttcttagaaataaacttattttttcttgagtcctaatttatccaataagaaaaattataatgtgagtggggcaacatgggagggatataattatctattatgtttcatgatggagacaaagacttgtgatcgtaattattgaatcaaatcattggtccaatatttaataatgtctaatgactaaaagatttaaaattcagtcgagacctcagcatctaggcttatttaattattagtggttccaatcttgttacagtgacaatggactaggatgacaacttgctatagaagttttaggaataaaattatttaaatcacccttaatctctccatgtttaaagcttaaaagacataaaagacatgacaatgaattttaagagtgattttaattaataaaattaaatagaaaaagtaggaaattttgtcaagtttgagttgtgatcacgaaaaacactatctaaagtgaatgggatcattgaattttatgagtgagatagtgacaaaggaaaaatataattaatacacagataaaacatagtttatcatgtaccatattgtgggtgcatgggtgggtccttatgatagtgtataattttgaaatctgactatcttactatataatcttgtggacttggtctccagcaacttctacaccagtctactaggaataaatatgtgttcaataatggtgattacatatgcctaatctatgagttttaccacaaaatggcactaactgcgaaacgttaagaaagctaatgtaggtttctctccaacactagaaaacataagattaattaagtcagaaaatatttttttagttttttcaaagatgaggaaatccaaaacgaaataacttaaagctgcaaaacaaaaaaaaagaatatagagaataagaacaattctcttttggacatcttcacaaaagctaaagagaaattttttaactttttgatttaaaaccacatactttactttttgaaagaaaaaataacctatctttctatggcaagaacaaaccgtaggtctcacataatctagagattttacaaaacattctctttacttcgtatcttatctccattaatcatctaataatatctaattaaacccacaatgattcgttggcatagttgcataaccgatatttagtctagatttacctctaaaccaaacctaaaccggaaactagaaatttcggggttctttttataaaagagaataaaagaagaaagaacatgcctggagaggagtgatcttagaggaggagaagaactgatcggcggtgatgaattcttggttgagtttaggacaaacattagtatcagccaaacaagcccttagccttccccagttcttggaatccacaacgttctccttaagccaattcgagaacccttcaagcctatactctttataacctctacccggaacccgatacgatccatcgggccgggtcacgacgaatgcaaatataagaaccaccagcaaaagtccgatcaatatcgccatacagcacaagtaaaccgccagtagagtttccttgtacctgaaatatgagagctcaaagtttacatctttatgattcaatttgtgtctatgttttcaaagtcttgaagttctttgattcttacttgtaggcgccgatgaagcctgtggcggagacgacgaggatgagaacgccgaggacgacaacgggccaacggaggagattgacacactcgttgtctggctttgaagctagccatatacctgacgccgttattggtatggaacagagtaacgctagtaagttgagtatcgccgttaagttattcgctaacgccattaaattttctctctctctctctctttgttcttgaagattcgtgctttttatggaaagaaaatgaaataatgagagtgagaggagtgtctctgtttttgtcttaatgacttatgaggtcggtggttagagatgatgggatgtgtgaaaccagttactgctatttacagaaaacgatgttcggtttggtccggtccggttaatcactgattttgctgatttggatttttcgacaacggtggttttaagaaaaaagaattagatattggattaaagttaacatgtgaatgtcagaataaaatatgtttagcaatgaaaagttaggttttgaacaagttttgggttgtgatgtaataaagagaacttgttaatctggtcggaccggcttttggtttagaatttggaatcttgaacgggacacgtggatacgcgagatgccttttgtgttaatattcttccattctgcgagttaccgaatgcatcaaccagtgagaactatccacgtggcaccgacgactttgggtcatttgcattgaacgtatgttactttcgacagagaatgcaaaatggagtaagttccattgttcggaaatcggaattttcttcttttccaagcattagaggtttcggagcaggatttgtcgttggctgatgagtgaaatgtcgggtaatggtcaagagataagcttttgttttggttcagaggattgggattgcacacaagctgctcgatagaatgtgtgaaccaaaacatatggatgaatttttctcatctcgattttattgcgattggagaagaattttgagtcaatacacacttagctttcagttttagatgctgatatagaaatgctatttgtttgattctaggaattgggaaggaaatgagtcaaatcagagagaatatggaaagagatgatggcggagttgtggattacgttaagagttgaattacatcttataaatcatgaaattgactgtcaatcttagagcttagattacaagctctttgtctaatctcaagttcgacacagagcttgatgagactgcttcagtttggctttggaacttttcaagtggaagtgaagaaagaagagtgaagtagtatagctgaatcagcaagattctgacatggctggttatttaaattataaggaaacacaagaagaagacaaagtttttatgatgtgagtacagaagcgtcaaattccagatgcatcctaggctgaatccgcatttcccattttcttcatggtctcaagtctggggcctttgtctccaaacttggtagttgaataaagctttaggtagtcttgaaaacggtagccacttggatacaagagctttggagctggagatattatggcatcaccagccggattgtaaaacgtagcaatcgacagtctacttccatgcttcactgtcattacacggtgaacaacactcttgtacctcccattactcagtatctctagttgatcaccggtattgacaaaaatggtattgttcttggatggcggtataggaacccacttcccatctttaaagaactcaagaccaggcacttgatcatcctgcaggagtaatatgattcccccagcatccgtatgttctctcagccctctcataagctcaggacgtgggcattctgggtatttagccacttttgttccaaaagctggaccttttggaccagaaaaggcattcattatgtcttcctgatcaagaccaagattctcacacatgagcttggagagtctctctgcaaacttgtgcagttgacaaacatattcatccatcgtcttgctgcaaatatcaatttcaccctctcacattgtttagttaaataagcaaacaggtaaaaatggtagagcctttggtactattcaattcttaattactttacctgagttcctctgaaatgtttgggatctgacagatatttgaagttggtttatgtgagatgaagaaactgctttcccaatctgcatctgaggttttgccttcactcaaagccttgaccatctctgactggtaaaacttctctttcaaatgctcctcatagtgagagttaatcatcttcttcactttctccatcaactctttatcaattccatgattatcaacctgaaaattcactaactctttaaggatatacagtagacatatcttagaaaacactgccttgtgcataaagatgttatacataccatgaagaatccccacttatcacatgcatgatcaagaagtgacatggtcttgcttctcttctctccatccaactctgcaaaatcaataactggaatctccatctctctctctttgatcaaaaccatctcttttttatttactttttctcacacacagatttgttgaatgcaatctagaaagagtatttataggcataagtgaaaattaaatctctgtttctcttgtgtgttaggaggcatagttgcctacttggaggcaaaaacaatagtttctttcaacactattctgttaactcattgaatttgaagcatcattacgtttaatgaataaaaaattgtataagaatctgctttggaaatgtaaaatgaacaataggattgaagaaaagtccaagttcagtccatacaaccatgtgatcacaagtttttgaatttttcataatttcttaatggttttgggtcactcccattgtgtttccttgtaacatcatttatgtgaagtttctttcttcttcacaaggaaagttttttttttttttttttttttttcttatccctactcatattcgatggacctagccatcatgtctaattgtgtattatgtttttcttttcactgattttttttttctttaaaacttcactaaactacccatctaagcgtcattggcgtacttgtaaaatgtgttattctggtgtcaccaaatttggatatgcgtggtgttgtgtttagcaaggagctctataacactcatcaaatgataatatgacccttttttggtatgaagaaatctacttggcctaaagctacagtatcgaattgttacttgagaatagatttgtgaaaaggtacagtatcgaattgtttattttgagattaccggagtactacacaccatttgcaatagaaaaagaaataatgtgggtctaagcggaattaagcgaaagaattggcccctcctatgggcgctctcggttttgaatatatatttttgtgtgtcatattttataacaccttgtaaagaatttgggattgtgtttaaagaatgttatcattttactttttggggtcgaatatttcggatatcgttagttagtgtagctctagtctatataaatcagcaccgacaaatatattttttatgtggtgtaaaattcaaccatgacggccccttagagcgtaaacgggccaagacctaatctacaaagacttttcagttatatataactttgtttcgtttagtttgactgtttgaggaagaaatggtaatgttattgaatcttttgttttggtcatttggtgttgtaatatgttacataattcgaaatgatggtttatcgttaacacggactttaaatatcattaacatgcgtgtatttgagattacaacgaattgattcaacatttcaacttttaacatgttggagttaattattcaaaaagttaataccttgtcaagatatctaaacgttttcaaatttcatgctattgatattagttagggtcataagacctctttagagtcttcatatattgttttagtaaccccattaaaccttctgcttcaccaagagcctttctttccaatttaggtacattttcttttaagtatgagaatttggtaaacttaaactccaaactaaacaagccaaaagagaccaaacattacaatgaaccctaaacaaaaattataaaaatgttaaagtgtaatacgcaatttgcaaattcagcaactatcacctttactttgttcactttgttgtataaatgatttttgttctcactccctgaaccacgcgctaacggtggcgcgtgttcttaacacactttttagtttccagaatcgatggagactttaattaacattttgcccttaagcaaacaataaacaataataaaaaaataaaattaatttccctctctctctcaatctttgtgctttctcgttctccaaccaccggaaagagagagagagagagatctttgtgtgcttcttctacttcttcttcttctctctatcgctccgccgcgccacattcactgagatgcggcggtgtaaaaacaacactgacaaattctctgtgataacgatgaggcttctaacgcttcttctgatctgtactttcttcttcttcttctcctttgcttattccgccgagtcagataacgagactgactcagttgttacacgtgagatcaatggaaccgtcgttgagtccaatgccacgagtgcgaaacctagggaagatagtttcgctgatatgatcgatcgagcacttgagaaagagtttcctgataatgaccagaacgaaggttcctcctctctcactagatagatcttcatttcttctatttgttacctgagctagggtttctctagggatttcaattttgttattattgatccttcttctctagggatttatcattgattagctgagtggtttagactctctctttgtgcccacattatagcaattaatgcttttgtgttgtttcgattttgcagttcctgatccaggaagcttcaataatagtgttgctgatcagcaggttggttgttgcaagtttagatctttttttaactactctatgttttctttctttttaattaaaggcatgtgttgtgctcattaggcggttctagagactgttgcacgagttaagccaaagaaaaatgaaaccaagaccaaggaggagaagtgagtttttctgatgcttattttgccctgtttggctgtttttttacttttgtttcactggttaaagcaaactataacatatgagtgattttgttctagatccttctttaatttggataacgagaatggcgtagaggatactccaagactgatagataggaaggtaagcttcgatcgtcctaaattatttgtactatatattgctgaagaatgtataatctgttatgtacccatatgtaaaggcattctcgtgatgtgaatttgctgcgattttgatccaggacaacgtttttataatgtccaatccaaaatccaagtaccctgtactgcagctagatttaaggtgagtatagcattcgtaagagaagttcttcgttcgattatattttggaagtatctaacttacttttttttgttgggggcatctctcttaaatcggtacatttgtaggctgatatcagatttggtcgtcgtcattgtttctgctacttgtggtggaattgcctttgcttgtgcgggtcaaccggttagcacacacttcctttgcaaagcttgtgacttcaatattattttattagcattgagtatccagctttccggcattgtagaaatgattttgctagctcttactaatcaaaccatgacagcgttatttaatttctacactacttatggcaggtcattactgggtatctattggctggatctatcattggaccgggcgggttaagctttgttagtgaaatggtgcaggtagcttacatcagctttagtacttcaaagttcatctttttttttttcttcatatacgtttgtatgttttcatgactaccagattgcctgggacaagggcttgatttataatttttttgtgtagcacaggtcgaaacagtagctcagtttggtgttatctttctcctttttgctttaggattagaattttctgcagcgaaggtttgcatgttttcactctcttatatttgtctggtttctttgtcaatgcgattgaaacttttgagtcagttattgtactgcgtggttgcagcttcgtgtggttcgtgcagtagctattccaggaggtcttcttcagatatttttgttcatgtgcttgagtggaataacagcctcggtatgttctaaaagtgtagcaatcgagttaagaatgagttattaggcatttgtggtatgacatgtatgtagagtgcattaggttgacttagctgtttcttcattgcagttatgtggcggtaaactaacagaaggaatattcgtaggcgcatttctatcgatgtcatcaacagcagtggtatattctaatttcctatgtgtacttcaattaatattttgatcttgttctacactgtttgaatatttccctactctcacttattttctcttttctttactgtgccagttatattttcctaaagtattctttagacttgattgtcatatgttatccttacctccccatgattcttgtaccaggttttgaaatttttaatggaaagaaatagcataagtgctctacatggccagataactgtaggaactcttattcttcaggtatctctacctgataactctcaaaactatagcttctctattatcattttcacacgtttttttgtttttcctattattctaaaactgcatatccttttgatccgaaatatgattcaaatccaattccaataggtagtatgttgcatgcagcaagtacttttgttagaactttaatttactgtttcatgaatcaccaggattgtgctgtgggcttgctgtttgctctcctgccagttcttggtggcacatctggtgtccttcaaggagtgttgtccatggcgaaatcgtatgtatttttctcttccacgaatttctatgaaactatcgacaataccctgcttccattgttcacttgttacaataaaacctagtttttggttacactttctttttgactgggttttaatatctttccaggttggctattttgattgcgtttttgggagctttgtttgtattatcccgtacctgggtaccttggtttctaaaacttatgacaagcctttcttctcaggtatagacacatttcttacctgctccagttttggtctttaaattgtttatcaactcaagcgtttttcaatctttgacagactaatgagctctatcagttggccgctgtagcattttgtttacttgtcgcttgggttagtctgatccctttgttcttcttagctattggctgtttgcacatttgtgactctcgaattttcatttcttaaatccagtatcgttttggcttcttcagtgtagtgacaagctcggtctaagtctggagttgggttcctttgcggcaggagtgatgatctcaacaactgatctcgctcagcatactcttgaacaggcaagaagtcaagtttgactgtttcgaactagagggtctctacccatatattttggccactctcttattttgaaagtgtctttcttgcttatatactatcttggtttcctgatgaaatacgtttcctttctttggcacattctaccaaagtttttcatataaacctgttctgatcgcttctgtttccttgcaggtggaacccatccgcaatttttttgcagcactgttccttgctagtatcggcatgttgatacatatgcacttcttgtggaaccatgttgacattctgctagcagctgtgttactggtgatagtgataaagacggtggtagttgctatcgttgttaaagtctttggatacaataacaaaactgcagtacttgtaagaagcgaacccttttttttttccttctttctcatcattcgaaagaagccttaaggttttcttgtctgtaggttggtatgtcccttgcacagattggggaatttgcttttgttctgctaagtcgagcatctaatcttcacctaattgaggtaagctctctatgattattgatgcttagttatattatatgttagcatatatctttgaaaccgtgtgtgaccataatagatttctcataatttgcttttggtggagcgataagtaacaatgaaggggttttgtgtttatttgcagagcaaattgtacctcctgcttctgggaacaactgctttaagcctggtatggtctatttcctcatcatatttataataagttcatattcaaaaacgaataaacgaatattgacacggacgttgctttatcaatgaataacagtagaatttacatactccagtatcaatattgtataattactaaacaaattaaatgatgtaacaggtaacaacaccattgctattcaagttgataccagcagttgtacatttaggagtgctcttacggtggttctctcccgacagctcaaccgaggtaaatacaaatcatcgtcgtgtgtgtctctctcaatgactttggctcaaactcaactatgaactataatcttcatctgtacagattggtttcaaaggagagttgtatcactcagagagtgcaaagcgtatatcactgatgatccaaggttctcttcacgactcttgaagtgttgatggtatgttcacagcataacacgcaacatgaagccacatttggtctcaaggtaggcaaaggcaatgaatgggagcttccgaatgtatagatgctttgagatatcagaagagaacccccagaggaacctgtataaaatctctctacacgaagataattacagagacttgtaacttcacttcaattttttgttttgggattcttttttgagtaaaaaggtaggaagaggttatattttagtttgtttactttcttctcatgtgctctgaaacaaaataagaaacatctccaacgtattgtagtgattaccaaccgataaaaagctaaagaatttttgagttagtcgattacaaagtataaacacaaatttgaattgatacaccaaagatttctttaacatttcgtgggaggccgagtattatttggctttagcttcgaaccaagactctctggagatagaagctctggctaaatacatgacggactgagaggactacgggggctatcttaatttccttttatatgaatttttctatgttaatttaactttttagatattgatttccattgtaattaaaacgctgtttgtcctaattttattttatatatatattgtataggttccattaaccctacgatcaaaacagtttcatacaaactcgcctcatcttgttctctaagatcaacgtgtctgatcaagcttgatctgcttctcttttttttttgtttttgtaattattcttgcttgattcgatcaacgtgtctgagctttgattcaagtgggggtttggaggtatgtgagcgtcaaatcttcaagttttaattctggaattaggtttctcttagtgggttttttttttgtatcatccgagtgttgttgtttgaatataaatataaatccaaccactagaacatgttttacttactttggttttgttttacctccagatatataccgccatcgccatggataatcacttggaattagcgataaaggatgcaatcaccgcggatgatcttaaacgtgtggatcaagaaactcaacaccctttgttagctcaggagcttgatcttgattccttggagaatcctcctcgggccacaactcatacatatcggttatactccaagggtttggtgagtgaagagcttattaaggatgatacgatgctggtcgttggtctaggtttgtccctctgtgactcgcacgattacacgaaacaggagattaataaagctctgagaaaccaaaagctggcggcacacccagaagctgcggaactggctgccatcattcacggcttgaaatgggccttggaacttggtatcgaacgtatccaattcttctgtgacgactccaatatcttggcctacgtatgtttctctctctttcttcttttaccctgaatccagtatcctgtttgtacacctctcatgttgtttttacaggttactcgtaaagctgcacctaacgagtccattgtagcaaaacttttggagcatgtgtctcttcttcagacaagattcacgtcatgtcaggcacttgcaactgtaagcagagacgacatcgtttctgtcattaagctagcaaaagatgctatagcttcccaaactagatggtgtgaaggcgacaccgagtatgagagttgtccagtctgctacgcttacgtttcacctaatgataagtttgaggtgcaaggctgcttccaccgcatctgcgttacgtgcatgaggaagcccttctcatccgaacaaatactacgagggaacacagcaatctgcccttacccggattgcgagaatgatcttgtgccagaggattgtagagcttttgctgatgctgatgctattactcttatgatccagcgcaagaaggagaaggctatccccgttaaagacagagtctattgtcccaacccatcttgttcttttctgatgtcggacctcgacctcattaggcacataagcaaaaatcctcggcactcagaagaagcacggaagtgcatggagtgcggcttgtctttctgcaaaaaatgccatgttccgtggcactacaagaagacatgcgatgagttcaagaagtcggagtcttacctgaaatctgacgcggcgattttggagtcttttgtgaagacacaaggatggaaaaagtgttcccagtgtcagagcatcgttcaacatggtggcggctgccaacaaatgacttgcaggtattggacatttgttatttattgagcctacttttatattatttgactttaactatctgtctttttgttcctggcagacattgcaaacacgagttctgttacacatgtggcgctccgtgtaaaaagaagaaactgacatgtaaatgctcgcgttcagggaaataaacatccaaggtttcactatacagatcattccaaatagtttcttatataacttgttttgatggtgttgaagatattagtctcttctcatgttttctgaaacaacattagagacataccaaccgagaaacgctaaaactatctcttataaataaagagtttttgagttaatcgattacaaagtacaaacacgaatttaataaaagaatatttgaattgataaaccaaatatgagaggaagaatacaatgaatcaacgtgtgtggtggctttaacatttcgtgggaacccgagtttttattggctttaacttcaaaccaagactctctggtgatagaagctctggcgaaatacatgacggacttagtggactccgggggctatcgctaacccgaccaggccgatacaatccaaaccccatgaaaaagaactccattggtatcaacattgcatgtggttgctcttctgtcaccattgatccacaagcttgcacctgcaattctaaaaacatcaaagcatgttccacgaatctaaaagcctgaatctttagtctcggagagaagttaagagctaccagagctgtttttacattaaaccgcatacctcaaccaaggcgctgtactttctgtccaatgctgtcaccatgtgaagagtttcagagtggaaaggagattggtcgccaacaaagatgagtgtacggcatttcaaactcttcaatccatcagttaagtcatgtctcctgttaactgcttctagaaaccgcataagactactaccgtgtctttcacctagcagctgtataaacatgtcgtatcaacaacgtaatcaaggtggtgaaaagcagtaaaatcatctggaaataactactaggtttaggcgtttagcactcactcttctgcattcatgtaccacatcccgctctggaacttcagagctaccacgagcttcctgtcgtaatttaagaacaagattaatcggtaactattaagtatatacggatctcattcagaaatcacaagaaagattaccttactgaagtacctctgaaggaaaatatcttttaacagtccagacatgccatagtagtacaataagtttgacacaacctgcaggaagttttaacatcggtttatgcgaaagaaccttttgtacagtcatatgaactactatgggaaggtgaaaaaaagaaaccttgtaataaaaccattcagaccatgagggtgctttgcatagaggcgatataagaatcaaacccaaaactcgttctttatgtttaatctgcaacctcaaaacaatcactgataagtaatgagttacattattgtataatgttctgagaatgcagctacaaataaatcctcaagaggcctcaatgagtacatacagcaaacaaggaaaggatgtaggcaccagctgtgattcccatgcacattactgcctcgaggctgcaagagacatagatagttagaggataatagcggaaattactcttgttatgatagcccaaatttagagtgagagttagtcgaaacatgattcaagatttacctaaagaagttcaatacttcaagaatctggtccgcgaggtcttcaacagaaggtgacggatcattggaacaaactggagcagctccaaactgcaaaaactcttgtggaaacgatggaacccaacacaacgtgagcaaacagcaagggagatacaaagaaaataatgaattgtttcaagacaatcaattctgcaaacctcatgtcctggaggactaatatggtagatgcagaaattatggagcagtaaggacactgcttcagggcatagaaacaatccttggaaacaagacatatctagcagccataaaaacatacaagaatctaaaatcagattaccaaatgatgttaaaatgaaaacaaatcatgtaccaaatgtatattcgccactcttacagtttagtgctacatctggataagtgatcaatgctggtttctcttgatctccatatactacaactgaaactgaaccatggcaagttttgacatgatgctcctgcaagagataagaaaataagcaagaaacgaatcagtctacatccaaattaagagaaaaatataaacaataccacatgcttcattctcatatcctcaccattagtgttcatccaaaatcaactcaacatttttaatttgtgttctttaaatcggatacagctaagaaaaggaacattccaactttgttccagacaacaaaaaatattaaggacctcaagagattctcccatgtgcaatgactcagaaaaatcagtacgaagagataacttatggctaaaaaaagtcagacattatatatcaatcatggagccaataaaagataccattttcaagggaatctcttggaccttttaggcaagaagaacaaagaatcaaactaaaagaaacacccaacttgtaaatttcagatgacaaagtgaaacaacttttcggtatcaatgaagtagtattaatctcccaactagtaagtaaattaagcatacaaactaaaatcaagaacacaatagacaaaattgatttcaatcacgaaactgaagctagattttagaaatcagggagctaattagatgctatttcgggaaagtaataacccagaaggaagaaaacgaaatgtgactgttcttagtgcctaagagtgaagacaaaaggagaaaaggaagaaaatttggtagctcaaagcgtaaacaaaccttgccaccattgcagatctcttcaatgtcgagtgagacggcgttgtttaaacccaccatgacccgagaaacccccaaagactgcgcctttcttgctctttctatcttgaaactgaaattgaaagagatagcaacaataataaagtcttaagctttattgtgggtactgccttagattgtacgcttcaacggctcttttgggtttcactttgtcttcttcttcgatggaatggaccactactacttatctctctctctctctctgtctcgatgtctgagtcttataagcaaagccgcgttgcgtttaattgtccagcggttaatcaaatcattcccaccgacgccgatgagtcttcttcaatttgatttgcaccgatctttaaacggcgccgtttctgtaatcattttctcattttattcatactataattcattttattttatctctactaatttggtagctgaagttttgattggtcacttgcggatcttcgtagtttttataagttacagtataacttctataaattaatacttaataaattaataatttttataaattaatatttgggaccaaaccaatataaaaattaacacaaatcgataaataataagataataatttttttgaaagttctatgtaaatatatggttccatcaatatcattaattaataattacataaatgtatcaattatatatatattttatatgtaagaaatttctttgaaatatatttctaatatttttttccataaatttgtatttatttttatttaaaatttagttttaatattatactgtatcaaaaacatttgatgttgttttctaaatatgatatgatttttacttattattgattttagaacaatattttctataatgaaaaaaaatttatagaaattttttaaaagttattaaattaggaaaatctctctataaaataatgaatattaatttatcgataaattaaaacctctctaaattaataaattttgcagtcccaatattattaatttatagagattttacggtatattatatcgttttgtcaattttatggctaagaagaaacaaattgtattgtttccaagtaaattttatgttagattaataacttttaccatttttatgctttttgacgatttttatattatatcattaatagttaatcaagaaaattttgatatcatactaaaaaaaaatagaacatactgttttttattaggatcaatcaatcacattctttctttcatacaattctcttgaacttgaaatctttaacgatttaatagtttctcaatatattttttcaaacaaaacaaaaatctcataaaaaaactcagtccaacgaggatgatgaatcatgatccaaactgagttttcttatgagattcatcatcttctagaacccacattttaatactcataagaaactcagtccgacgaggtgatattattttgggactcagttttctttttttgagtttctgaaaacaaaaatgtcataagaaagtcaatccagcattataaatattgttctaagatcagagaggaatagatgagaaccaagatccaaactagttctattacaaagagctaggtgtcaacttaaaaagtcctaattaaaagaattgcattagcttcacatcctctacatgatccagaaaggtgtaaacattactctctttaaatgcttccattccttgcatttcaacctttttgattgtgtttctttcgatattgtagtagaaaacgtagaaacgcataccttttatcgaccagaagacaaattcctttgtctgagtcattccaacacaacgtaaatctgtggttttcattatatcatgcattgcaggcaatatgtatgtatgctcagaccattcttgccttttggcatcttcaagaacccacaatttaatacttcttattactccattaaaacgggaataaactgttgacggcagatacaaacttagtttcccattgtagtttatgagagatccatgatgcagtgctccgataataaatctaaactcctcagacctgacgtcaaagcaaactatcacaatatcattgttgttgaccccagcataataatatataagaccatcaatgcatatccctccatcgaaagaacgatgtggtatgcaacattggatcgttctccatgacatgtttccacttcctaaggtcaaaatatgatgcatatgataattgacgactacaggagacgacttcttatgatcatcatcaggattttgaagctgaggtgacgataaaaataaataatcgctaccttttctgtaggcgaacaatagcttcgggcgagccaaagatctagtcaagaacaactcggtgaaatatggacggctaagtgtggaggcccattgcttcgatacgcaacgacatctcgctatagaattcaccgacaacctcaagaatatctcgataatgagatcaattgggatctgcaaggagtttttagttccatcctctaagcgcagagacgttttcatggccgaaataaataaaccctaagagagagagactccttgtagaagaagaaaccaatgcggtaaaacaaaggcaagtaaaagccaaaaaaaagttaatcacaatggtaaaaacatggactgagagaaagcccgtatagcccaaagtttccaagcttgtataaggcccaaccaaataacctaacgagtttaaagttcaaacgtgatgaaacgttaccgttttagcgtttctcatgtttcttccatataaatagttttagttttgtagaaaaccctaatcgacgacggccattatgataaatgacggcggagctaaaccggagacgctgcttagggttgcagaaatcggtggaagaggaaggagtttggtggcggcacagtctcttcgtgctggacaagttatcctcagagagtctcctctccttctctactctgcttttccatttctctcctcctctgtttctccttactgcgaccattgtttccgtttgttagcttcatcggcgcatcagaaatgtcaatcttgctctctcgtctccttttgtagccctaattgcttcgcctctcatactccttggctctgcgaatctcttcgccggcttcaccaatcatcctcctctgcattctccgatcaaccttctgatcgtcaagtccaagctcgtttcctcctctctgcttacaatctcgccgctgcttctccttctgatttccagattttgctctctctccaaggtagtggcagcagcaatggagatccttcttgttctgcgggtgattctgcagctgctgggtttcttcattctcttttatcttccgtgtgtccatctcttccggtgtctatctcgccggatctcacggcggctttactgtcaaaggataaagttaacgcctttggtctgatggaaccgtgctctgtttcgaatgagaaaagatctgtgcgagcttatgggatttatccaaagacttcgtttttcaatcatgattgtcttcctaatgcttgtagattcgattatgttgactctgcttctgatggtaatactgatatcatcattaggatgattcatgatgttcctgaaggtagagaagtttgtttaagctacttccctgtgaacatgaactattcgagtagacaaaagagattgcttgaggattacggttttaagtgtgactgtgatcggtgcaaagtggaatttagttggtctgaaggtgaggaagatgagaatgagattatggaagagatggaggatcaagatgaacaagaagagatggaagattcagtaggtgagaatgaagaagaagtttgtggaaatggtgtggatgatgaatctaattttcctcatgcttacttttttgtgagatatatgtgtgagaaggagaattgttttggcactctagctccgcttcccccgaagactcatgatgcttcgagagttcttgaatgtaatgtttgtggaagcgttaaggaggatgaagttggcgtaaatcaatgaggaaggttagcttaaagaattgatcagccgaaaatctcaagcttgtttgatgcagccagacccaaacaacaagagacttgtcttggaccacatcgttaatcaatgttgtttgttgtttgatgtttacttttttttttttactcagttttgaaaattcgataagtattctagctctagaattccatatctaggttttttgttttctcctagatagtctgaagaatcaattgtaatggtctgtggaattacacggaaacagttttgttgtaataatggagcatcagttttctttggttgaatgaaaaatcataatttttttgactttttaagttgaaaactgcagaattacatggcttgatgatgtttgcattgttaatctctattactcttcagtgtgctcagtgcctgaaaccatagcttccttgatagggatcaatgtattggtaaaccaaattgtgtaatagtttttccataaaatagattcaatagaaccagtgtaacaaaaaattattagggggctctgttttaaggtcgcaacatgacggtgacacaaacattttttagtgattaacttgttctcattctgttccaagttcaacaacacaaactgagttttttggcttctctatcagagaactaatgtgattctacaacacaacctgctctgactgacttactctgctatgttctgttttgctctgctctgttctcacttccacgtctctgtttttgtcattgacatttcgacttgtaggaacttaaacatttagtggattgactggcaagattgatccaaccttttccaatcttacatccataaataagttgatattttttctggtttttatttggcaaacactaatgcaccctagggttcaatgagatatatatatattacactaacacaagtacacaaccaaatgttattgtagggacttgtaataatttaacagacccagattcctcacaaattctaccaaatttgcgagtcattcaagctagcaaacattatcatctataaataaatagttttctaaacatagtaaagaacataattttaaaattcgaaacgttcctgataaattttcttctcacattctaaagaacaaaagtatagatcagctccgtcctcgggaagcgtacgaacgaaagggagcttgcatcgagagttgcacacgcagcaaagtggtctacaaatagagtggttggatacaaatgttcctatccatgttaacgctcctggcatggaatatgcgtaagtatctataacgcaggaaatatgcaatgtgatcccacactcattgcatgtatagaaccatttttctgggttcacagttgtttcgcatgcttcacaccaatatttgccagccacgcccatttcgccataagataagaagagaggatgatcgtcgtacctatgcctcattaccttttgcggtaaaatagcacacttgaagcacaaaccaaattcacaatcatcgcaactcaatttcccgtctccatcacactcactacaacgtttggagtgatctgtagagtagtgtaaaggatgttgatggcttttgtgctcaaatggttctgtaactgtagcgcaccgtacatctatccttaattccttagattcataggagaaaccggtgaacagttgacggcaaatactacacctatgtaacaagtaggtgccataatttggggatagttcgagtggctggttgtggcacacatgacgtttctttaaaggaagcttggcacatttttcgtggattatgaaatcgcatctctttctcgcgcaagcgtagaacggttctgaacaaatctggaagacacatgcggtacaaactacactttctggtagattccagccacggtaaattcgtaagttatgcttatggccgtaatggtctatcgtgttgtcatcaatcaccttgaatggcgcagtttcctcttcttcgggtgtcccttccagttcgatcatgtcccatacatcccttctggttgcgcatcttgaatgaacaaaataatcaaaacatttggagcaagaataagccccgtagaacccatccacatttttacgacaaactctgcatttcccgtctccatgtccgaggcgaggggtgtaagagatgcggtggtcgtggcggttgatgtttatgacgcgaggtagatcgatacattcccgatgaatcatgaaattgcactgaagacagaaataagggctacggtcacctagcgtcccacaagcattgcaagtgaagtcaatgcgtcttggaacaaggtgaagttgatgttcatgggtcctcgggcttttaacaagaaccggtggtgggtttttcatacatgatctgcatatgctaaaattacaaacaccacagtggtgaagctggcgatggattccatcaaactcctcgcggcaaagaagacatttcttgtcggcgtaaccagggacttcatatctaagtgacttgagtgggtgttgggggtgagaagtgtggtatgcttctggactattatgatcgatacaatccagactgatgaaaaactcgcattgatgacatgtgtagaaatgtttccagctattatgttgatggccacaccctttgcaatctctgagtgtttcgtgcgcttcatgggagagttggagtggatgctcgtgtaggtaggagttttcagcaagaacaagtagggctggtctcctcgcgcaaatcaaatccaactggaaatcacatttgttacagcgataaccgacactgaaaaattctccacagaaactacaattagaaactctggtatgtaggaggatcagcttgagaggatggactggatggtaagggtggtcgatttctggtaacggcttggcgcactcttcatggaacacaacatcacatcccggctcattgcatcggtgtcctccgtaaatgtaactgcaaccgggatgtttggaaatgaagcttgtattatcttcatcggtcgagtagcatcctttacacttggtgaactcgaagcgtgtaaaaggtatcaacggatgctcatgaaatggtaacaatttttcaaggcgggatgcttcttcgtccatgccttcattaaacaaagctagaaagttttccatggtgatgttttcttacttccaccaaaacacaaagctcttctcttctgcactagtttcagacttggtttcttgtttttctctctttcttttctttcaggattttttttcaagtggtttatcattttcagactttgcaaatagttaatatgaattcgcaccacagaaatgattcttttcattactgagattgagaccacatgtgttggcttcatccttgcattatttaattaactcagaccacatatgttgactctgcaactattgtgtccggccaaaacataaataattgaatgaatacaaaaaaggttttttcttgcattaaatggaatagaagtttatggatagaatagtttagaatttaaatggatggaactgtacattttgtggaaaaaacagtttgaagtctgaaccacacaactccttggccaagtagctttggaggtagactttgctgcattcaagtctctgaaaccaaagttttattattgtattgcatccactaacttttatgtaatttcagaccaaaagatttgtatttttgtctttaagaccaggattgggccaatctttgttttttaatttttatacagccaaaagtaagttctatttccaccatcagattgtataacccatttgaataacactataaagttaacatatatataccatctgaaacattcgaagaatcatttgtcaaatcacatgtattcaaatcactcagagcaaattttgattaataaagaagttaaaaagacatactgcgtatacatgagctgctcttgctttagcacaaaacagagaccagattccagttccagctctaatgtcaagaaacttgttcttttaaatatcctgttaagaaattctgtttctaagatcattgagactgctgctgactggattcaaaagattgataattgtggaaaaagcgcataagcttgaggttaaaaaaaaactattgtaaaacatacttttggaattaaatggtacaaagtttttcttcattaaaacatgccttaccaatcactactagagtagttattagagcggttgaaattataataacagtttaaagaacaaatgtataaaacaacatcggctttggaaacgaccttaacaatggaaggaagcttgcattgagagttacacacatagcaaaatggtctacacatagaggtgttggataccaccaagtcttcctcccatcctattttggaacctggcatataatatgagaagtctcccacaacgcatgaaatatgcaatatgacaccacaatcattgcatgtatagaaccatttcttcgaattcacttttgtttcacatgcttcacaccagtattctccatccacactactttcaccacacgacaagtaaagaggatgatcgtcgtatctatgccactttactttctgcggtaaaagagcacacttgaagtccaaactatagtcacactcatcacagctaaagcttcctatatctagatccatgtttttgccacattccgtacaagacttagaactacgtttcgaaaagtataagggatgttgatggctttggtgcaccaatggttctcgaattgaaccacatcgtacatctagagtaaccatacgagtaagacactcgtacctgaaaccggtgaaactttgccaacaaagatcacatgaagtttcgtctgaagtatcatttgtgactagggtaaatggtaggttgtcgcaaacatgccgtttcttccgaggcaggttagcacatttttggtggagaatgaagtcacaattctcgcaactgtagaacgcatctgaacagatctggaagacacatgctttacatagtgtgctttcatggagaatcctcccatccttgttgattactaagttatgatcatggctaaaatgtttgatcgtgttatcatcaatcacctcgaatggcgcatcttcctctggctcttcgggtgtcccttctagctctatcatgtcccatacatcctcgtccgttgcgcatctcgagtgaacaacatagttagaacattttgagcaagaataacccccgtagaagccatcaacctttttacgacaaaccccgcatgtattttgcccatgtccaagacgacgagtgtaggagatgcgatgatcgtggcggttgatgtttatgacgcggggcaaatcgatacactcccaatgaatcatgaagttgcattgaagacagaaataagggctttgatcagcttgagtcccgcaagcattgcaagtgaaaccgagaggttttgaaagaagataaagttgatgctcatgggtggtcgggcttacaacactaagcggcggtgggttttccatacagccgccacatatggtaaagttacaaacatcacagtggtgaattc

SEQ ID NO: 252 - DNA, 126386 bp, Arabidopsis thaliana
gaattctatagactatatagcgtgtggacatcaacatgtctttaactttaaaatgattaaaagttgtctaatgggtcggtttaatagcttatcatcttccttattttaacttctaagtactagagttaaaggaatcaaatgatgcgtatgctttaacttttcaagaaacacaatgatgcatagttttaagacactgtaactgtaagtgcaaatgaaccaaaaatgatgctttaacacgacgttgagttttggggaatcatttcatctgacatatatgggaggacatgttttgtttgtatatcgaaattcggaaaatgtatggctaagtgggaatattggatatcacataacttattagaatcagaagagattgcaaatttgtccaagaagcatatatcaagacactgtaagcgcaactctgaaaatttcattgttgatcaaaaatacaatatagtatgtggcaactggcaagtcatacaatcacatttgatcgtactagtgagcagagccatgccaaggttaatggttgacggaggcggtcaaaattttttttctccaactaaaaaaaacgatgcttataataatagaagtaaaaatgtctacaaagataaattgtcatatgacgaaaatacgaaaaaaaacaaaacataaaaatagttctaaagcgtaattcttcttcctttcttcccaacaaaatcattagccaaacgttcaaagtcaacttctctaaccaatgctctttcgatagataagatcgccaagtcacttaacctttcttgtgacatactcgaacgaagataagattttatcaatttcagctttgaaaaacttctttccgcagatgcaaccgaaactggaattgtcaacaatacttgataagcaatccatgaattaggataacaaccttcaactttttgcaagaagtctaacacttcaataggcctcctaacttccttgggtaaagcttctcttagaatttttagttcataaaagagatcactagcaagaatatctgaatgtgttccatgagttaaagcatctttaaggttggtacaagatgccatcaaactatcatcactcgccgactgcaactttttcaaatcaaacaaaaacccaaatatttgttcatacctttggaattgttcgaatcttgtctcaagcgagtaaagagcttgatccatgatttggatgaagtagtcaattctgtaaatttcgaacataagtgttacaaaatttctgattctaatttgggggaaaactacaacatgtataattaagaattacatcaaaccataggatagaacaaggataaataaagtatcaaacttactctaacgagtcaatgttaatacgttcaaggctcaagagtaacaggattagaaaaagtcttgtggaaagagacggcgattaaaaaataaaggaagaggattctctaacctaacttaataatgctttgttctgtttgtttccttattctttggatttttttttatttttattttattttcttattatttagataaatgcaaatgatctgtaatattggtctattaaactaagagtatcttatagaaaaatatgcttctaagttttttttcaaaaattttggacgtaagcgaaggtttctttcttatgccttgaggcacggctctgctagtgagttatagtttcaatgaccaaggagttccatgcgatacacaatgcaccaaatttggtgtgaagaagtaaacgtaacttatcaattgttcgaatttctgtggattttatgcaatcagtattcgtaaagtaacttggttttataagtctgttctcaatttccatggcatcaaaagaaaacgtttagtctgtttacttcgttatctcataatccaaattcaacggccacgatcagctagactactgtaaatcaggtggtcgtgacagcacaagatcaacgatctgagttcttccttcttcgctcatatgctaaattctgattgaaacatctgacgaattcgttcttcccctttctaatttgattctccttggaacaaacaagctctgttacagagatcagagtcgaatccgtaacaccattgttgattctctaaagcatctactgatttcaatcgtgaaattagccggtggtgcatggaagctcctttagcggagagttagtttcaattttgattcatcaatggcgtcttggcttaaagctgccgaaggtaaattctaatggtttatctgcaactgaaattcgtgataacaaatttttgaagtatccgtttttttttcgtcagatttatttgaggttgttgatcgaagagcaaaatcagtggttgaagatctttcagaagaacagaacgatttgcagttgccaggtactgtgtggagattaatctgatagtactaaaagctttctctttggtactggtttgatctgtatatgaatgattagaaacataggcattgtcctggagtttatctaaagcaaagcttgatggtcatgtgtatatgtctcttatattgtgtctttcttttctttggggtggctaaagcttctggtaggaaagggtctcaagggaagagaacaagttcaaagaaaaaggtatttactgtggatctcttatctgtaagtcgatctcgttgtttggtacatcaatactcaaggtgaatttctttgttgtggaatgtatttgtaggctcgacagaaacttgtaaaagaagaatcttctaacaaaagagattcttctggtgatcaatctggcccaggggtatcacagtcagaggttcctccatctaaaagttctgtttccactgacgagacatcttcttcagggcctgtcttgctgacaagagagattcacccgactgatgcagatgtccagagtgttctatcacttccactatcagtggctgatacaaaaagtgacgatgctgctgttgtagctcaagaaagtattgtggatggtgatcgttctgagtcaaagcatgctgatggagatattccaaatgattctttggtgcaaccatcaccatctttacctgacaaagaaattgaggtcgttgtcagtgagaacctgatggatgctcccaaaaatggcacacaacgagagttagatgattcttcaaaaagagacgtggagaatctggattctgtagtgcatgctccttcggttaatgaaggaaatgtggctcaaagcacgggcgatgaggtgaaagttggcacttcaatcaatctggagaaagaacaggaaccgaaagttcctgtcacctcaaccaatctgaaaagagagcaagatcgtagagctgatacgacttccatgaagattcaagatcaacttgaagaggttagttagtctatggaaaatgaagaaaaattagaaaaggatgtgtctgccacttgaatttccatgtatgttgttcttaaaagtctgttgatcaatctatccactaatgctaggctcaaggtttgctaaaagctacagtttccactgggcagtcaaaagaagccaggttagcaagggtaagctcaaatatccattgctactttcctgcatcaaatttgtgataaagtactctttcatgcctgtggttggttctgagcaacctcagatgtatccattttttgtcttcattttcctctaggtttgtgctggactttcgtcccgtcttcaagaaattaaagcggaaaatgcacagttggaagagcttctcactgcagaggtaaacttaaacagtttgagtttcttttgacccaaattagaaaaagtaaaagtgatacttgaaggttttcagtgcacctaattttatttcttcatttttattgtaatagcaagagcttaccaagtcatatgaagctagcattagacacttgcaaaaagatctgtcagctgctaaaagtgaagtgacgaaagtagagtcaagcatggttgaggcactagcagctaaaaactcagagatagaaacacttgtcagcgcaatggatgcccttaaaaatcaggctgctctgaacgaaggaaaattgtcgtctctccaggtttttaggcctctcatttgctcatttttctttttgtgtgcttcctatcatagctcaccatgagtctttaatggtcctagttacttcgtgtcttcagttgccattttctttttcaaccaaccagcttttagtaaaatcatttactacttttatcagggagacatggagtctattatgagaaacagagaattggctgagactaggatgatgcaggtattactataatttttttcatcaatgactaaccataatttaccgccgtgtatatacaattataaacagataaggtcctcagaccattgaatcaatattttcttattacaggcattgcgggaggagcttgccactactgaaaggagagccgaagaggagcgttctgctcataatgccacaaaaatggtttgttgcctgaacgatgcgaaaactgtttataatgaaaacattatatcaattttttgttttacgtgaatttctctttctaagacaggctgccatggaaagggaaagggaactagagcacagggctgtggatgcttccacagcacttgttagaattcaggtgagacagaattcttggataggcactactatcacttctttacatttcaaataggccttagtttctgagtgttggctttctcttcttaaattgttttctctttttgtcagcatggaaatttagaaaccctttgtattttcatatgcctacatatatgaaagatgtaaagattctatgtgaaactcttgtttcccaaaaactacgttgatctgactttttaattggctggtatttcagagaattgctgatgaaaggacagcgaaagtggcagattttgaacagaaggtggcattgcttgaggtagatgaacttatcttcaatgcaatttgttcctttgtcttcatatacttgaatttcattcaaagaattgacaaacaatactcaggccgaatgtacatctctgaatcaagagctgcaagatatggaagttcgtgctcgcagaggacaaaagaaggctccagatgaagcaaaccaagtgatccaggtatgttatattaagttatcatgatttacatcgtggaagtcaccttcaacaatgagttcttagcacactttcaaattttcttttagaagcaaaaactatagaacatatgtcctaaatgtacatatgtatatgcaaaaagaacacttatgcaaaaagtacatatatttaaaaagtatttatgatccttggcaactctgataactcatgtatgtgagtttaaatcttctcttggattttatggtgggtcgttttcacattagaaattacatttggttgtcaaagtctactccagcttgttacataacccttgaaaacaacttttatcagttttgaaaagttcagattttggctaatccagagaaattacttttaataatgcagattcaagcatggcaggacgaagtggaccgtgctcggcaaggtcaaagagatgctgaggagaaactttctttgatggaggtatgcttgttacttaccttggaattctttataacatgattttggttatttacacatgatctgtttgattgttataggctgaaatgcaaaagttaagggttgaaatggcagccatgaagagggatgcagaacattactcacgccaggtaatattatcagtttctgagagtctgtcttttcttgtcaatgtattaacagtttctgattttttcgtttctcctagtctatacttatgggacttcctagctactactctttttctatcaagtggcttaggcagacctgatagttctctgttaaaccccttggcgtatttatttcattgaatgcaataaatttcattgcccagtaaaaattcttattgaatattttgagggaaagacccattgctcttcttgttaacacggtcttgttaatatgacgcattcattcgatggttgctaaaacacggtcttaatactcaacttattctgattttgctcgtcaagtggtacctttaatgcatatgattatgtaacgtgagtttaatcgttattcctctgacctagtaggagcatacagagctggagaaacgataccgtgaactaacagatttactggtaacgtgaactcttgaatgtactgattctattaatcaaagtcatattgggaagttgtctgatagcttctggccacgggttttaattcagtactataagcaaacacaactagagactatggcgagtgagaaggctgcagcagagtttcagttggaaaaagaggtcaaacgtcttcatgaagcacaggtccgtcgtcaaagctctctatggttcatatatgtacctttacttttccatgatacttacaagaaaggttctaaacttgttgattcaggtagaggtagaaaaaagtagagtttcgcgacgcgcatcagcaacttgggaagaagattctgagattaagacacttgagtatgtcttttagctatgttctaatgtgatttatgatatatatatatctgctgagtttgttgttcgatacttacaaaataccatttcaggcctcttccattgtatcacagacacatggctacagcgagcacacaggtagagatttgggagcccattacgaattgtcggcgttctcttttaactttactcttatgtttgctttgttcgccttctgtcttcagttgcagaatgcagtgaaactgttagactcaggagctgtaagggccactaggttcctttggcggtacccaatagcacggatgttcctacttttttaccttgtaaggcgctcgcttatttcaatctcattcgccttacttgtgaatttatggaacattaagctgacatcatttatgaatttgcaggtctttgttcatctcttcttgatgtatctaatacaccgactccaggtatgcttggtcattttacattgaaaatcacatcacagtcatggaactcaacttgttgtcgttcctaaatctcgtgtaggagcaagccgaggcccaggaagttgcggcaatgaccaacaacgttttcagactataacagattccataagaaagcaacacatggtggttttaagagattgctgagtaatgtggaagaaagaagcataactatggattatagagaagacttttaaaactttatatatatagaggctgcttcttacgatattccaatctaacctgttggtatgtgaagaacataatgttggtaaatggggtttatacacacttgattgataggcatggttggttttaaaagcatttgaatatatatctgttgagcctattaaagttcggtttacttattttctctgacgcccgaactcggtttagttttggtcaccctaagctgaatatgtattttggccaccgccacatccaacaatctgtaatagaataagttcaactttcttttgtgactcaaacgaaaattgcaattcagaaaatagagataacaagaataaaggttcatcaaaaccttaataaacaaacaacaaaaccatttatttgtaatggtaaaagaagaggctttattgtctataaatatgaatcatataaccaaccatctttatgcttaacattgccgtctcaacagcttcagattggtcatctgaagataggaataaagacaaacgcttaagcaggcaaatctaatgacagaaatatcttcaagatacagagccaacaagagagaagaatgctattttaccgatttaaaggtgggatttttaagggaaaagcggctggtgtaggagccccgttgtttcgggatatcccaacattatgttaagattctgcaacgcttgtcccgaagctcctttcacaagattatcaatctgcaacaccagagagctttttatacacaaagcaatattgtcgaaagctaaagatgagtttataacagaggatggttatgcttaattaccactgagattatgatagctcttccaggaattcgatcaggaaagacactcatatgacaatagttggatcctctaacgttgtgtgtccgaggaacaactccttcatccaacactttgacaaattcttcatcctacaaaacatttttgaaacataataagtaacaaaagtagtaattggcttacaacataagagtaatcatcacctcataagacgtcttcaattgctggtgtaaatcttcggttctaaccccgggagccatttccacatatatagtcgattgcattccacggatctacccaaacaactgaggatcagttaatgggtttaaggttaaaaattatagaaatcatgctaagattatttgtaccattggcatgagatgtggcgtaaaactgactgttacttttgactgtgcaacatcagataatccctgttcaatttcaggaactgcaaaacaaaagagatattgaattcaaatcatggcaaaattttaactcattgtgataattagtttgtgacataccatggcgatgacgggtgacaccataagaagaaatgccttcagctatctcagagtaaagatttgcctccttagcaccacgtcctgatgaaaatttcatatcagtcaagaaactagaaacattgcatcattgttcattgatcacggagtaagctcaaacctgctccactaacaccagattttgcatcgataatgatgttttcatgtttgatgagatttgcctgcaccaaaatcaacacattgagtagagagacggaagactaggcagttaagtaaaatcgcataccagaaaagaatagaaaaacaaacctttagtaaaggaacaagaggaagttgaatcgtagtcgggtaacagcctgggttagccacaagtcgtgccttttttatgtcctcccttagtatctctgttagaccatacacaacttctttctgaaccccgtaggacacttggtaagtataaccattatgaacacaacagacctaaaatcaaggaataacattgagagaaatgtacctgtaactctactgccttgtgaggctgaccataccattcttcatattctgcaatattacgcaaccggaagtcctgaaaagcgtattttagatgggcttataactgaaagaaaaggaacaaaaaaaaaacagttcttcaaggattaccgctgaaagatcaacgattttcaatgcagtaggcagttccttgatgatttcctgttgaaatacacactcatttccgttaagctaagaaaagctttaagaaattgaaatggaagaatgaaaggaaaatgaacctgagttgttccgtgaggtaaacagcagaatacagcatccacagtagaaaaatctgcatcctttaccgagaccaaagtaggtagtttctgtggacagtaaaggttcaattattaatcaatatacaccatcacaaagtaacattgaacagattcatttcttggtatattactagggatagaaatcacttatacttgagctctcaggtgtgggaaaacgctttccattgactggccagcttttctatcagcagtcatcaaagtgacctggaaatgcggatgatttgcaagaagcctaacgatctgcaattcaataaagaagagtaaacttaccatctcatgggtttgaatgaaaccttgaatgcctcatccattctttcccttgtaattttaaacaactttaaagcaacgactataagacttttctcttccttttatcgagaaaagattaactttgcatatgtttacagcttaagctaaattagaaggccaatacccaaaaagtcaaaaacttgcaacaagatgcataccacttaagctctgattcattgcaaaaccaaagagatcactaaaacaaacaattccaagaaaattaaacttgaaacagacagattcaacattgcacaaacctcagcaccagtgtagccacttgcaccaagaagaccaatcctaatatccttttcaggtttaacagaactactagctgaaactctgaagctcattgaagatggcgaagccacatgggatcccaaagtaagcctcttggctcgcttatccgctacacattttcctttcgcccttttcaaaacaaagaaaacccacatttacatgattatcagattgcaataacacaacacaagctacaatgagcttgaatgtggattcagtgggaaaaaaaacagagattttgaagagttttaggaattgaccttgaaccagcatccttggattgaactaaaagccgacgcagtactcattattggattcgattctgcaaaaaacaaaattcaggaacaaaaaaagactaatctttttgctaagaacaagaagaaattagcttctctcaatgtgatttgatattgagagtcaattatggtagtgatgaaacaaatacccgtaaactcttcgtcactctctctctctatacgaagtggtcggagaagttcgacggagaagaagacagcagaaaaccacgacaaagattgtgggacgaaaacgcaagaacgacgacgtttcagctagccctacttaaaacctatcaaagcggtgccgtttcagggatcgaacccgtttactgaacaggctacccgtggttcaacccggtttatcgacgaattaatcgtttgcagaaaacgcgatatgtcttggcgtttgcatcgggtgacgacaaaaatctggcattttggtaattcccagactaagagtaaaggcattcatgtcaattacttgagtaagcgccgaagcggttagatgaatttgtttcaatggagtcaaaagaaaatctagagaaaaagctccgacctttttatttcctctctgtttcttcttgtgtcatcgtcaaatcaaatccaatcactaacagtagaaactgtttctctactgggtatttttttttggcaacccttaaattctgaagtaagagagaagaagaagaaagtgtgagattccgacgaacgggaagaaaaatgataaattttcgcagcatgaatcaagcttcttcgaggataaggatcgctctttcgggtcggattgaaacagctttagagaatatctacagaaaacacaatcttactccgattaatgatgagacgagacagagactgtcttcgattcctgagaatttgggttttgagttggtcaggaaagtttttagtttgcaggctggtttgatatacaacctcgacagcttcatcgtttctaaggttaaccaagccgttagttttactggctatccacagccggcgaactctcttagcccctctggaagacacgtgtccagggttcttcaaggttagtatcagaaacaaactctctttgcttgtgaaaatgtgaatttggatagtaaaaatctttacttttcttatgattgttggcgattgcagaagagatgtctgttgattctgatgctccttctcctaagtctttgaaaagtgaagacaaaggaggatctctgcacattccccagctggtagctttgggtgaacttgaatttaagaaggtgtttttgttacttagctatattccagggtaatgtttgttatgcaagtttcccaatttcttacatctctatattctcttatccacctattgtaattgtttggttttgatggtgacaattacctcttttggtgatgcttaactttttctttatttgatgttatacaggcaacatgtgggccaggttataactgctgatgagattagactgtggaaagatttgccaatggttgaatatgaagcagcggtttgggaccgcttgggccggcattattgtccccaaaaggaccgaagaatggtattgttctattctattgggttttgtttatattttcatgtttgcgtttctgaaggtaattttacaagaagttgagtttggtatcaaagttgtattaactgcattttctatcatgcttcatttccccagttgcaatgggatagcgggaagacccattactatcagtgtaatgttgctcccaatggtagctacacattcaaggttctttcagctcttcaagtactatcttttctgtttgctttttccattaggcatatgtactttgtgtaatatttttgattcaagctgtagaagaaattctttgtaagtcgctatcatatgtctataaaacaattgatatgtctatcaaacattgcaccttgacattgactcaatatacttatcgacacactgtgttcacagggccctcttcttgaacacactggaacacacttgcacaaggtcttgggtgatgataatgttttaaccgtcaaattcgcggatgtccagaaaagttcatcaacatatagcattgaccattactttacatacaaagggattgccaagaacggtatcatgattggtttacgtcgttatcaattttttggtgggcattgttttccctttttctcttgattaactaccatttatgtcgttacacatacaaaactatttattgtaatgttgctaagctatacacatatcatacttctgctttagatttagaacctgatattgtagctctttgtgacattctattgaacagttttcaaagatggaggaaaagaggaaaagaagaaagatctttctacaaagaaagtgaaatgctactttatacgcacggactcaacagctttttatgatatgcaaaatccctatattttaaccggaaagtcaatttatgaagctcgtatgcattttatgcacgtgcatcgagcaccaactttggcgaattatatggcaaggtactttaaaggaagtatatgaagatattctactgtatcatatttaaactcttctgtagatgtccttttttatcagagtcacctttcttttgctgatgcttcaggttttccttaattctgtcaaagactaaaacgcttgaagttgacatgactgggattacctttgatcaaattgatgatatacactgccatgtacgtccttaattcatgtttccttgaggaacttcgtctctaatgcctttacttacttgcattcgctatgttctttgacctttttccatttcttccaattgcaggatcaagatgggaaagatgttcttgacaagaacaaaaaaccttgcatacattcagatggaactggctacatctctgaggacctggctcggatgtgtcccctaaatatatttaaagggaaatgtctcagaagtgaaagtattcaggtccttactctgacgttgatggttgactaggccctttgttcactcgtatcatcttttttccttcttcatacttgatttaaatttagagtaagctttcatattttgttggacaggaagcatgttaccaagacccggtatgtatactatatagttcatatccctatttatgcttgattctatgtctgtctattattgaactcaagtagtaaaatattactttttccaacagcctcttttgatccagtttcggatgttttatgatggttatgctgttaagggaacttttctcttaaacaagaaagtaagtccgctctctttcacattacaacatccttttttggggtttaaatgtttgcaaaactattcttaattttctttccaatttggcagctttgtcctcggactgtccaggttcgaccttcgatgatcaaggtgtctaaagatccatccttgtccaattttagcacctttaacgccttggaagtagtaaccacaaggtattttgttcgctgactacttgttgttttaatactgaagttctctccctcaaatgttcttattgtggagtgaagttatcctagtaacatctagttgtttccatcatccagtaatccaccaaaaagaacaaagctatcaaaaaatttggttgcgctgcttagctatggaggaatccctaatgaattctttttggatatattgctcaacacgttggaagagtctaaaagcatattctacaacaaacgtgctgcacttaatggtgcttaaaattcctaacgtttctggttcttttgcattttgtttctggtgcctagagctatttatttttaagaagtcaaattttcggtgcagctgctcttaattatggggaaatggacgaccagaacgccgcacagatgatattggttggtatcccccttgatgaaccacacttgaagaattatctgtctatacttttaaagacagagaaaaatgatctcaaagcaggaaaacttcctgtgaccgaatcatactatcttatgggaacagtggatcccaccggagcgctaaaggaagatgaagtctgtgtaattctgtatgctactcaactcttcttttaccttttcattttgagttttaattgcatggaaaaaaaaaacagtggtttagttttttggaattgtgagttagttgttcatttcgccactgcttcttttcatggttttttagtgagtctgggcaaatttcgggagaagttttagtgtatagaaatcctggattacattttggagacatacatattcttaaggccacatatgtcaaggccttggaagagtatgttggaaattccaagtttgctgtgttcttccctcagaaaggtccaagatccttgggggacgagattgcaggtggtgactttgatggtgatatgtatttcatatcaagaaaccctgaggtaatccaccacattaatcagtaaaattaattattgttgtgacctgattttcttgggtttgctttctggtttagctacttgaaaacttcaaaccaagtgaaccgtgggtgagtttgactcctcccagtaaaagtaactctggtagagcgccaagccagctttccccagaagagttggaagaagaacttttcgaaatgttcctgactgcaggatttcatgccaggtactctcatctctgaaagatataaaagtgtcttggatttgcagaatcaatctttgaaattcatttcctttttcctcgggtttacagcaatgttatagggatagctgcagatagctggttaacaataatggaccgcttcctcatactaggagatgacagggctgaggaaaaagctgaaatgaagaagaagatgcttgagctgattgatatatactatgatgctcttgatgcaccaaagaaaggggataaagtctacctcccaaacaagctgaagcctgacatctttccacattacatggagcgggataaaaaattccagtccacttctattcttggattaatctttgactttgttaaatcacagacaacagaggaaccctcaccatcatctggtaaaggacctttattggttctactatatacatataatcagatcaccaaagaaatcattaatcatgatatgtgttttactgtggtttacaatttagagatcagtaaactcccgtgtttcgaagatgagccggtctccgagtttcatatgcagaaatgtagactgtggtatgataattacagaactgagatgacacaggcgatgaagactgataaggatgaatcagccaatgaagttattcagagatacaagcaggtaaggtcctcaattcgatgtcaccactctggagattcagttaagtctaagagcaaagatctgaccagtagacttcatgaatctccaatgttttgttgattggttccgtggaagtatgtaaccagcaggagacaatcatgcttatcaaagaaatggtttatttgtcgtgtgtcaggagttctatggcgctgcagggtttgaagacagcaagaaaagtctggaagaactctatccgcaagctctcgcactctacaagatcgtttacgattatgccattcatgcaggtgtttcgaaatgcaggtttgtctggaaggtagcaggaccggtactgtgcagattctatctaaataagaaaatgcaggagaaatgtttagtgtgtgcaccatctgtgcttaaagagctttggggttgaagaatacaagcctttgttgttgctacatgtctaataataagaagcgtatgaggcaagtaagttaactaataggtgccaagatgtgtgtgttgtagtgccttttggtttggttttaatgtagatttctcctctggtgaatattttttgtgaatcttttgcctatgaaatgaataaaaatatgttacataacgaagcttttctattaacgaagctcttacctctgcaccagtgttttttgtaagattgaaatttgtaaaataaatgttgagaattttaaacaaaattttgatcgcgagattgtttgtttacttggcgtttaaagcgacggcgacaaagctttggcaactttgtaattttggtgactcgtgttagggtattttggtaaattccaaaataaataacaaacggctatattgtgtagcctgtataaaaaatcttcttcaagtcaaatccataaaatcgattcacaggaaaaaagctttggactttatttttgtttttcccgtgtgttgtcagatcatcaacgtcgcatcaacagcgcaatgaagaaatttgaaaaattgagaacagttccttcttctcactgggtacttgcttatttgtatgagaaccctaaagagacaactgtttttctcgttgggaaaaatgatgaccaccactatggattataacagcagcgatcaaggtttttcgtggtcagaaattgctcttctgggtagtgttgaaacaatgttggagaaagtctacgggaaacacaatcatcatcctccgataaaagtggagacaagacggagactttcttcgatttctgaggaattggctttggaaacactcaggaaagttctcaatatgccgaatgtgaagaccctcgatgggataatcatatattttcttaacgatgcggtcaccgttgatggctctcctcgcctgtggtctggcgagtctccagtacagtttcctagaactcccgggaaaaaaagttgcagggcttctcaaggtcagtgttaggatagaatctgttcacatactttgggtttttttttttccttcttgtgtgtttagtagtgaaattctcttcttgttgaccgcaatattatgactatggttgattgtttgtagcagaggtgtctcttgatcgtgaagatccgtctcctaagttcttgagaggagatgaaaatggagaatctaagcacatttctcttctattagctttgggtgaacttgaattcaagaaggcgtttttgttgcttacctatcttggagggtatgtttaggctggagatttttccatcagttttatatctatttcgttggaaagtgatcgtctttgtaacaggaaatctctgggtgaggttatatctggtgatgagatcagacaatggaaggatttgccaatggttgcatatgaaagagcagtgtggttcaagttgggccaaaacgaggaaagaatggtatggcagttctctgttatgttctatattggtgctatctatcatagtttttcttaaatgaattgacaaaagacatggagagaggcttgttggatactgcaaattcttttgaactgcttgctgcactgcaatttctgaggaattagactttgttgtcgaggttgtactaattgcttcttcttacatgcttcttttcctcagcagcttgaatcggatagcgggaagactcattactatcaatgtcatgttgctcccgatggtagctacagattaaaggtccaatcggctctccacccactgtcatgcgtgttctttgttttaagatgatctgaattcaagtgatacttttaggatataatgtttattattgataagactgtctttacagggttattttctggagaacactggaacacacctgcacaaggttttgggtgatgataatgttttaaccgttagattcgatcaattaccaaaggagtcaacatactgtgacaacccttactctaaatacaaagagattgctaagaatggtatcatggttggtttacgtcgttatcaattttttggtgggtcattttccttttctcttgattatcatttatgtttttgcaaaaacaacacttttccttgttaaggtgctaaggccatgtctagcagatattgtcatactttatcacatagtaccttgttaacttcttttaaacagtcttcaaagatggagggaaagcagagaaaaagaagagaaattctacaaagcaagtgaaatgctacttcatacgcacgggttctacagcatccagtgatatggagaatccttatatcctttccgggatgtcaattcatgaagctcgtatgcattttatgcatgtgcatacattgccttctcccgccaactatatggcaaggtactctagtttcttctaagtctctattggaggcatcttgaagatttcttactgtttcattttataactgttttagagatgttttcctttgtaatcagggttacctcacttttgttgatgcttcaggttttctttaattctgtcaaagacaaaaaagcttgaagttgacatgactgagattaccgtcatgcaaatcgatgatatacactgccatgtacctctttaattcatgtgtccttcaggaactgtattcgctatatgggctttgacctctttccctctctgacaattgcaggatcaaagtaataatgatgttcttgataagaatgggaaacctcgtatacactcagatggaactggatacatctctgaggaccttgctcggatgtgtccattaaatatttttaaagggaaatctatgagaagtaacaatattcaggtctttcttgtacttccatgacaatttaatggttgcttagttcactcttgtttccttattatgtttgttttgaatcacagggaacctgtgtccaagagccggtatgtagtttacagttcaagtttaagctcgattctgtatttgattatcacttaccacaagtagtgacactttttttttttattccaacagcctctgctgatccaaattcggatgtttaatgatggctctgctgttaagggaattttcctattaaacaagaacgtaagtagactctctttcatgtcacagaaccagatttttgagctaatcctaaaattgctcccaatttggcagcttcctccacagaccgtccaggttcgaccttctatgatcaaggtgtataaagataaaaatttgtcaaattttagcacgtttaactccctggaggtagtcactacaaggtatatgtctcttggatttatgttatcttaaagctgaacttctcactgaggttcttattttgatgatttatggttgtttccatcttccagtaatccaccaaaaagagcgaagctatcgaagaatttagtcgcgctgctgagctatggaggagtgccaaatgatttctttttggatatattgctcaacacgttggaaaagaagaaaaccatattcttcaaagtacgtgcagcgggtaaaggtatggttaaaactctaaagctttcgagctcttttgcaattagagggaaaccatggtcttttgcaattttcgagctttgaaactgactgaagtctttaatatcataggaagtatgagaagacacatgatggctttttattaagtttatttgtttctgcagctgcacttcattatgggaatatggacgataagaacgctttacaaatgatcatggctggtatcccccttgatgagccatatttgaagcattatctgtctaaactcttaaagttagagaaagatgatctcaaagcaggaaaacttcctattgacgaatcatactatctcatggggacagtggatcccaccggagagctaaaggaagatgaagtctgtgtcatcctgtatgctaccaaaattttatttatttttttgtaatataaagtgtggatggaagaataaacaaaccgtgcaacttgcttcattggagttgtgagttagctcttcatttcctcactactttctttttcgttgttttgcagcgggtctggccaaatctcaggatgtgctagtttacaggaatcctggactacattttggagacatacatattctaaaggctacatatgttaaatccttggaacagtatgttggaaattccaagtatggtgtgttcttccctcaaaaaggtccaagatctttgggagacgaaattgcaggtggtgactttgatggcgatatgtatttcatatccagaaatcccaaggtacactgctatatccatcacagttatagtaaaatttcattgctgagacctaacttataaaccgcaacttcctctgtttagctacttgagcactacaagccaagtgaaccgtgggtgagttcttctccacgtagtaaaatttacactggtagacaaccaagtgaactttcacccgaacagttggaagaagagcttttcaaaatcttcttaaagacaggatttagtcccaggtacattctttaattctcgggttactttcaaggtcacatagtcctttgggttaaatatgtcttgttttctgggtttacagctcagttataggacaggctgcagatagctggctagcaataatggaccggttcctcaccttaggagatgagaatgttaaggaaaaagctgaaatgaagaagaaaatgctaaagttgactgatatatactatgatgctattgatgcaccaaaaacggggactgaggtcaatctcccgttagacgtaaaggtcgatctttttccacattatatggagaggaataaaacattcaagtccacttctattcttggattaatctttgacactgtggattttcataatgcagaggacaccacaccatctggtacgggtcttcttgttactattgataatcaaagtacacaataactcatcacgttgaatatgttttaacggtttagctctgggttacctttcaggaatcagtaaacttcagtgttttgaagatgagccggtctctgagtttgacatggagaaatgtaaactctggcacaaggattacagaaaggagatgtgtcaagcgatgaactcagatgatgatgattcctgtaatgaagttatccagaaatacaagcaggtaagctcttcaatttagttaattctaagagaaaagctttaaccaatagccttcatggatcactggttttttgttgattgtaatgctttataaacaaatcattggttgaacggtttcttctctctgtaacaggagttctacagtgctgcagggtttaaagaaagcaagaaaattctagaagaactctacccaaaggcccttgcactttacaacgtcacttaggactatgccatcaagtggaataacgttaaaagttgcgggtttgtctggaaggttgcaggtccggtcctgtgcagattctacgagaagaatttagtaatgtgttcgatttccatgctgaaagagattttcggctgaacactcttactgttctgttctggtgataacaataagtatttgctgtcttcatgtctcataatatgcgtgttaggcaagtaacctacttataggccaaaccaagatgtgtggtgtagtactggctttgatttaggtctaatcttagatttgtcctctagttaacatataattccgtgtgtatgtatatttgcttatggaatagaaaaaaatgatgacctttatagtgtggtggtgtacaaagctatcttctccagtgcgactcctctctgcgtcctcatgcttccatttggattttccacaaccttcttccttccattactatatttttcaagaaaagtagcaaaagtttcttcctttgtgaatagtagcaaatatagtataatatattagcaaatatagtaatggaagtagcaagactaaattcttcagaagttaatgaatagtgcacttgcagagcccaccttcctatatcttggttctggttaagtaagaatcaatttttggaatcacacagtctgatcctttatgtccacatatttttattatgtcttcttgtttggttattgactggaacagaaatagcgtaactcataaacctccattggaattttcgagttctgaggtgtaggggaataataacctctaataatgaactctctccgtcttgcttgtagcaaagtttcttcttcactgaaccgctgatatacctcagtatccatttcactgcatgccaatgcttctttatgattttgctcatgaatctacagactaagtaacttagctaataggtaccaagatgttgtagcgactttggtttggttctaaacttctaatatagatttgttgcctctgctgagtattttttgtgaataaatgcttatgacaatgaataaaattacctctgcaggtgtgtttttgtaaccttgaaacttgtaatatgaatgtgcatatataaataattcgcgattatgcaatgagacaaaatagtccgaaaacgcgattttacttgcgcgtttgcagcgccggcgagaaagtagtggcagatttgtaaatatagtagtgatggttgggcattttgataaaaattaaaaaattaataaacggctagaatagcgtactgcatataaatctccgtgtagtcaaatcaaagtatcaaacagatttacacaaaacttctgtttttttctttttttgaaacctaaaggacgaaactttgagaaaatggcagcaaaagcaattccagagttaaacaagtttctctcttcccactagggctatatattatgaaccctagattatagacactgactccgattttggggagaaaaaatgatgaacaatggctgcgatgaagtctctccgcggtcagagatcgctcttctgggtagtgttgaaacaatgttggagaaaatctacgagaaacacaatcatcgtcttccgataagtgtggagacaaggcgaaaactttcttcgatttctgaggaattggctctggaaacacttaggaaagttttcaataagccgtatttgaagaccctcgatgggttaatcatgtattttgttaaagggacagtcactgttgatggctctccacgcctgagtcccggcgagtctccagtacagtctcctagaactcctgccaaaaaaagttgcagggcttctcaaggtcagtcagtatctgatgggcttgtgttgttttatatgctctagagttttatttatgagtattggtcaattgttttagcagatgtgtctcttgatttggaaactccctctcctaagttcatgaaaagagaagaaaatggtggatctaagtacattcctccgcttttagctttgggtgaacttgaattcaagaaggcgtttctgttgcttagctatattggagggtatgttaggctggaacaatttttgatctttaataatcagttcttatctattcctttggaaagtgatcgttttttgttacagggaatcccttgttgaggaggttatatctggtgatcagatcagaaaatggaaggatttgccaatggtttcatatgaagcagcggtttggaaccggttgggacagcgttattgttcccccaaggagcgaagaagggtatggcagttctctgttctgttcttcatcatgtactttcttaagtgaattgacaagacatggagagagacctggtggatacttcaaattcctttatcttctgcaatttatgaagaatctgtactaattgcgtcttcttacatgcttctttctccagccacttgaaggggatagtgggatgacccattactatcaatgtcatgttgctaccgatggtagttacaaattcaaggtataacctcctctctaagctctgtctttcattttttgcattttcccgtgttgctacgttctttgtgttagcttgatatatgttctttgttttcaaaggatctgaattcaagagatactactagaagctgttgacataatttgtttgcaagtcgctatcatatatctaataaatgtgtatatcctactattatgataaagtcctggacagtgtcttaatactatttttacttattgataaactgtgttcacagggtcatcttctggagaacactggaacacacctgcacaaggttttgggtgatgataacgttctaactgtcaaatttgataaagtgttaggcgtggaaacctattgtaatgacctttactctacatacaaagggattgctaagaatggtatcatggttgggttacgccgttatcgattttttggtgggtcttttctccttcttaatacctcttattgagcatataacatttttcattttttaggtgctaatgccatgtctagcaacatagcagatcattttcatctttgtgtttaagactgcatattgtagcttgtttacgtttcctttacaaacagttttcaaagatggagggaaagaagagaagaagaaagatgtttctacaaagggagttaaatgctactttatacgcacagactcgacagcttcaattgatatgcaaaatccctatatcttcgccggaaagtcaatgcatgaagcacgtatgcattttatgcatgtgaatactttgtcatctttgcccaactatatgtcaaggtactctattgtaggcatatgaggatattctactgtttcatctctaaactcttgagatttcctcctttgtaatcagagtcaccttttgttgatgcttcaggttttctttaattctgtcaaagactaaaacgctcgaagttgacatgactggaattacctttgagcaaatcgatgatatacactgccatgtacttccttaattcatgttttcttcaggaactgcgtctctttctaatgcctttatttagttgtatttgatatgtgccttggctttttacctctctgacaattgcaggatcaagatgataaggatgttcttgacaagaatgggaaaccttgtatacattcagatggaactggctacatctctgaggaccttgctcggatgtgtccagttaatatttttaaagggaaatctatgagaagtaacaatattcaggtctttcctgtacttccttgattatttgatggtttcttagttgccttttgttcactcttgattccttatcatgtttgtttcttatttgttttcgatcaagagtaagaatttaaattttgaaggacagggaccatgtggccaagagccggtatgtagtttatattccacgtttaagcgctccactcagtatttttctatcacttaaaacaagtagtaataaatcgttttttcaacagcctctgctgatccagtttcggattttttataatggctatgctgttaagggaacttttctcacaaacaagaaagtaagccagctctctttcatgtcacaaaaatcagatttgcaagctattcctcagttttctcctttatttggcagcttcctcctcggactgtccaggttcgaccttctatgatcaaggtgtatgaagatcgaaccttgtcaaatcttagtacctttaactccttggaggtagtcactacaaggtagctgtcacaagagttcttactatcctgaagctgaatttctcgcttgatgttttttcttttctttttttgatctctggttgtttgcatcttctagtaatccaccaagaaaggcgaggctatcaagaaatttggtggcgctacttagttatggaggagtccctaatgacttctttttgaatatattgcgcaacacgctggaagagtccaaaaccatattctacagtgaacgtgctgcgtttaaaggtgctaagaatcttaaagctttcttgtttgtttgcagtttcttactactcctgaagctactgagttaaaatatgctcggaagtttgaggagacactcaatgggtctttttattaagttcatttgtctgtgcagctgccattaattatggggacgaccagtacactgcagatatgatcttggttggtatccctcttgatgaaccatacttgaaggatcgtctttcttatctcttaaagacagagaggaatgctctcaaagcaggaaggtttcctattgacgaatcatactatatcatgggcacagtggatcccaccggggagcttaaggaaaatgaaatctgtgtcatcctgtaggctagcaaattcttctctttctctttcgctttgagttttgcatgtaatcatcaaaaaacagtgattagcttccttggaattatgagttcttccctacaagtagctgctcattttcactgctttcttttcatggttttgtagccattctggccaaatttccggggatgtgttagtttacagaaatcctggattacattttggagacatacatgtacttaaggctacctatgttaaggccttagaagactatgttggaaatgccaagtttgctgtgttcttccctcagaaaggtccaagatccttgggcgatgagattgctggtggtgactttgatggcgatatgtatttcatatccagaaatcccaaggtactctgctatatccatcacatttgaaaataaactcttcattgctgagacctgacctgtgaaccggaattcgtctatttagctactggaacacttcaagccaagtgaaccatgggtgagttcttctaaacctagtaaaatttactgtggaagaaagccaagtgaactatcagaagaagagttggaagaagagctattcaaaatgttcttaaaagcaagattttgtaagaggtacataatttaactgtcggcttactttcaagctcacaatagttcgtttagttaacatatgccttgttttcacggtttacagagacgttatagggatggctgcagattgctggctaggaataatggaccctttcctcaccttaggagatgagagtgctaaggaaaaatatgaaaggaagaagaatattcttaagttgattgatatatactatgatgctcttgatgcaccaaaaaagggggctaaggttgatctcccgcccgatctagagatcaaaaattttccacattacatggagcgtgaccctaagagagatttcaggtccacttctattcttggattaatctttgacactgtggattctcataatgcagaggaacccccaccatctggtacggatcttctagtttctatcaataatcagagtacacaagaactcatcatctcgaatatgtattaacgtctatattgtatgtttcaattcagaaatcagtaaactctggtattttgaagatgaaccggtccctaagtctcacatggataaatttacatcctggtacgagaattaccgaagtgaaatgtcccaagcgatgatggaaactgataaggttaagaggaatcaattaaccaatgaagttatccagaggtacaagcaggtaagctctcgctcaatccaatgcaaagatctgaccaatagatttcatgaatcacattttttgttgattagtccatataatgcttcttaacacaactcatcggttgaacggtttcttctgtctgtatcaggatttctatggcgctgcagggtttgaagacagcaataaaagtctggaagaactctacccccaagccttggcactctacaacgtcgtttacgattatgccattcaggaaggtgttgcgaaatgtacatttgcctggaatgttgcaggaccggtcctgtgcaaattttaccttaagaaaacgaaggataaatcagtagtggcttcaacgtctgtgcttaaaaagcttttgggttgaacagacttacttgtcctgtttgttgtcttcatgtatcataagatgcgttagacaagtatctgacctaggtaaccgaacttataggcgaagctatgtggtgtacttcctttgtttaagttataacttaagatttgtcatctagtgtacaagtaattccgtgtgtatgtttgcttatggaataaataaagaaaactaatgcttatatttaatttcaattaattgtacgtggcactttcagagtccatttggtgtacaaagctgtcttcttcagtgtgacacctctctgcatcctcaagcttccatttgtcttttccagacctttcttctttccattaagtttcttcctttgtgatcctagaaaaatctacttcttttcgctttttgtttttgggattgttttcattgatcctttcaagatggagaaagtgaccaactcagacttgaaatcctctgttgatggtggcgttgttgatgtgtatggagaagattcagccaccattgagcacaacataactccttggtctctctctgtttctaggtagcaacataacttctccgtggtaatataactaagtgtttaaattaacactcaagttagtaactctgtttcttgtttcagtggatattcattgctgagagatcctcgctacaacaaaggacttgctttcactgagaaagagagagacactcattacttgcgtggtcttctccctccagttgttcttgatcaaaagcttcaggtaaaaacttggtgatttggttattctgtatggttgcgctaatggatatagatacataaaaaacttgtgtcaatggtttttttgggatttcaaatgatttaggagaagaggctgttgaacaatatccgacaatatcaattcccattacaaaagtacatggctctgacagaacttcaggtgaaaatcttgtctatataatctacaaattttctgtttagtatttcagagaaaaatgaatctgttattggacttgaaacaggaaagaaacgagagactgttttacaagctattgatagataatgttgaggagctacttcctattgtttatactccaactgttggtgaagcttgtcagaaatttggaagtattttcaggcgacctcagggtttattcatcagtttaaaagacaagtatatattgcttgtaactgtatcttattattttcaattccctccccccccccccccctcttttagctttactcatatgtcataaccattttattcataacaggggaaagattctagatgtgttaaagaactggcctgaaaggaacatacaggttattgttgttactgacggtgaaaggattttaggattaggagatcttggatgtcaggtattcctcggatatcgcttcatttcagatttgatgtgatcacaatatgactttgattgtttgtttgcctgagtttgtctctctttaggggatgggtataccggttggtaagttggcgttatattcagcacttggaggtgttcgtccttcagcggtaatggtttagttgtcctacggttttaaacaatatttctgagtcaggaacttgagactatattgcttttggcagtgtttacctgtcaccattgatgtgggaacaaacaatgagaaactgttgaatgatgagttctacataggactcaggcaaaagagagcaacgggacaggtttgttcttgtatagtctactctattaagaacttaaaacatgatcatatgaacttccacgaatgagtaggtttaaacattattgcaggaatatagtgaactcttgaatgaattcatgagtgctgtgaaacagaactatggtgaaaaagttcttattcaggtaagaaatgaattcatagttcttgatctataattgaaggattcagtaaaatattactgaagctcttttatgtggattgttatctttcatttgatacagtttgaagattttgctaatcataatgcctttgagttgcttgcaaaatacagcgatactcatctcgtcttcaacgatgatatacaggtaacagtttaagacctctttttatgtttctttttgtcttcatagtaccaaagaattttgtctttgcctttcaatttcaggggacagcatcagttgttttagcaggattagtttccgcacagaagttaacgaatagcccacttgcagagcataccttcctctttcttggtgctggtgaagtaagaatcaatttttggaatcacagtatcatcctttatactcaatgttttcttatgtcttcttgtttggttgttgcaggctggaactggaatagcagaactcatagctctctatatgtcaaaacaggtagaaggaatacaaaactgtacataagaggaaatttgagagtagctgtcaacttattacatctttcttctgcagatgaatgcttcggtagaggaaagccgcaagaaaatctggcttgttgattccaaggtagaaggaatacaaaactgtacataagacatttcattggaactaccattttgatgcaagttttgttttctgatagggattgattgttaactcccgcaaagattcacttcaagactttaagaaaccatgggctcatgaacatgaaccagtcaaagacctcttaggtgctatcaaggtttgaaatttctcctgttaagcgtcatggtcctcttatatctcagatctgtcttctttcctcttaagtattatgtctcatcaggcaataaaaccgactgttctgattggatcttctggcgttggacggtcttttacaaaagaagtgatagaagccatgtcctccattaatgaggtatttactatccctatcaagtgaatgagtgatcatattaattattaaagcatggttttggttaaagaggtagtgaaaccaacaatatgtttcttgcagagaccactgataatggctctctctaaccccacaacacaatctgaatgtacagccgaagaagcttatacttggagtaaggtaagtctctccacaccgcaccattgttccaatatgtattcccttcagatagaaatgaagttttctgatcttcttcgaatgaagggccgtgccatttttgctagtggaagcccttttgatccagttgagtatgaaggaaaggtgtttgtatctacacaggtagtagtcacagatagtttctcttctcttcatccgttgaggtttacggaactaggttaagaaaaaaatctatgctttacttaaaacacaggcgaacaatgcgtacatattcccgggctttggacttggtttggttatctctggagcaatacgggtacatgacgatatgcttctagctgctggtaagcatctacgaaatgtaaaaacaagtaaaaggctctctcagctttgttgtttactaatattatgatgtgtttctgcgtcatagctgaggcattagctggacaagtaagcaaagagaactatgagaaaggaatgatatatccttcattctcttccatccggaaaatatcagctcagattgcagccaatgtagcaactaaggcgtatgaactaggtcggtctctctctctctctcgcgcagtcagccttatattgtggttttgaatattgatggtggaaatgctggttttgcaggattggcagggcggcttccacggccgaaagatattgtcaaatgtgcagagagtagcatgtacagccccacataccgtctctaccgttgaaagttgaaactcaagagtctatactttgtgtgcttctcatcctttgttcagttattcccatgtctttctgtaatttccagtattaaattagtctttcaagttgagatttcaaacacatgccaagatctctcatttaactttgcaactctgaaagttaaagactatatgaagtgaatttgtttaatagaaaacgatgaaaatgttatatatttggcaaaagagtgcaaaatttacatcgctagtttgacgggtaaacatgagtggtttttccttgtagacttaccaattttcaatattgtacgtcaatttattagtgagtgtaataatgaatatattagtctatccgtgtgtggtctttctctcacaattttgcttttatcccatacttttggcactagctaagatgactttcttaactctagttagtacattttcctagatcccttcaagatatgttgttttgaatttttttattttttttgtcacaactgtgttttatttatttatacaaggccaaataatataaagccaaaattaacaggcaataacactaaattaaaagaaaagcccaacagaaaccctaaattgaaggaaagcttgttgtagacagcacatgaaacacgtatccaatggtaaccaggcttctagacacgtgggaagtggaagagataggagtttccgttcattggcaaaattgtgtgtcgtcgggaatcttcaatccgaccaaaatcaccagaaaacttgatctatcaacatgtctcaaacttcgcccaaagaaatcatggcgagattccaattttagctttgatgagaatctttgaattttcttcttcttcttcttcttcaatagacaagctttcaatcttcaattgcaggtcatcaaacctaaaaacgaaaattcaatcgaatccaaagtatcggtatataatttcagcccccaattacttcaacatgaactattaacgaagagaaacatcaatccaacaatataacttcgttcttaaaattttaaaatctagaaagcatgaagaacgaatcaagccctttaaacaaagaaggattgaagaattacaaacttagatcaatagaaagagataaagctagcgagagccaaaggaaaccaaaactaattggaaatcaaaagagcctaaagaaaaaaaaaaaaaaaagttagagcaaacgctcctgagcaaaagctagccaatacccgctagcgagataagcggtgagatcgctagaaacagagtcgaccaccggtgttgacaaaaccaccaataccagaaacaaagccggacgaagatgctaaaaaagccatttacgttggaagcaaagctaacctacaccactgagaaagctgatgcaggaagacgagaattttgcctcaagcggaaccaacaacagtggagaataatcgccggcaaatcgtgaacgaaaaagcttctttctctttgaaagatgaaagagagagaagagagaagaaatcttatgttgttttgaattacattcactttaaattgcgaaattattaacagagctatatacataactaataataaataatttttcacaagatccaaaaaaaaagaagtatacataacatagcgacgatcacatacataactacaactttatatatagccatcgaaacaagaaacacattatttataatttataataatctcaatacattcaaacttatgggctcatacattaaaacctcatgttacaactcttaactagattgtttattcttacgttgatttgaaaatatgcatgcattattatgcgttcgacgtagatgaaatatcaagacagtccaaggtacatgtgcaaacgactcggagatggtgttgtttgcaattcccatggctctcatcttcccactcaccgcatctgtggtcgtggtcgcagtcgcaatcgttcatctggcaactaatatctgtcaacgttttaatttgattgatatgcatagcttattataagcatccacttctgcatttttcaggatagttagtttattccttaattttgtatatcctgaatttataatgatatgaaattgttactattacattagagaactcaccagggattgacaggatgagcatggaaaggcagaggaagacaagaaatgcagcacaaggcttggccatgattactcaattattttattgatgttgttttttttttggtagcaaagagataactccaaagagagattatatagagttaaagagcagttggtggttgtgcttcaattatgataacttatgcaaacctttgattttgtatactgaaatattactcacttcgatcttgtttgtcaaactatgacctaacctcaacacttgttcaaaagaaatataatgcagcctagatgcttagtatagattctcagtcttcacatccacaagtcagaaagataaaagcaaaaatgatagaacaccattgggggaaccttgcatgcatcagttactttcagtgtcccccttggtagtagttgtgaccttgaacttcttctgctgcttctgcttcttccgcttcttacgctcctgctgcttcttacgcttcttggcaagcttattctcaacagcttgtaagcatccgctacaagcacaagtctcatcatgttgtgagtttccggtttgtttgataaggattcctcgatcaagtaggcttctcgaacgccataccgatgagcttacagacgtgtgaattagaactgccgcttcgacattattatgatcaggctgtgctaagagaacgttgtgatccttcaatcgcaaagcttgaagaaccctgatgagctccggttcttgtgtgatgtttttcgagattaccaacaaatttgatggtgaaattatccagtgaccataaacaaatgtgacttaacatcttaagaactctcacacgtttgacccctggcactatatatagaaacggagatatggattaccatacatataaattaagtagtaaaagagagtttttaaagtaaaaaaacctaatcaagatgctctttaccaccttgtactccaagcaatatagatacatatattttttttggatcgctagctagctctcacctgtcaacaaaaaaaaggaacatgcccatacacaaacaaattttgagcaagagatagagagaaatcttacttttgaatcctctgtgcatggtttccacggagatatgtggaatgtggctaccgattatgaagggttgggttttgttttatgagagactactaaggtaagggtatataagtatcatcccttgatatcttcacttaatcgactacgtacaatatatagtttcctacgcaagctggcatataattagggcaaattaggtgagaaagaagattttatgcccaattttattttttaacaataagagtttattggactagatttttaatagttattggactagagcaatgaaaatcttgtcaaaatacctaattcactctataatttaataacttatcgtcttctatatactcttggttctggatacagaaagttctagaagagggagaaattgatggagtagaggaacaggttggaacagttgggaacgttgagactgatgggaagaaggaaacggagaacagaggttctcgagtgaagcaaaaaccaacaaatcagaaacctatgacgccacggtcgacgcgggtgatacgacttacgaacaaaagacctcaagtctgtcagcagccagaatgcatccaaaaaagcttcctctaggaagaaatgacgtaatttgtttcatggattcaagaagaaaagcctgcatttggatgacgtgttcaagaagataaccacgtttatgtagataataaccatggaaccatcccatttagaattgaataatttgaacaaacactaataatcaccaaaacattcaagtacgagaaagggaaagggaatgattaaacatcattgccgaaccttgcatcagctacttttcagtcttccgcaaccttcgtagtattattcttcaggtaataaagccatacagagcgtaaatatgcggccacatcaggcagtgctaagacaacattgtaacctctccctgacaaaagttgaagaacgtcgctgaactctctatattctgagatgtcttttgagatcactatcaaatttgagaatacaggattatgtactgcccaacaaagaatgtctactaacatcttattacctctcgaagatttatctcctgaaaccatatagaaatggaatatatgttacaggttaaaaacgcattaaagctgacaaagaaaagaatattaagagattttacctgcaggtaccaagtggaaatcatccaagatcttattcttctcataataagccacgattgacactttaccatcataacccgttttcgcaagagctgatttgatattaagaataaccttatcagtagtgtcaataccattagggattgggaaatcctctacgtcccagaagatacatgtgcctgcgatgacggagacaacataaccaactatgcaacagaaagaacacacacaaaaaaagaaaagaatccattaacgcttactatgacaagtagtagtgagaaccgaatgttggatagggtttcctccataggcaaggcttggccaaagccaaacggatcttctataggaatcatcaggttctgctaagagaacgttgtaacctctcgttctcaaagctttaagaaaaccgtccaacatttctattttgaaaacgagaggtttatcaacctttagctggtcaacttctaaattgtagcttctcgccatcaccaccaaatttgatcttttaggatactccacaggattgttcagtgtgaaaaaacaaatgtccataaacattttatcaactctagcaattttacaagataacccttatttacaagagctgatttgatattctgtaaaaactcatcagtagtgacaccattagggattgggcagtcctcgacgtcccagaatacatttgtttctgcgaggtttcaaaaaaccattagtttagtatatgacagattgattaaatctgttggtctacgtacaatgacagatcaatcagatgaaacctgatccgaaatcaacaccaacgtgcactccaagcaatattagatatatgtatattttggattgctcgggcaaatagatagagagaagtcttaccattgagtcctttgtacatggtttctggtggccaagaggctgcggatgaagtaaagcttggtttgataaggattcctcgatcaaataggcttgtggaaagccatatggatgagcttacagtttgaagtagcaatggtgtttcgacattaaaatgctgtgctaagagaacattgaaattattcaatctcagagcttgaagaaccctgatgagctcgggttcttgtgagatgtttttaaagactaccatcaaatttgatacaggattatccagtggccataaacaaatgcgcactatcatttgaccaactctcgcagctttatcgcctgacactatattatataaaaacagagatctggattacaaagtgtaccaaaggagaacgtaagagagttttaagttattaaagaagaaagttcacctccgcgtaacatgattccggcattatgatactcaatgaacctttgacaaaaccgaacctcggatatgttattcttctcataataacccaagattttcacttcaccaccgtaccttattctcaagagctgatttaatattttgaaaaatcgtatgaggatagagattagggattgggtagtcctcgacgttccagaagacgcctgtccttggctctagaaaacaaagaaaatatacagttacgaaacagagaaacaaacaaacaaacaaacaaaaaatcagattttgaagttatacctaaaaaccattagtttagtatattgaatgcaatgcgctccactaccttgcaccccaagcaatatagatacacgtattatttagacctgtcgcagggtcactaaaaagaacagaaccatcaatttctagcaagagagatagagagaaatcttactgttgaatcctctgtacatgggagatatgtggccgccgatgatgaaaggctggatttatggtttatatcatcaattcaatcaaaaccaatctcccaaaatcaacaacactattattatattcaaaaaccgtaattaacacatccttcacaatcacactcctgttacgttaattgttacctcctcggctcccctttggctctttcttgatcaccaaagtaaatcaagtgaatatgttatcacaaatcacaaaccaacaatttttcgtagactcatcaaagtggaatcatttgctgaatataaaccctaacctccgcgaagggaagatcaacagtttttattttgcttcacttactaactaagatataaatcaaaacttgagaaaaaatatatatatatatattaatttccatggttaaaaaaaaatttgggccctaagccttaccttctgtggcttatgtgacgagccggccatgccgcggatgatatgacataaaattgtgagcacaacaaatacatcttaaatttaaaattttgatatttcagacaactatagaccaaggcaagaatgagaattataattggattaaacatttgtatgatacacaacaaactaaaaagttgaatgatgaagaaccaaaaattacagaaatcaaggtgatgaatcaagatggtgagcagtatatttcatctttaaacggctaagtgaaacccataataaaataaacagagatcaataaataaaaatttaccaaaggggattaacgcctttcttcaccaataaacattttgaagccaaccaaaagaaaaattaaaacaagatcaaatcttcccccttcttgaaaaagaatcaccaacatcgcaaagaatcatcagtttacccgcgaattcccgggcaaaaatcgactttagagctttcttctactgtataaatacggtttttttaaacatcgaattttttcggttgtcgccagtgagccaaatttcttcccaatgagcttaagaatgaagctttctgaggagctcctttcttaccatacaaatgtttgcctcctaaatcagtctttgttggtcccatatcctttcgtctctcaatctgatatcacattgcaatcaattacatacattatacagttctctaggtgaacattaagtgaaatgataacgagaaaactatttggagacacaaatgatttaccttgaatatctttccatctttcaagtggtatctgattccagaccagtttatggattgagaaaaatgagaccggaaagctgatatcggatataggaagttgtctacaagcattgctacaaaaacctgtaaatttccccccaaccaaaacgaatatgttacctccatatctatcatccccataactttcgacactattactcaagagtttaatctaattctaattaataaaaggaggttgaaagcacatacaagtccccagttgtaagttgcaagagagagacggggagcctcaggggataacatattgcatagctgaacttctcgtctcgtcaaattccacattgacagaagctcgatgaaggtgcagatcgccaacgttataacaagcatcatacctacatagaacctcatccttcggtcaatatgtagcataagaaaaacagacaatcctacaatttaagttgaagatgacaaatcattatgcttctacacaacagttctaagatcccccaacacacgagcaatcatcgtggcactagaacaaatttctggtatcttaaacacataacccacctaaataagaagaaaagtatgctcaccaccagaagcagaggtcgtgtcttcaagttgatgatagcccttgatgtagattcttaaagctgatgtgatgtgaatgatagccataacatatggtgcaacaaaaccccatgaaagataacaatggacagcaaacaaagccttgttcattatccagttaactttcgatatgtatgattctagcacaaaggtttgttttctcaagtagttccagtatctataaaacaaaaaagaatagaaattgttaagcatctgaaatattcagtatcttatgtttcaaacaagtagatatgagaatgtaccgtccaaaacttagatcactcgcgagagggtgagggaaaacagcaacaggaggagatgtaatgagcctcttatgagcacctggaaagaagaaggtaagtggaaacatgaaaaaactgtcaactataagttggagggaaatttgaagcaaatgttacctgctagagaggcaagtgtcatatcatctgaatatccaccatcacgtaagccagagacaacaccgtaccgatcttgtctgaaatcatcagcatgcatctacaaatagttggaaacataaaccaaaattagctgtagcagggaatacaaaacaaacattctatataccatgtaatatgttatatacataccatcatacatcctccccacaaaaagaatgttcttccaccagtcgcaaatcccattgagcaaggctggaaagtgaacatgccaaatattagctcaaattacgatatgctacaattataaacaacctaacaacttgataaaagtaaccagtgattatatctaccgtaccatgtggtactcatagatgcaataactcccaagagtcccagacggcaagtctagaggatacccagtttgaataaatatctgcaagaaatcactatatctgttaaacaaattcagacagaaggaaagataattaagggcctatccttagctatgtctttgataaatgtaaacagacacagaattaagccaattagttcaggatttctgtagtttgggtaccacctctggatttttctccatctcagtcgtgagagctccgattgttccaggatgcagtctaacatcatcatccaaaaataacacatatttggtatctttgtgcattttttcaactccaatcttcaagaaaaagaagccagaaacaggaacattcagcgaaagccaatgaatgaacaacaaaaatgaaaaatgtatgttggaagataagttagcttttcatggttgtgattacagttgatttaagaacagtcacaaaggagagataaaaaaaatattgggagaaaaaaaaaatcatacataccaactgattatgaattttctggctacatgttgttgataaaccagcaaccacgaccttagcttcaacatgatcctgtgtacattgaagacagattaggaaaaatgtagagtcagtagatacttcaagacaaaagaaggccatatggactatacttccatcgatagataacaaataacacgaacacaatgatatgttgaaacatgtctgctgtacctgatacatagataatagacgggaaacagcgtgatatgcagggtcttccgtactttctacaacaaaaaggaattccaatggcccaccatagagagaagtaatctacacatagacatggatcaatcttaaaatttaagttggaagcaacaaacttctctggcaaaaagcttaactatgatgcaaattaaaaaaaaaaactctgcctagaaaggagacaatgatactgcaacatgagggactgacctgacttctccagttgtgtaaattgtgttctccaaaaccttttagaggcatgacaactgaaactctaggaagtttaacctgcctagagtgctcaagttcattgatatcttgataaagaaacgccaagctattgcccgcttttatgctgtttttaattctcttaacctcacgattccttagagatagaaatggaacacaaacacatttcagaagacaaaactcagattgtaaaatcaaaataagacattattaaggtaaagacactacctgacatattcagccaataaccagccgagagcaagtagtaagcatattgtacacccctgaagcatatacaagaaacattaagaacccaaataacaaacgcaagaaaaattcttatcctgatgataaaaatgctcaatcaaacaactaaaagagaacacatttaaccaaaaactgctaggatttatatgatctaaaccaatcatttttcctggaaaatcattgatgatgcaacaaacgctcaatttcttcttttctacgcttcatacggaacataaaaatcattacttttcaaacctttgtagaacaaaacccctaaagataacaaatccccaaaatccagacttttatcctccaacatttaacgagaaaaaggaccaaactttcgatctgaaccaacgtaaaacaaaaaacaagcgaattgggttttatggaatccgaacgtgtgattcagaggagcaagcaaaattcaaaattttgaaagagaaaaaaaggaccaaactttcaatcggaaacaacaacagcaaaagacaaaaaaaaagctctcacctggatctgaacgaagacagcgaaagggcttgtaaaagctctgctaagagagaagagaatcgcatcaatggagtccaatgtagacatctttcgtctcttttcttttccttgtgtcctctccttgtattcaacgtcgtcctcttcctcgcgacaataaaggattgagaagaagaagagagaacagaggagcaaaaaatgagaaaccctagatttgaaattcgtctcgttgtctctctctgtcacacatcgaaaccaattagattcgtgaaattgtctcagatcaccattgacggaccagcgaaaatccagagagaaaactaaaaaactaaacttataataatatttttcaaaaactaaatcacaccattcaatcaatcatggacacatcccttttctttcctcttccttttttaattcaaaaaactcaactttactattttttatttttaataaattcataaatctttaagaatcagcaccttctatttgaaatttcaaataagattttttttttggttgtcatcaatttcaaaagaaattattcccaatagttaaggaaataaatattctgttaaaagaaatatatatcattgtattatgtcaaaaaaaaaaaactatgtttacgtgtgtgttgtatatatctataagcatttaaatcttataatctttcatttattttgtatagagcatatactaaaatttattgctattagaagaacatatgtttgtcaatattctgattatatttcgaaacctaaaaccgcgttaagaaacattttttggttcattgaaaagattataaactctagctagtgaccatgtgtcaactggtaggcttattggtttaagtgttggattggttatgttttggaaagattcttgtaaaaaattagatatttgtttttcaaacaaacggattattcatgtgcaagtttttttttttcaattatttgtgtatggagatcgtattctacatttgagacaaggattgtgatttatacggtttaggatctcgaaagatgaagtacggtttgtggttgttgaattcaatgagttttacggatatttcgaataagatgtgaggcttgaatagagctgaagcaacaaaaataactttcaagatatggatcattgtcatttgaaggtatttttctaattctaaaaattgcttctcttaagcgagataaaaaaaaaaactgttttatgcggttttgaaagaagttgtgcaaatgggtgatgatttgctcgcatcatatgcatattgtaacttaatgtcttggactcttggaacttttgtttcgacaaaagatgatgctttcgacctaagattgcaacagtaacatgtctcttggaatatgactacatcttaattgcacgtgaaatagactaaatagttcatgtgcttcttaacctgcatattaagacatatatattcttgaagagagagtttttctaaccattttttgatgcattatttaatttttcaaatgtcgaatcacactcttgaagctaaatcaaaccatcagaacatggcatctccaaaagacacctactcatactcgactttttaaaaatattttaagtttcacatgaacaatgatcaaatatgtttagtgtggtgatccgcatcaattaccaattacagtttaataatatatcacttattttgcatatatcacattaaacatgtaaactacttttgctcgcaagatcaaagttaatttttactttctcgtgaaggattattcttactcaagaggaaaatattgtttatacaataaagtaattttggcggcaaagatgccagaatgtgatgccgaatctaaagatgtccttttcgaacagagtatcacgagtggtgacagcttagatacatgtgtgtttttgacaacccaatttcttttcttaattttatttattattttttccacataattttattctatagtttattactcctatgacctaatcattgatctccttggcgaattgaatattttctaggtatattctatgcatcttcttctctgatgtgacttaaaaatattattgtgtttccattgccatgtttttcaaatctaatttggtgttaaaacatatggcctaatatcgagttagattagatttttagattgatactaatgtactagagtcaactatacatataatatattgctagtgaacaaactattggttcaaattatatttgttgttttttctttgcactaatatgagcattgtaattacatattttcaaaggtaattaattaaaattgtgtgtttattttcgatcaaagtcaaacaatcactcggaccaatctaaaacagtgtttgctaatgtacgtaactagatttgattgtgtgcaagaaataaactacgtttatcgcaagaaattgacttcaatggattatgagcgttcgtgtatacacacattcttcgtgacaataaaaatatatacctttttttttttttaatataagaaggttctaggccgaaatccgtaatttttccagatccaaaactacagcatgtaatattaggtggtgttattcaattatggagttaaagtcaattctttaagctttagatttgttttctgatgttgcttttaaaaatatgtttgtataaatttcaaaatctatgcaatataatctatgcaatatgtcttgaatattgattctaatgatttactcatgaaactccaaagagatttcatttcaaatgaactaatatacaaggattttacaagtttttttgttttgaataatactggattttaatgaaatatttaaaatcttaattgaataacactaaattttaaaatctattaagcatgattacaaagatgagttccaataacactagattttaaaactggatttagaatcattagttgaataacagttgattagtgttggattttaattctattaaaattcattaactaataacacccccttagtttcgttccaagcgtcactcgaaccggcgacctctaaacttcatctatgatctttaccaattgagctaccagacacttggtattaaaaatatataccatctataatatttaataatattagaaattaacagtaaattatattgtaaattttgttagttattacctattaatataacttttataagaacgatataaaatatattttttaaaaaaattaactcaaaaattgttttagtacaaatgatttgtaaccattttgtttcaactgcaaacacctatttgaatcgtctgttgtatcattgatatgatttaataacaaaaaagttgtttaacttcccggctttaaccaccttaatcaaacactaaatatatccaaattctcatgttgaactggaccatgctacttgtgctatccctagtaaaggatatagtggtacccatttcatgtttttggctccatttcctttttcaagacaaaaaaaagaactaagggaatataaatgtggtgtagaaatccaattcattgtaaacatgaaccatatttaacctttaaccattttaaccagatactatatggtttaactttccacagtctaagaaacaagtctcaggaagtgtgcgagtattttaaccaaacactataaatcatcacttgcgttaaacactcgacaaatttgaagatctagaagttggatttatcgatattgttggaaattttactttcactgagctgaaatttctggaattgatcttcaaataatgcagcttttcgagcatagatagatcaggtcatgttaggaaaacaaaccatagaatgagagcataaagttatacaagtaaagagcaaatcccaagtttggttcaaaaatgtaattgataagaagaactcaaggaggaatcaagcacttgctttgttgcctattaagtgatgaagaaacaaaccagctgcaacactcacgttcaagctctccacagcaagaaatgatctgaaaccttcaccttccgcatcatcagactctgttactgcaacttcgttgggcatattaccactaatcctcactaaatcggtacatgatcgctctactaatggccttaaacccgttccttcattacccaagacaagaattgttgggctgccaggtaaaacctcgttcaaagcaacagcctttggtgataccgaaccaccaaccacacgccagccgttctcagcagaagcttccaaaaactgcatcatgtttttgcagtacctgagttccattacttcgagtgatccagcgcttgctttactcacaactgcacttaatggagctgagtttttagcgcataccacaacacccgtggctccaaaaaagtaagcagatcttatgatcgcgcctaagttctgtggatcagtgacctcatcaagagctacccagagagaatatttctcttcctctgatgaaatcggatctagttctttcactttcaccaattctaatggagaagcatcaagcaccaatccttgatgtggtctgttatcagcgaccatgttaagatcatgcttcgaagtttccttgatgtttaacccaagtttttcagagattttcaaaactctctcgaagcctttcttgtctttcttcttcctattgttactgctcaaatctaaaccttcttgaacatagagagcatagaactctcgtctcccaacagagagtgcagccaacactggacttactccataaaccacttcaccttccagcctaggcacactggactcagtcgcctcttgccatgttttcctaccccagctctcttgcctattccagtttcgataagctgcatcgtcacgcccttgatctcttacatcatacctattgaatctatttttgatctcagaccacctagtattatctggttcttcttcaacgattccatcaccatcttcaggggcatgattcattgtttcctcttctgcttcttcagtgattctatcatcacctcgggcactaaaagagttctgatttcttgttctatcatcccaagatgaccggttgttaactctcggcgattgctctttcgccggtttatcatcattagccacccaaattgaattccctccacctttcttactctcttcttccacttcactgattctatcatctcttcgaccacgaaaagaatctcgattcctcgtctcaccataacctctggatctacttctcctatcagaacctgaatcatttctaccatctcgtttctcccaagaaggtctatcacctctctgaaacctttcttccactggtttctcatcagacttcacccaaattgaatctccactagaacggccactaccgccacttctcttatctcggtaagctttcgatcctaatcctgacttccctctactactattactactacttcgtttcccaaatctctgcgaatcaaaactcgaaaactctctaacaccttcagggttcctcaacattctaatcttcatagaattaagacgagaactaactaaaccagtcgaaacatgtgcaaaggtgcttcctttagggtttaaatgaaacttaactggtaaatacgaagactttgagaactggagacaacttttgattgttgtttgttgtaatgaaaccctaatcgccattggaaagccttggcttcttgttaagttacagtacatgattcggagtaaacagaagagaaaaaataaaaaaaaatccggtggggataggtgaatttttcaaacgaagcgcaattggataacggtggttgaagattctcccattcatagaccaattgactaccagagatttctagggtttaagggaaagaccagaggaaggagaagataagaaagaatagaagtacaacagaaatgactagaaaacggtgtcgttgcgagaaaaataatctctttcacgaaatcacctcaaatagacttgaattaccaatgctaccaccgatgtttttaaacctgacccagatagtgaccggactatctttgggtcacccagtcatccggattggaccacggatcaattaattaatattaataaaaattttaaaaaaattataaatataataacaaattaattacatcacatttaataaaatataaaatcatttacactaaaaatatataaatatataaaatcaaataattataataaaatgattacatttttttatattcaactaaatatctaacacgataacaaatatagtaagagatcaccaatcacggaaataaactaagaaaagatcgtgaatttaaacaactaatcttggttgtctctctcaccattcgattcattgtttaaagcggcattgtgaagtcttcaccaaaatctacaacatcaaatgagtttaagaagtgaaaaaactttttcaatgattgaataaatgtttaaatcttatattttattctaaagtcaaggaagctttttaaaacccacatctggccggttcaattggttcaccggtcacgggttaatggtgactttttgtgggttttttaaattttgaacttgtcagattttaacattaaacccaaactagaaaagtattcgaatcacaggttaatcagttgaaccgggcaattcgggtcgaacgtgaaaacattaggccgatatgcacatgtgaaaaacaaaattttgtcgcggacaaattacataccagatttaaaaattgtaattagtagtttatatagttgacggaaaaaaatttttagtaatttatagctaagatgggaatgagatattcatgatcttggaactaacacaaggaaaatacaagttacctcttcaaggcttgagctagcctcttggaccaagagcaaaaacaagaaattatggtccgtagtctgtaatcatcccaacatttttgtttgtgtaatattgaagcatttcgattttgtttcttttaagaagaacaaaaatgttggaatgattatgtacaaaaattttagaaaaaaaaaaaaaagaagattatgtacaaaattaaatctttaatgagagatctgagattttgtatttgatcttttcgttgaactacaacttaatatattcaaaactgttaaaagaggaaagaaccaaaattaaaccattacattaaaattgaaaccaaagaaataaacacttgaaattagtcttgtttttgttcttggtccaacctttcgagtaaattctaaaggagagaagtggagaagataagaaagaagtgttaatggatgaggtggacaaaaccgttttactgaatagacccttttgtttactgtttataaattgtaatttgtaatgataaccatgggaaaaaacaaaattggtagcagactaattacatatcagatttacataaaaataaatttgatatgcagtaaattgattgttgtctgttcaaaaataaaatgttctagttgttcgtaccatatgttacatctattcaaatcctaaatttcggagtttctttgctagtaaattcgaaaatcttaaaacaaatgtattatattaattcattatttttagtctaaatggttttaattaatattttaaaaatataatattaaattaaattcgagaaaaaaaatatcgtttttataccaagtatttcttttgctcggaaatatagagaagacattgtttcaaatgcttgatttgtgtttcaagttaagaatacgaaagaaaagacttgatagaatttctgattactagttttgggaaaaaatgaacgttcatagaaagaactcgaatatatatgtatagttctacaacattggctggtcgtttgaatttcccagagctttgatgaagaatccaggttttattgttcctgaaaattgtcaaaaataaaatttcccaaaagggcatttttaccttcttacttttttttatttgtttaaaccctaacggcaaaacaaagaagaaggttaaacacaaaaaaaaggcttttaaaattaacttgtttcagagtcatcttcaagttcgagatactgagagtgagaagcagcaagtaatgcagctccaacacctgaaccatcattcgacagtatcacttcaacactctctgaaacttcatctccaagcaactctttcaatgaactcttcatcgactcactgaactgagtgtaatgctcgaatagcccaccgtccatcgctatcacagatttctgagcttctccatcttttgttgcgtctcttcctattttcttgaggattccatagatccccgcagcagataaacgagctcctcggcttgcaatgatgttacataggctgatcacaactttcctcatcttcagagaactagtctggacctgagagttccaccaaagaaactcttttgagatttatagattaaagtgtgaaatcattgtgtataggagagagtctaacctccaatatgtcttttaacttgcttcctacaaccttcaaatccggggaagtatcactgtgcatagcagacatgttcggggtcctgcataccgcaaacataattattagacttctgaatcgatggcaagtagtcataacgacggagcaactaatcaaccttatgatgaatggtattttcagcttaggtgggacgatatcgccaaagaaggcagcttcttcagccatcttcagaagaactctacgcaagatttctcccagatacattccggaaatgattttctcaagaatctgaagaaaacaaatatagccagatataatcttatggtcatgatgatatttcaataagcgaaactctcggaaaacagcatagtttcaaagctcatacctgttcaccaggattcaaactatcgacatctagagagtggtcgtactctgtcaatggaagatgtgatgacctgaagtttccccattccatgttgatcacctacattgtggtacatacatactataagatgaaacaggtacttgaaagctcaattggagttgttatgttttattcgaaaacacaaaccatttctcctgatttgggtagcaaaccatgccatttgggaattgcatgtgcacgttcgacataggctgcatttgtgccggtgcccaaaataactgcgacaacgacatccgggttagtgtatctaccacccgcaagtgttccaatggtatcattaacctgtaaagtttacaaaagggattagagaatcataatcaagtagatgacacaaattgattgctagttgaaaaaagagtgtgtgtatagaggaaaactcacaagcgctgcgacaagcatgtccagcccaactctttccatagctttaacaagttctccaacaacatctttatcaacctacacaatcaccaagaaacagagatacagaggccaggagatcagaaacagcgtaatcatatcaaaaactcggtggaaagagatgaaaggagaacaagctcaactgtatcgtcaatggaaaagcccttcgtccagttgatgagagtgccagaggataaagatagctgcttaaccggaaatgagaaagtaaaacctagttcccgttgtctaccaggtgggagatgaaagtcctcgccttctgtagcgacaaacttggcaagaacatcaacgataaaatcgaataattcctgccaaaatgtaaccaatacacaaagatatagaccaaccaagaagactaatcataacaataaggaataaaagtttagtgagaaaactgacatgtgacttcccggtcatcaaatgaggaggaatagattcttctttgaattctcgtttaacaacacggtcgtgcttcccaccaagaagcacacgcataacacggaagtttgttccgcctagatccaacgcatagaaaaaaccagtctcatccctgtcaaattgataccaagcattaaaaccaatcacacaactcaaattttacaacggaatttagcatcagaactcaaaaaacaaacaaacaactacacagaaaaagtacactcaatgattcacccaaaaagttacattaaatcctcttataaagacatatgggctcgctcctacaaagaacatgacaaacaaaagataacaaagaaaaaactctttaagttccatgaaagtaaaagaagccaagctttggaacagtgagacatcaaaagctatatcaactatgttctgctccgattctattgactttggcatgacaattttcacaaaattcccaatttcaagagagattatgattcaaagtaaagatttagattccatgaatgatggacaatcaaaccatcaaaatcgaattccaaatgaatcataaagcatgaaactttctcagataacattatccaacaaaaaaaaaaagacaaaattaaataaacgtgacaaagattaatccattttattaatcttaattcagataaaatcccacaaaattctcaaattttatccaattctcttgagtgacaatcaaacaagtaaaatcgaattccaaataaatcataaagcaagaaactttcacagatgacattatccaaaaagaaacaaaatcggataaacgtgggaacgatttatccaattcaggtttcttaaatctgaattcagataaaatcgctcaaaaatctaaactttatccatttttaaaaatccaaaatcacaaaattaataaggaagaagaagaagaagaagagaaaaatacccagaaggaagattatcaacgtagctaataagcatcttaagcttgctgccaccttcagaagcaagaccagcatgcatctcaacagtcatagcatcagccacttgtctcaatttggcaattggcgttgcacaatcttcttcaaaggctttcaatatctctatcactcttgcccatttccctgcgcttttcattctcctccgtactatcaacgccgccgccgcacataccgccaccgaacacactaccgtcgttgcaactgccactttacccatctttctccctcgcccaattctcaaaccaaaaaaagttggcccaaattaataaaaaaaaaagttggaaactttaagaacgctagagatgatggatctagttgttgaggaactggttttgtgaaaataatgtatacaaaatttggagaacacgtaagcaagctctgtgttgtctgtaaactatggaaagtgatttaaattattgattttttgggatttttctcgcaggatttgtttttttgtttgtttttatgtatggttatggaattagtgtgaagttacgaaattgaccctgaagagatttggttttggtcttttacttgccgaattttgtggaggacgtttttagtaaacgattatttattattcggagatctaattactaaaagagtaaaagagaatatcatgaatttatgatatcgaattttttaatttttcatttgttttatatcatttattaacgggtttttttttgtaagaataaccattattgatgcaatctaagtttttttttttgtcaacgacgcaatatagtttcataattaaaaatatgattgtatatcagtatatgagaacatctaattttagttagtttgactttgacacgtcttttgctttactaaaaaaaattaacgtttgactatacttaagagctaaaagacgcaatttattaattattatggtcagcgccgaccaaaattatgttaattatttcgtaaattcttcaacccacttttagtttttatttgtgatatccaaataaaattgaaactatatatagaaatcagtatcgcaaatttgattgatagtttgatacatgtcgaaactttgccaaaattatgttacaaaccaaaaagatattgcttggtacagttaattgggaatagtaaaatttggtattggcaaaatcagtgggatcttttttttttggtcaaactagctttttataaatgattctactctccaacaatggagaaatggttcaacaagtacatcaaagaggctacaaaggccaaaaaaaccactgctacaaatgacatacagaaagcacgaaagaaaaaaatagaagcatacataacagttaagcaactaaagttcgagacaccaatagtgctgcaacatgagatgagctttcggaaataagagagcacacttggtgatctgctgtccggagatgcaacatcctctagtggataaaacgcatcatgaaatacggctacaatagcataggcgacaaagcaccaacttcttgagcttacgagatgtgagaaaaacctcaacttcggagaggtgtggggttgcgaaaaccaccacttcttgatgaacaaatctggagtccaagacccaagatcatttcttgttaagacgtcatatgtcttttcctttatcctgcgtgaaatttcaagaaaccaaaccaaagaaacaataacatgaattgctcttaaccaaagtttttaaataacatcctcataatgaggtaagagaagcctaagcttatacagaatcaaaccaacctcatactgaggtaaaagaagctgaattcgaagtccaatcgaaaacaacaatcctcataatgaggtaagaacagcttgagcttaagcaagatcataacagcctcatattgaggtaaaaccagcctaaaactagtagaaatcatcacatcctcatggtgagggaactgaagtataaacgaaggcatgttccaaaggaaggtaaaaattcaaagaaattactacctttcagagagacaaaaccttttgatagagtgactagaggatgagagaggtgtggaatagagaaccaaagctccaaacaagcgagaggaaatacttggtaccacgaactgcacacagcagtaatagatcgtaaagcaaaacccagatctagagggctcaaagtctgaacaagatctgatcctagatctgaagacctcaacagcaaaatcgagagaaaggagttggaagctccaacgagatagtctggtgggtctggagggtcgggaggttcagaaggagagaccaaactggtcaaatcttgcggtagagcacacggcggcggattcggagaagggaggagcaaaggtggagcaggagcccgagcaagcatcactaaagccatagaaaaaagggagaggagggagaaagaggaagattctcgccggtgggcgagaggccacaccaacggcggcaaggagaagaagaaaccctaatcgtcaagttgagagaaaaaaaggggtttttcgcttcagagataatcagtgggatctatcaaaaccctttttattgtcgagtgctatgctctcttttcagttcaaagtcattttagatatcacatcagtttggtacgagaaagaataaagtgtttagcaacactacccactctctaactttctactttttagtcactttttaatactataactatgcaaaatccttgttcaaacctgttggtaggagtagacattccatcaaaattgaatagaacaaaaactaataatatctttctatgttggttgtacggaactaattaaacctattcgaataaattctgaaaatattaaagaatgcaagaaatcaaaacagcctaaaccataatataaccataatttatataatgggaaacagataatcaaaatgacgatgcaatcgttttcgaagattttatattcttttttgtcatctaattttatatataaaaacatagaaaaatatattttaaaattacataaacagatggaaaaattaaatatccccaaaatccaaaattcaaaaagaaaaacataaaccggtgaatgacctaaatgtctctggaaatatagtcgaaagaaaacgaaatttctctgaaactatgctctataaaagagaaacttaaaatactggaaatacaaagtaaataaagggttttctacaactatatggaatgtaatttactatatagaaatgattcaaacaaaaaatcctacttagtggaatgacggacaccacctatagatttttgtatggctttggagcttggacaatggacaccatcaatagattaatcactaaacgacgtgctaaattatcgtcaacttataacctaacaagtaaaagttcaatttgcctacaaactaacaaaaaaacatataaaagctcaatatcagtttaatggttttggtccacgacattgacaatgacagaaaatttctttaagaaaaccaataaatgaaatgctcgttctgttaagggaaacctgaaaacaacgtacgtaaccgacagttttttttatttttaatgttgggctaaagactaaaaacctctagaagatatagatcccgactagtcggtaaatgtacgttgatgagcagacgacacaccatcccatccatagcgacttgaaccaggtggcgcaattttttaggatattcttcggtatgtgccattaacgttaatgtttaataaaaacgttttgttatatggaaatactattacatttctaaatccaattttgctgaaaacgaaaaggtgataaaattcatatcgtttgatattttgaattcagtgacgtgaatgaaattgaactttcacagtttaaataatatatatacagttttgtttattttcattttatattagttcatatcgatttggttagtcgctgtcaatatcatatccctaaaattaataagtggtccgcaagtagttctctagaaaacaacggtggagaaagatgattcttctatcgtcttctgtagtctgacatcatttgcttattatagatgattgatttctctattattgaacatcttctattttttatattaaaaaattattgaagaagaatgatcctaatgctaagtatacgagacactctaggttttgacttttggtcaagtcgagtagctgagattgtgacacgtggttgaatctgaagcgtccatctctaacggacttttcttatcttcttcttcttcgtttctcttcttaaacacttctgttgtaattctcaaattcattcgatctagtgtgataaggatctagagagagagagagagcagaaacattgtagtgtgagaaagctcggtttgagcaaatttgtttcagtggattctggagaactctccagcgagacgtaggattccaaattggaatccgaactcgttaattcttgtgtgtctgttctaagttctttcaagtgtgacattaatcgcgagagtcagtgagttagatcggagttcttgaggatcaaagctcacaaattagtatcagagccaggttggactcaaggattcgcagatctaaccggagatgtcaaacacaaagcttaagatttcacagttcgatggttccggtgatttttcactttggaaaacacggatgttctcacatctaagggtgatggggttaaaagatgctttggtggaacgagctccgttaccaccattaaaggaagaagatgaatctgatccagctaagaagaaacagcggatcgaggaagaaaaagcaagaatcgatcaagatgaaaaggcgatggatatgatcttcataaacgtcggagataaggtactaaggaacatcgaaaattctaagactgcagctgaagcttgggcaaccctagataaactgtatttggtgaagtctcttccaaaccgagtctatcttcaactcaaggtttataattacagaatgcaagactcaaaaactcttgaagagaatgtggatgagttccaaaagatgatttcagatctgaataaccttcagattcaagttcctgatgaagttcaagcaatcttgatattaagtgccttacctgatagctatgatatgctcaaagaaacattgaaatatggaagagagggcattaaacttgatgatgttattagtgcagcgaaatcaaaggaattagaactaagagatagttctggaggatctagacctgtaggggaaggtctttatgtccgaggtaagtctcaggccagaggaagtgatggacctaaatcaacagaaggaaagaaagtctgctggatttgcggaaaggaaggacacttcaagagacaatgttacaagtggcttgaaaagaacaaagcaaatggtgcaggggaaacagcactagtaaaggatgatgctcaagatttggttggtctagtagcctcagaggttaacatgagtgagggaaaggacgatcaagaagagtggataatggatactgggtgttctttccatatgacaccaaggaaggagtatctgatggactttgtggaagctaagtcaggaaaggttagaatggcaaataattctttctctgaggtaaaaggaattggcaaagtcaagtttatcaagaaggatggaacaagtattgttctacaaggagttagatacattcctgagatttgaagaaatctgatatcaatgggaactttagaagcagaaggctatgaattcaaagcgaacaatggtgtattgagagtcatgcaggactcaagtgaattcataagaggaataaggagagcttcactatatatactagaggcacaggctagtatggcaggatcagaatctctgataacaacagcaagtgaaacagatatggcacagcagaatgggacacatagggcaacaggccatggaggttttgagtaagaaaggttgtttcggagatgacaggatatcagaaattaagttttgtgaagactgtgttatagggaaaacacacagaacaagttttggtacagctcaacatgttacaaaggagaagcttggctatgttcactcagacctttggggatcacctaacgtgcctcacagtcttggcagatgtcaatatttcatctcgtttacagatgactggtcaagaaaggtgtgggtttactttctcaagacgaaagatgaggcattcgcatcatttacagaatggaaaaaaatggtggaaacacaaagtgagagaaaactaaagcacctaagaactgataatggtctagagttctgcaatcataagtttgatgaagtgtgcaagaaagagggtatagtaaggcacagaacatgcacatataccccacaacagaatggagttgcagaaaggttgaacagaaccattatgaacaaggtgagaagtatgctgagtgaaagtgggcttgataagaaattttgggctaaagcagcatcaactgcagtgtacttgatcaacagatcaccatcgtcatccatagagaataagattcctgaagaattgtggacatcagcagttccaaatttctctggattgaaaagatttggatgcgtcgtgtatgtttattcacaagaaggaaagctagatcccagagctaagaaaggagtattcgtgggttatccaaatggagtcaagggattcagagtttggatgattgaagaagagagatgttctattagtagaaatgtggtgtttagagaagacgttatgtacaaagacatcctaaaccaatcaacctcaggtatgagttttgatttcccattagctactaaccgaattcctagctttgaatgtgcaggaaacagaaaggaagatgaaatttctgttcaaggtggagtttcagatgatgatacaaaacagtcttcagaagaatctcctataagtacaggatcttcaggacaaaactcaggtcagagaacatatcaaattgccagagacaagcctaagaggcaaacaaagatacctgacaagctgagagattatgagttgaatgaggaagtacttgatgagatagcaggatatgcctacatgattacagaagatggtggaaatcctgagccaaatgactatcaaaaagcacttcaagactctgattataagatgtggttaaaagctgttgacgaagaaatagaatcacttctcaagaacaacacttgggtgttagttaacagagatcagtttcagaaaccaatcggctgtaagtgggtgttcaagagaaagtcaggaattgttggagtagagaaaccaaggtttaaagcaagactggtggttaaaggctattcacaaaaggaaggaatagattatcaggagatcttctcaccagtggtgaagcatgtctcaattcgtctgttactgtcaatggtgactcactgtgacatggaactccaacagatggacgtgaagacggcttttcttcatgggtacctagacgaaacaatctatattgaacaacctgaaggttatgttcataagagatatccggataaggtgtgcttgctgaaaagatctctatatggactgagacaatctccaagacaatggaacaacaggttcaacgagttcatgcagaagattggttatgaaaggagtaaatacgacagctgtgtgtatttcaaagagctacagagtggagaatacatttacctactgttatatgtagatgatattctcatagcttccagagacaagaggacagtatgtgatctaaaggctcttctcaactcagagtttgagatgaaagatttgggagatgccaagaagatacttggaatggagattgtgcgagacagaaaggctggaaccatgtcaatatctcaggaaggttatctgttaaaggtacttgggaattttggaatggaccaagctaaaccagtctttactccaatgggtgctcacttcaagcttaaacctgcaactgatgaagaggttatgagacagtcagaggttatgagggcagttccatatcagagtgcggttggaagcttaatgtactcaatgataggtacaaggccggatctggctcattcagttggattagtctgcagatttatgagcaaacctctaaaggagcactggcaagctgtgaagtggatactaagatacattagagggtcaatagacagaaagctatgttataagaatgaaggagaactcattcttgaaggatactgtgactcagactatgcagcagataaagaaggtagaagatctacttcaggagtggtatttaccttcggtgggaacacaataagctggaaatccaattttgcagaaggtagtagcgttgtcaagtactgaagcagaatatatggcattgacagatggagccaaagaagcaatttggttaaaaggtcatgtgagtgagctaggttttgtgcagaagacagtgaacatccactgtgactcacaaagtgcgattgcattagcaaagaacgcagtctatcacgagagaaccaaacatatagatgttaagtaccatttcataagggatttggtgaataatggagaagtgcaggtgttgaagatcgatactgaagacaaccctgcagatatattcaccaaggtgttaccagtgagtaagtttcaagatgctcttgaactactcagagtttcacagaattaaggtagagctaagctccggacaaaagaagctgagtgggtttactcagggagaagaagctgagtgggtttactcagggagaagaagctgagtgggtttactcaggaatcaaaaggtcaagtgagtctacttgaagaaaagctgaacaggttggttcaggtaccggagaggaatccaagttaaagctaaaacaggaagcattcggatcaaggtggagatttgaagaagaatgatcctaatgctaagtatacgagacactctggaagaagtagaaggttttgacttttggtcaagtcgagtagctgagattgtgacacgtggttgaatctgaagcgtccatctctaacggacttttcttatcttcttcttcttcgtttctcttcttaagctcttctgttgtaattctcaaattcattcgatctagtgtgataaggatctagagagagagagagcagaaacattgtagtgtgagaaagctcggtttgagcaaagttgttttagtggattccggagaactctctggcgagacgtaggattccaaattggaatccgaactcgttaattcttgtgtgtctgttctaagttctttcaagtgtgacattaatcgcgagagtcagtgagttagatcggagttcttgaggatcaaagctcacaatcatcatattttgataattctaatcatgcatattttagattaaaagttgggacaatagcggctactgattggatactatccaagactggattttacattcaagtatttcgacaaatacgaatagaaaacaaaatttggatagtttcagaatgttttggagagataagtaattctaagaatctatagataattacaagaagatttcaaatgattagtaatatcgtggataattatccagtttgtttttagttacagacgactccaaaggccgacatacacatgtccagtatctttggtttattacagtttctgtctgaggttcaattctgataagaaaggccggcccaagacaaattcgacacaagccttaatacaatatttcataaaccaataatatcactgagatacctacaagtttttgaattaaacctacaagttacttaattaaacttaaaacaatcaataatcttttacgaaactctttcgatttagcaaagaaaatcctgattttgaagtttatatattgttatcaaactcatatatgaccaaaagaaaggaatgccaacgtgtagaacttttgttttttgggtaatgaaacaacatgaacaactaactcagtgatattacacaattggtatcagaaattgtaagaattaagttaaacaagtacctagacaatgtaagcttctgacaaaaatataaggcattattcaagtggccttcaaatttgttcaccgacaacctttccttttcaatttgttgtttcaagactaaataatgcaaacgtttttttttttccttcgaaaaactagtatttattaatattttcgttagtgggttttgaaatatatatgtcaaacgggttatatgataataaaaagacaaaatccaaatttaaaatatgtcggaaacatagatgtaagttggacggttaatcacaacaaacatctaacccacaagatatatcgatgctaacaagaagaactcatttgcaacattgatgccgagatgaagctcttgatcagagccagcgcggatccaacctcaaacctaaatttacactaaaacatagcctctaacaattttgtaatgtccagatcgcttatacctacgaacacccacatatttttttaggtatataggcttcattcctttctaaaggtcggttcgttacgtttaggaagttgaagacttgtttaccgatctaacaaatcaccggtcgtagcgaaccgaccgtcagataggagaggactcacggaccaaaagagaacgtaaataatcactattatggatggtcgaggtgttacaagttactccagaaaatttgaatttgagacttttgagacctcatccctcaaggtcccaatcccctacctagtaagaagagagagcactaatcgagcactaccttcaacggcacttacaagaaatcagaggatgattattcatggccgccgtgaaattcgccatcaatttatatcgagatccagatgcaaccacacctcattattcctgtcaaataagaaaggtcgttcactcacacttcatcgactaacacacactgcaacaataaagccctaattgcgtaaaaagaaaagctagatttatataatttgctactactataagaaaagagaagaggttttcaataattattgtcatgtttttatttattaataaaataatgtaaatgtttttataaagtaaaagtaaagtattctagttattcgtgttaaaaaaaaaaattattctagttattataattttttctgtggattattatagtatatttttaattttatgttttttaatccgaattaattctactttttttttaacttatttaaattaatttataagcaaaaaaaaagtttatgtgttattacgaaatttttatcaataatcacatatcaatcctaaaaaaaatatcaatcctaaaaagaaccaattagaaaacttttctcagaggaattcgtaaaatattttttaacgtattttcaatgaaatttccaagaaacaatttcattaatttaaaagggtagaaccgtccgtgtaagtaaccaatcaaaatatcaatcaaaatgagtaacaataataagtaagtacaggtaggacaaggctttcgaagaaacccaaacaaaaaaaaacttcaacgccgtttcttcttccattaatctcatctctcaatcaaccaaaagcttcccatctcaaatccctcaggtttgtatttatcaatcgatttccaaaatcttaaaattcttctctttgtatttgtaaagtcttcacctttacctgtctttgggatctaattttagatttgagaatcgaattttgttgtgaacggaaccctaaatttcgattgatagattcctgtttagggttaaagaattgatctttgattctttgtttctcgatctcagtttgattttctaggcaaacaatcatctgccaccatgtttatgaatcggctattcgggaaacccaaacaggagactagtactctccaaacgttagacaagctcaatgaggtattctctgtttccatctgttttggatttgactatctcaacttcaatgtcaaaaattggatttttaacaagattagagattcagattatgtatccgtttttggctctaatgcatactttcttgggctgtttatttgaactgtgttttactagatagatactgtctgcattgttagaccaaaatttggtactctcgtgtgtgttaagaaggttcacttttgggtttattcttcttttgatgcttcttttggttcagactcttgagatgttagagaagaaggagaatgttcttctcaagaaagctactggagaggttgagaaagctaaggaattctcccgggcgaagaacaaacgcggtatggccaacttttgctctgatatacaatacatcccatgcatagaaatcaatgaatgtgttactagatagatagattacttacgtgtgtattgtaattgtgcagcggctatacaatgtttgaaaaggaaaaggttatatgagcaacaagttgaacagctcgggaatttccagctccgtattcatgatcaagtcagttttctttctttgtttttctattgttcaagtgttttgcgatatttgctaatatgaactatatttgaatatgtcactattgtgtaaacagatgattatgttagaaggtgctaaagcaacaacagagactgtagatgctttgaggactggagcttctgcaatgaaagctatgcagaaagcaacgtatgtgtttactttcctaaccactgtactatcgggtcaaataagactataatttaagtggccacttagtgtgcagctaaacacatttgttttgcagaaacattgatgatgttgacaagacaatggatgagatcaatgaacaaactgagaacatgaaacagatccaagaagcattgtcggctccatttggggctaatgattttgatgaggtaacttcccgatagaccccttgatcatatactcaaactaagaaacacattatgtttcaactattcttaaaattattgttattggcaatttgcaggatgaattggaagcagaacttgacgaactagaaggcgctgagctagaagagcaacttcttcagcctgttccaatccatgtgcctcaaggaaacaagcctgctcgtgctccagctcagaagcaacctactgctgaggaagatgaactcgctgccttacaagctgagatggctctctaaggtaaactttctcatatcaaaaacaaacaaaacccattgaagaatttccacattttttagctgattgtttattaaaacggcttttgtttactgcagctgaagctagccttggaagatttcgattaagtggggagatttgtgtgtgcattatctaaaaacagaaagaaaagattttatgtatataaggatccgagtctaattgatcggaagattttttttttctttttcaatataattaacttattaaactgcatttgaatgtttcttttacatttttgtcaactctttatgacactttcttgtgggttacgacttggcactttctgttctttttctccttgcttctcacttttgctgttttgacttggttatatataactacgtgtcgtttgtaagttgtaccaaccttttgcttgctccccaaaagttgttacttgtctacggttcgattgcagtttcttgtaatgggttgtattttttcaaaagtatgtccaacccgttatatctcttgttaacgtctaacttctacgtccaaatatttttgactgaggcaattcctcgaacagcttcatcacttagctttgtatttgtattgtattatatcatgttttatggtatgttctaatagtgtaagttggtggattgactatttctattctccatttctggtatagagtgtgtcgtttgttcgatttcctcattcaaacattcaagcttgaattctgatttcgttgtttttaaattgattcactcgaagatgcttcagttattttacaagtcataagacttctttctagtgattatctttcaactatttgttgatttggacgtaattgtgaatagcttttatctttcagtaccacagcattaaattgcatgattatcagttttgttgatgaaaatggttatggttgttagtcttagatacaagaactaataagtagtgagtgtgtacctcattttcatctcaaagagctagagaagatgcggcaaagacaaaagcatgtaactagggatattaaaatgagatattttacttgtaaaataagctaagtcatatatttgatcagtgtctcattacatattagagacaatgaggtaagaactaagaaccccatagcaaatttgttatgttctttttttttttttttttttttgtgtctattcaacctcttgtcactatgaagatattatttgattgtatgtctatgtgtcaagctttaaactaaaatgtgattttcttttaccgtttttgttactatcatttctctataatgttcttgtcatggcgatgattgccaatcggactatatagctagcatgcatcatagttcctctacgattttagctacatttaaattaaatcataatctctaattcggtgataacatcatgtaataggcttggttggggtaaataattaataatttgactcgactttttcttgacattatcacccgttaagtaatggagtctagtgacctttacataggtttcttcttttctcgatcacatattatagttgcgtagactaataatcactactcaactctacaaatttggacttttcctctacaaccatatctatatgttttttaattgataattaaaatcgattccgtcaatacatcatatggattccttcagtatctaacaatggacccatatgtccccctgtcttaatcaaaatatttaattaacattattataaagtttccctcaaaatgtgcattgcctttaactagggttgggcacacagctaatatatatcttaaataatgtaaacagtattggtaatccaatctgttactacatataattaaatttatgaaattttcatttccaaaattttggatatccttaatgcaacacatataataaccggtaaaaaatatgtaaaattaataaactgtctaataaacatttcgaatttttgatgcaatacataaaaatgatcaaagatatgcaaaaatcatttaattattttcaaataatacaaaaaatcaagatgtaaaggctaataaagtaaaaaaactgaagtacggaatttgtttccaaaagaaatattgatttaaaaaggtaaatgatttaaaccttggtattaaccataaagtttccgtaaaatataatttatgtttataatttgttttttgtccttttacttttctaatctacattaaaatacatcaaaggtaaataattattaaaattattataatattttaaaacttgaggctataagcttataaggccgtccacgtggagttctaataaatctatcaggcttagctaggggtgtcaaaatgggtcaaaattcatgggtcaactcaactcaactcaatccatgaaccctaatgagttgaaaattttgactcaaatgagttgatgggtcaaatgggttgatgagtcaattggtttgatgagtaaaatgagttgggttgtaatggttaatggtttcaatggtttacccaattaacccatcaaattttgtaaaattgaattaaaccaactaaaatctctaaaccaatgtcaatttaagtttaaccaacacatctaaaccaatttaattaaattaatatttttccaaatttcttaaatatacaagcgatgaaattaagaaaaaataaactcgtaatttttccaccaaaaaacataaacccgtgatttttccgccaaaaacgtaaacccgtgatttttccgccaaaaacgtaaacccgtaattttcccgccaaaaatgtaaccccgtgattttcccgcaaaaaacgtaaatccgtaattttcccgccaaaaacgcaaacccgtgattttcccgcaaaaaacgtaaacccgtgattttcccgtcaaaaacgtaaacccgagattttcccgccaaaaacgtaaatccgttattttttcgcccaaaacgtaaacccatcattttccggccaaaaacgtaaaaatctataattttcccgccaaaaacgtaaatccgtgattttcggtaccaaaaacgtaaacctgtaaaaagtggaatccgtaaatatcttaagtttgataataatgaattaataatgataattatttattattttttataataataattaattaaattattacttaaatgggttaacccatttaacaactcaacccatcaaattaaatgagttatgggttgactcaacccatttagcaaaatgagttgggtcaacccataacttatttaattctaaactcatttgattatgagttgagttgagttgggttacccattttgacacccctaggcttagccttcttaataattagcatttttttatattctaataattttgtatcttaagatagttataaaaaggataaaaacaatatatatgaaaataagaaaaaatgttttaataacaatatacttttaacatttttaagttattaataagtttttatattaagatttttgtaaagaagaaaaaaatcaacataaaaaaatataagagatatctatgaaaaattcgcccaagttcataacctagtattaataaaatttgatgtgaaaattgttaattattattatgagatagaattaattgttgtaaaaacttttgtcggcataatatgtgttatatattcaggtaatttattaaaaatagtttagtttttatgattggaaaattagtctaaatatataaataattagagaaatatacatataagatgaagtgaaaatttggtatcattattaaatagtattgttgttatgaaaacatttgtcggtgtaataattgttctttattcatgtgactgaataaaaatagttatagattttataattggaaattagtctatatgtataaataattaaagcaaaatatacatagttacaaacttaaagccaaacaaaatctcaaattatttccaaaatacaaaaagaacgagttattaaaagttttagccttatctttttcattaaaaatttaattgaaaagtttgataatattttccaaaggtttatatataaattcatcttcatgaaatattttatatattcttctttcaattaacaaatttatagttgtatttacacaaattattgttatggatgtctcgagagtcaatgttaaacgtgctccttgtgctctatgcaccaccaaaaacaaacgctgtcccaaaaaatgtgattttgcaccatattttcctgccgaaaggtatatgtttttcttatatatatatatatgttttgctaatgtttttttgttaaatgcatgatcagtaaattggttattaatactaatcaattttgattattttttttatagaaaaggtgaatatgaaaatgcacataagttatttggtacgtcaaatattattaagatgatgaggttcgcgtccaaagacaaacaaagagacatgttggcatcgtccatactcatggaaggtgacgcttggaaaaaagatccagcgagaggtggatttggaatgatccaaaaattaaagtggcaaattgaattacgcaaaatctacctcaatgaactaaaggagaagattaaagttgaaaaagaaaaaacagagctccgtctttaaactaatgatatagtgtgttgagatatattgtgttgtatatatttatgaatatagcatacattatatcattgatctatcctttcttatttgtcgaataattatgtctcttgtgaaaaaataaaattgaaacaaatgtgagcatagatatttaatactatgattttgtttgtatgaataattattctggtttaattgtgtgtgcatgtagatgatcatcataaatgaaaacttttacaaagatataaagacatattctacacataaaagcaaacgtttatgaaacaattgactgttattaagttattagatgaatatctggcaaaaacgtacaaactgttatatatatgtatatataacttgtatgaaactttacggttgttaagaattttaaaataaaaattttgcttcaatggaaaatagaaacttttaatgattaaacatctataaattattttctatgttgaatgtatattattactaacaccaagatatttaaatacataataatattttgacaactattaataatcaatatatctcatcaaaatatatagaataaatttatacgtaacagattcaaaacctactaatatatacaggtcataacggatttttgaatatttttctaacaaaaatatttggggtttactttattttagtttaacgaataatatattttactctttgctttgctttaaagtttaaatcattgcaaatattcagcttttatagatcgaagaaaaactaatataaaatttgtcaatattcttaagcttaaccatttggataagatctttgactacgagacccatttctaaaagtcaatactcccttggataagatctatgactacgagacctttttcgaaagtcaaatattcagatgtttttttttttcccttaaagagttttatagctttgatggaaaatatttaaaagcgtcgttaagagtacgtcgtgatcattaattcatattatgaaacattgacaaacaaacgttacatagcatcaaagttataaagatgaagtatcccattctttaaccaaaaaatacgacactcgttttcaattattccgatccacaaaatgttattaaacgttcattagcatatatactagttgttttctaaaccagatatatgtgtgtttcaatacaatcaaacaagaaggtgatccaaaaactaaagcagacatgttggaaaactttatactattatagtttattatagctaaaaaaacacattacaataattttaatcagatccaacatccaattatatcacattcttctgttgctcgaggacccaagataagatcggccctactgcatatatatataactagctactacttagtaaacccaaatctttaaaccaagtatcatatctcatgttggataaagctcaaaatcaacgtgcatttcgatacagtttattagtttaagatccattatttgactcaagtataaatttctatataacttctggtttactcaagttaagaactaaaggacacacaagtacaacttcaatctccaaactcatttaggtcataataatcagagtctccgataatgatgtttacggacgttgatcacatcaccagcactttacgcatgcctcaatatacagaccaaaacaaatcattccttaaagctaagcacattacagaaatgctcataacaaaataaataatttacattctcatttcattcataagatatttaataattacattgcgacttgcatcttacatcataatatataaaaaaaacaataaccaacaatatcaatattagtgaatccatcataatgaaaaatcctaagcaactcctatacactgaggaatctccctcgaatcatcgattatggaacagagattatacgaaattaggaaataataaatatacaaaaaaaaaacttgcagagaaatctcctcttttcctaagaagagatccattaaaaaacctcccatgccgataataatcctttaattaatctttatcaacgaaatttcagacactccggtttacgaatccggttcaaatcacataaccaagtcagagacccacccgacatcaggagtatcacccgctccctgatccggatccggttcaatccgacccatgcaattctctttgctcagcttctcgaacagctgcgctcgcagttcacgacccgactcgacccgttccatcgccggttcttcctccaagccattctcccaaatgttcataaaaccaggtcgggtcggtgtagttggtaagctacggaaaccaggacccaaaaccgatccacgaggcgacccgaatccggatccgtatcctccgatttgattgttgtatgacgacgaaagagaagacttcactttattaagttgcagattcctgagagacgcaacgacgtcgtttcccagattagacccgagtgaacgactcagtaacgaacacgacgagtccgagtcacctcgtggactcaccggcggcgagttagacgacggagaaatcgaaaactgaaacgctctacgaatcgtaggagacaaaacgtcgaacgaatcaacacgatcagggctttgattaggcaaaaccctaatctgatccggcgaatgagcaaagaaacaaacacgacggcgacagttaccaccgtctttacacggctgagtccggtaacgcgccgggtgaagccaacactcaaaaacaccatgagaaaactcacatgcgtctcctctcttgcaacaacctttacgaaactcaggacacgccgtaccggagtaatgaaacttcctcggatcacgacggcgagctttttctccgggatgagcgtaaggacactccgtccaatcatggctccggccacgagcacaacgtctcactttaaactcatacatccgaaaatgatcgcatgtataagcatcgattggtgaatccggacccgagagatccggatctgaatccggatccggttcgtttgacggaagataacgttgtaactcagccaaagcttccatcatactacttcctccgtctggacttccgtaaatatcagacaccgttagatcttcagaaagtggccatggaggaatatgaaccgttggattaaaaccacgatgagattctccgatcatcatttttttacaacaattcactcaagaagaaaaaatcacattcgtctgagttggttttgttttttgtgtttgtgtttgctaaatctccggcaaagctttacttctttataaactgatgctgagtagtgggatatacttaaaccacctttgggttaaaacctaaccatggttaaatatttctgcttttatcaaccgcggttaaaatcgaaagtgagaagctacagtgacgtgtgtgtgatgcagaggttaaggacagcggcttgagacctttccacaaggatatttaattgacgtggatgatttgtgatagacttttaggtgacagccccgtgagtgagcggctgttatattactaaaaatttgattttaattttctttgagttccgaaggcagtggaagattggaagaaaacttttagatacgctgataaacgacaaaactaaaaatttatatttttaattaattagaaattaagggaacacataatctaacatttttagataaaatcactcataaccgtttattttgctatttaaaatagtagtaaaattatttagttatttcattgatgtcaattttgtaaaaattattgtgaaaaatattgattgggtatctatttatttgttatggagactgagaaaaggataaaacgaaagtgtctgtgaagaagaagacatgttggaacaaattgggaatagtaacgttaaaagatattaaaggagactatcatatgcttctttactaaaattagaagcaattccacctctctcgttttatcttttctgtttggttagtcaggatatttcgtttcttttaagaaaaaaactatttggtcaaaacaaaattttgtgtttgtattatgctacaaaccctttttacggtactgaacaaaatttcgtaattctatgtttatatattatgcttcaatttttataagaaaactaagtatacttagttgagatacaaatactatgcaattcactaatttcatgggtctttgaagtgtgaagttctaagaatattttgataggtacggtattggatttaaatgatacacctacataactaaatttacttattgcgctaataaatgttcaaagctaacatctatccttttagccatgaaaaaaaaaattatcgaagaacagaggtaaaagaagcttagacaatttagttagaaaagcttagagtccatgaccgttatgaatatctcaagcgtaatgacatcaagatatttacctgtaattgtaactcgtatccaggtttaccatttttaagaatttgttacacaattgtttaatttcaaaaaaattgtttcattttttttattgttattttataacgtttttaattattttgatatcgtttacagatttttgttgttaaatttgttttactgtttcgtgtcatcaattagattctttgtttagtttggtcggttcgtcgatattgagttatagattgaccataaatatttttacaatattctggtttacccaaacacaaaattctacaattaaaaacataataagaataattctaaaatattttgtaaaggtggtccttaaaatgatcaaatcctgcaatgattcatctcagccacaagttttacttttactttttccccaaatatcttgctcacattgattagtggtaacttgcaaatttaatgtctataatttcgcatgtatcgtagcatctccaccgttgatattatattgtagattgcaacctataatttgttgacagccataaaaggacaacaatcttgtagaagtccgttcagatgcatcatttaatttatttattaaaccaacgtggtattggtttagtatcttttactactattttaaaacctagaatttctgaatttaatggctaacaaactaaaaagaagttgacagctttacataaaagtaagggtggacatgagatttttttgtttgatttcaatccgatttttctggttttatagtttttcaaaacgatataaaaacagtatgtaattcggtttgattacggttcagtttatacgtttttacgatttataaatattaaaatcatataaaaactatatgtatctcggtttggtttcggttgggtccccatttttttagttattccatatttttacaacaaaaaataagtttgatgatgcataaataaaaataaactgaaaataaaaatactatatcaaccaataagttaaatataatagatatcttttaataatatttttttggtttctaaataactaaacaggtcaattattctaagcctaataaagaatctttttaatgatactattattaatcacattataaaatagacaatatatttataaataattatttttaattttaattaaaaaaacaaaaaaaaaaccatttttaaccaaaccaaaaccttaataaaaattacaactaaatgggtttttatataaaactataaccaaaccaaactatttatttcggtttgatagggtttggtttttttgcccacacctccataaaaggttagaggattcataacaaaatgaggaaacctttaaaagggaatttaaattccgttagccaaatgatcgtggaaaatgttgactgaaccaaaaaataagcatatatgtacaattagtagaatactcctcaaatgacaggattaattgattaaggcatgcatgcgagctttagtttactttaaggagcttgatgtcgcttctaattgaggaggccgatggagtcatggggaagttcatgtgtgtagttttgcatttctcttcttccaaatatttgtaaagagctttacatgtttaccaaatatatatatatatatatatatatatatatttttgtaaagagttgtttggaagaggagatgatagataagctttacacaaaggaataagacatcgacttatttttgtcaattgaacacgttttcaaagtctagatggattgaatatcggagcaatagccaacatcaaagtacgtagaatggttgcatatcaagcaagcaagcaaacatccaaagctaagaaatttcattgacagtgtatcattatcatgaatagccaatcgattatgcaccacaatccaacagatgacacctgctttggattcaaccataaatccataagaaaatcatgttcttatgtctagagtttattcaaaccgaagaacattgtatattaatttcacatttctttcttacgtttattacaagtatttatttgattctaactcaacatttttgttttgaaaccaacgtatgagtaagtcaattattgttgtttgatcatctgtgatgttgtcgtttttagagcatcaaaatgatcaatgcatataacaaagtaactgaaaattgcattaagaaaactgaagaaataaaaacataaattactttaaaatgctaatctgatgttgctaatgggttcatcacgctttgtactaacaaaacatcgttacttagttgaagaggaagccgattctctccctcgagtgtagcttttttttttttttttttttttttcttacgagtgtagctttttcatatgtggtattttctatttatttgacactgtaagttttatgatctctatcatttatgaatatatgattgaaaggtcaaaaaattgcgattaccatttttgtggggtagtcatcaaacggtttattttacggcatgaacaagttcgtctatggttttgggactttatcttgtgttttaacgttttaatggcataataaaatctaagatccaaaaagtttagatttggcgaattaggagattgacacaacaaacgaatatcaaaaccattttttatagcagcttcccggaaatctttatcactatatacgatatgtattttcacattgtcttgttgaataaagatagtttttttcgatctttgcttggtcatccttcttgaataatcgaaatggcttttgcaactagacatgtttttatacctactcttctcacggacatctattttttaactgtaaagttcatgcatctttatacttgttttgttttttagtttgttccataataacaaatggacacactcctattttttcctaaaatattctatttttttctccgtcaaaatatttcatttttttctccgtcaaaatattttattttcttctttatcaaagtaagaactatattgggaagtattttggcatatacgatgcggctcatcttcagtggagaagaatatataaaatactacttttactttgacgaagaatgaaatgaaatattttctaaaaagatagaagagtttccatttgttactatggaacaagctaaatgacaaagcaagcatagagatgcaggatttagatttaaaaacatcgacctctatgaaaagagaagatataaagcattatctaattacaaaaaatattccgattatttaaaaaagatggctaagtgaagatcggagaaaaactatctttattcaacgttgtatatagtgataaaaactttaaaaattgttataaaaatagttctgatatttgtttgatgtgtcaatctccaaattcatcggatctaaaaaacattttggatccttgagtttatagtgacattcaaatcgtacaacacaagacaaatctcaaaatcgtagacgaacttgttcatgctatacatgaatcgtttgatgactactccacacaaaaagaaaaatcgtattatttacctttcaattatgtatgatagagatcataaaaattagagagtcaaataaatataatatactacatatgaaaaagctacactcgagagagaatcggttccctcttcgactaagttgtgatgtttcattggacaaaccatgatgaacacattagaaacatcatatcagccttttaaagtgatttatgtttttatttcttcggtttcttaatgcaattttcagttactttgttttatttattgaccattttgatcctctaaaaacgacaacgtcacagatgatgaaaacaaaaaaaagttgacttacccatatatttgtttcaaaaaaaatattttgaattagaaattgaagaaatacttgtaataaacgttagaaacgtaagaaagaaatgtggaattattacaaaatagcttgaaacatagtactatcaaatcatagcatgatctgaatttagaaaaactttagacattgaattttcaacgtagcgagaagaagttcttatatttctttgtcgggaggaaactcccccacctcatagaaattcttattcaaatcgaaatcacaattgacacgaaagtaaatcttgtaaactgatagatcattcttctctttgctctaaaacatcacttattaattcgttttaatttgtacgtacagtaataaattttaagcttctagctagctaccggtagttgatggaggattttcagaaaataagcataagttcctaaagatctttgcttgtccaaagacatgtttgtgctacgacgacatttgttaacattcttagttaattactgcatttgtgtatacgatacgtactgacgtacatgcaacacattacacatgcaagttccaaacttccaatggaatttctgtagctaacatacgaataagttcatgtatatacggatgtatatgtacgtatagatataatacgtgtcggcaaaacacatgataagaatgccacctccaaaggaaacagtgaacatgaaggatcatgccccatgcatgaccgaccattaaatgaaaaatttaatatcttgtacgatttatactcaccatcatgactactacgtgagcccataaacaattaatcccttaattattattttctttttcttatgaaatctttgattagattttattctaaataaagatattgtaatttcacaccatgaaaaccgtgaatacatgtgtaatgtgttaatcgaataatgtagttaaatatataaaacagattactgtgaatgtgaaacaaagacaaactcttaaaatttgtaaaaatatatgtacgtattataacatgtaatctaatattgtaaaattcatgtaatccaaattaaaatgctttgttagaagcatatatatgcatcaatcgtcagacattattgtgtatagtgagaaagtttgcagtatagtagccggttttcaataaaggagctaaaacgaacaagtccaaagagagcaacctaatcacgtgatctgtcacaaagtcacgtgacatttgtcttcgcttacaccacgtgtcttaacctcctaccacgtgtcactttttccttttagctaaaatagaatcccgacaaagattactaaaaatatcttaataaaattgagaacagaaaagagaatcagtggggctaatatgtagtacgaaaagtacacgtggtacaaggcttttggtctttgactgatgacgtgttattgtctatatctatgagtcatagtaggaacattcgatacgattcaaacacgtggcacaatcgaactgagtggtttggttcaacgatgagaccacttcttttgattttgttatccgatacgattttttttgcgactttgcgggttgacccggcttagtcggagttttaaaggtccttaattacaggttgactattgaaaggctagctgatttctagatagaaaattttactttacttgattttaatatatatttttttactttatttggtgaatgcttcgatcatataaagtgatttaatttatggaaacaatatatatagctaacattcagttaacacattcattatacatcaagttatcaaaaatggatgatatgtaatatgtttagaccatttctaatgtaaatctttttttaaaaatagactaattctataacagagcatgattttttctaatatatcattttctatgttagggccgagtcaaaaatataatagatcctgaactgagaaaaatatatgggttttatttcctatgtttttttgaaaataaataaatttagacctaaattttaataaatttagttattaaaaagatagtggaccaaatgcataaaatatctttagcacatgtctttaactgcccctatatatgttactctaaaataaatatagtataaaaaatactttatatataacataattctaccatttttctattttagagtaacatataaaataggttggagagaatgtattatataattgagtttttaagtgtataataacttagacagaaattccaccaaaaaaaaataacttaagacagaaatttatattttattctaattaaattgtctaatttgattttattttgtttttatgtaattttctgaatcgtcacttgttagagaatcaacatgtattgttaaaaatgcatctctttatgtgctcatcaattcattattttttcactatttgatcttttctttagtatatgacacatatttttttttttaataaatcatatctactgatttggtgaactccggtatgaacacatcaaaatattacaaagtagactttttcctacaaaatcaccattctatctattatgaaaataattttttactaatgcttggtggtagctaaatcgtctgttacaatatttcacatggatgtgatattttgttttcgagtagactcgactggatataacacatatcagtattatctctaaaattttcatttaaaatttctaatatctttatattagtagtatacgctggcataaacttaaagtatacgtgaagtataacctttaaatgtcaagatcaattatatctatgctaaccagtaaaatacaaaggcattattgtgataaagacaaaatagttcctcttctatggagtcattggtaattcatattgcctgaaaatgatttgatatatcagttggttctttattttggcataaaatctgcatcctgtcaccatttcttgggattttgcaaagattttatgaaggacttaggttatgaaaactatcaccaataatgtagaataatagaaaaagttacatttcaaacaaaaataatagcttttggactggactagataactttgtttgtctattacaataaatacacaaatagacaacaaacataattggtaaattgagaggccatggcagccgttggatgtcgcattcgtatgaaacgttgttgtcaaagttcgtagtctttcactgtattacaatatgcagttacatatactcaagagtgatgttgataaatttgattagtaattcacgtttgttttattagtttaattgcactcggagtcggctcaattttttgagtaaaaaataatgtatatactatttttttatgaatatatatatatatatatatatatatatatatatatatatatatgtgtgtgtgtgtttggaagaaataattttattttgcaaaaaaacacacaaaagtttatgattttgaccaaaaaaatacaaatttaatgatattttcgaaatacctcagaattgttttggtagtttcgtgaaattgggccgacatttgtaagcctgtaatcatattaggcctcgttagaaaatcgccaagcttaacgatttagatctgtcaactaaagaaacacttaaacttgaactccggtacaaaatctaataactaaataagagcccctattgtcaaaaaaaaataaaaataataagagcccctttttccaacaaagtttttctttttaatgtccgaaaactcctgctatcctggtttagtttcatttgtttttactttttcgcattcgtcctttcaccttaaacagtcatatcaaattcatctaacgttttagtttgaagatccaatacttcgaatcatgtgcttggcatataatttgtgttgtggatttcattttctaggtaatgtgtcgatacattatcatttgattgttttacattacttttgtgtagttatgatggacggattttgtagtaaatcattgcaatttttcttaaatccactaaataagtgggcttatttccttgttgtaggcccatattgtaaatcgcgaaaaggcccatattgtaaatctcaaatatgtatacggagaatagtagacaaaacatatgaaaaagtaaaaatgagaaagcagtttgtactaacttctgagataagtagtactttgttttgcctgaatatatatagtaaattatcaagtacatacgatggcagtcatataattaaagtacacgacgtggtatggcaaagtaaaacgtgacgtggatcttagtcagtatctactatagtactatccatggttggttatttactgtttcagttgttgataaatcattattcaaaacaagagaccaaacttcgtgtgtgatggttactgctcgccgtttgacaatcgttataaggcaagaaaaagctacatgaacatataactatgacgagtgccgagtgcctaattaatcattaactagaatttgatagtatatgatgtagaatcattcttttgaggaaaagattcagtggataagctaatcagatgaatgaaggtataataatttcgctcaattctttccccttgcctataccggtcatccatggctaagaatgcgttagtgaataccccggcaatgtcatttatgaaccgcactctatctctacatttccctggagcaccaaacacattattgcatcgccatttcaacccccaccacgtagccgttccatgcaaagtcgaccactaacttatgtgtaactcaccacttccacctaagttacaaaacaaccactcaagtagcgactttgacaagaaagaatcaagcttatttggcgggattaaacgctgtcatatattatacccaacgtcataggacaatccctaagcaaatgaagtattgtttcttctccacccttacaaacttggcatatagttgtatcacagagatgtcgtcgatcgaaaccgttccacattggtcacaatagcttgattctcaacaagctacaagaagatcttcacagagaattggtgttattattcatagtgagagaattagtgttattaatcttagtcagtattgatcgacaattggtcacagagaattagtatattaaaacatggatagaaatgattttatatgtaattaagataaagttaatgttttgatatatgttatttataagaatgggaaagtcaagtggccgcccaatatatatatacatatatattaatttgttagaggtcagttattctttttaattcagtaagaagaagccaaagaataataaataaaaaaatgtctaattggatgttatcttttcaatttatctaaatgataaataaaaaacaaaaacaaaatatctctcgaaaaaaatgtgcatctttatatagttttaaatgatagaacataaataaataaaaaatgtgtctatgttttagatatgctctggaatatattttacatatgataaagaaaacaaataaaaagttttctttgaaatattttttcagatctatttttactctaataatataataaaatctaattaaaatacataatgatgtatttgaatttaagaagaaggacacatgccaaaatgagatatgtcatatgtcaggttctcaaaatttgtttttggaggaactttactttactatatagttttttaatctattagaagaagacaaaaaataaaataaaaaacaaatgtatctactttaatgttaatttttccatcttttctaaaaaataataaaataataataataaaataaaacttctgcctttagattaaaaataaaaactaaataaaaattgtgcctcttttctatttttttatgataggaaagaaacaaattaagaatgtatctttagaataaattttaatatgatacaaagaaaataaagaaaaactgtgtctttggaatatattttagatatgataaataaaataaataaaaggttatctttgaaatttgaaaaatttaatataacaatataatgaaatttaatgaaaatgcataatggtgtattttgagtttaagaagaaagacacgtgtcaaaaagagaaatatcacaagtcaacttctcaatactttttttaagaaaaaaatctactttattaatagaagatttataacataaaatttcagttaaaagttttttttatcatattgccatactttttgcccagcatttatttattgtcaacaaaaattataatattgcttcaatttatttatgtcacaacaatataaataagaaagataggtaaacatttttaatcacaaacacaaaaaatgaaactaattgttcagcactctcatataaaaatggtggtaaaaatagtggttaccttgtttcttcttgcatttggccttgctcatgctagatatccaattttcccaaccccatatgctcctccatcaaacggaattgtgaagacatcagtgaatcaattcccaggctttacacctccattttaccctccaggacacaaaaaacatccaccaagtctagaacatccagctaagaatgcgaagatgtcaataaactaatatttatacatatatttgtttttccggttataaaaattgcaccctataaattgatatgttttaaaataaaataaatatagtacctgataatgtaaaatttgtttggtattattgtgcattttaatatcataaatttatattactttatccatttcataatatttatcattttaacatttaattttaaatttcacaaaaaggtcagtttttaattttagataaaaattaaatttaagttttgttctataaattttattagttaaagaggtaaacacatgtagtgtattaataagagatataatagattgataacatctgttgtcatcatcgtttgtcgttgttttgctttgttggtggctgccgtcaacgtcatttagatctgtcgctgagtctcagtcgaacacggccataattagaggaatgagactaagtattgttcctgaattcaatcactaagataaaattaacccgctctcataacattaaagcaatcaaatccctaaaaactaaactctcgtttgattttaaaaattcaagtaagcattaaattttcaagtttgatttgttcacaaaatgtcttctcttcaattcttgttggctaaggacgtttggctcacctattttccttcaaacaattcaacaatatttttggtgccttgatgaattaaacataagatcataatctgatctaggtaatcaatctcgattaagcgttgacaacaattataaatgaagaacaataataaaatccaaaatctaacaacctaacatcaacaagcaatgaaatccctttgaaaatctcaaattcaatgaaaaactacacacaaatcatatatatgaaagttggacaactctcttcatatgagtgacacatcatcatacaagaaaatgacatgtgtcattctacatttattaaattaaaagattagcaaactaattgagaaaaaatcaaaagtcttttgttgtgttaaattctttattaatttcactcttaaataaatttctaaaaacattcaataaataaaaaaatcataataatgtatcaagcactattttcattttattctacttatgttattaatttatttttaccaatagtcattaattcataatggctaaatatttacttttggatataattatattttggatatttttggttacctaaaatattttggtttgaattcattcggtttcggttttttcggttatagaatttaatatctatagagtgccacatgtccacataaaatttaaagctaaaaaccttaagttaagttttacctttcaataatcaatgacttaccccttagatttcagattatcatggacccttacacttctcctctatcattttaaagcatcgactcttcataagccatcattctcaaagctaaagtagtttttaaactccatcacctcataactactttatatgcaccaaatagttaaaggtaagtttatcaaggagtttgtaaggttattttatacgtttatatctacattgtttttactaacattaatattgttctagtacttaagtcagcaaaatacaaaagaaaaaaaaaagaaaaacatgaatagaataattaaatggtagcacacgtcgtcattcatttttgttcttacaccttcttatccatacaaaatgcaaaagtgtgtgtatgtttgatgtagttaaattgactgtaggttctatgtggcaaatagtagtttcatgaattggcttgtgtacatgaagctgagttcttgggtttagaaacaaaggtagcagaaggtttaatggaaacacaactcatgaacattattattgttctttctagttatagatgaagttcaaattattttggtgaaagagaaacctcgtgatattgatttacctcaacctaaagcgcacaaaaaaaaaaacaccttctacgaatcgcaatattaattaacaacatgcatgatgataagcatgtatctcacattgatgaactaatgtttattctgaattctcttttttctctaacaaacttgagatctcttttttcatctataatctagacgtgtgaattttatgaaagtttttaattatatgatataaaatttaagagtttcatttggaaacaattttaaaaatttataaattcttagaatgaatgaaaaagtcaagacaatacaagaaaacatcatagctaaacataagtccgtatatagcgtggaaactcacctaatataagcaaaaaaagaaatcataattaaataaatacgaaggtatataaatcttctccgaatttttaaaaaggttcgtaaatcctctctcaaaagctcgtaaaagacggtacaaacctgaataaaatacgtctctcgtctaaaacttaaccactatgattttctaatacaagaaatgcgttttggtcggtttaggatcattttggaaactttaaaatcttgtttgaatgtagactgatcgattccaattttggaccggtcgatccctggttccctggattaatttccacattagctttagttgttcggcagctttaactatttggcagtttgacatgtctttagtaaatcgaccataagttttgattgcacttttagagttgattcaaatcacttgaaaacgaaagaagatcctcatctatcttgtgtcaaaatatgaggatgattgtacagtaggaagtctttcatctaaaaccaaacttttgacgcttttatgtaatcttacatctccaaatacatgtttgcattctaaaacggtttgttttcctcaaaccaacctaaaacctgtagagactcgaaatagacttgaaagctttaaaactacactttgacaaataaaagactccaaaacaaaacaaaaaatagttataaaccaataaaaattatgatcaattctcccgaacttgaatttttgcttgtcttcaagcaagaacgaacaaaattcagagatcaaaagaaaaggtttgaaggtggaaacttacatattcttggaaacttctactttgtactcttcatcaactcgattccataacctactttatgtacttgaccatgagtttaatcaacatcccttactctgtataatatcccaagatccaaaggaattttcaatattccatagttgtcttcctatatagatttagtgaaaagtgtgtgctctcggcgaaggaatatcgatcacgaaccaaacaatacacgcatttatctaggctttttaacaacgaacgtgattttaccgtaataaatcctaagagaagaaaaccaaaattcagaaaaggaaagaaaaataaaaatagaaaattatgtgggttgcctaccatgagcgtttgtttaaggtctgtattttgaccatttaacacaaaatattaagtaaaatcaacttcatccccattaatctcataaaacacaatatctttattgatataatgaaacttaggatttttaatctcatgaacaatcttgttattatgaaatacaacctctagataagattctttcaagagatctagatatataattgagtccctatataatttaaatatttaaggtcgagattataaacatttaaatataataatatttaatatcaaaacatatttttaataatgtttaataattttttgtgttcttaaattatctagatattgaaatttaggctgtgaatggtgaccaaaaccgtatcgcaacagtgttgtaacagtatcaaaatctctacatatacatatatatttatgtatttttgttattatttgaaccgcatcgcacttctcccgcaccgcaaaacgcagtcaccatttaaagccttatatactataactgaatcatacattttaaggcttgagatgcatgtacttttgattggcttggtggaacgtggttggccgaagtcgtaactcgtaagcactaagcagtgcggtgtttgtcttcaatatatgtaggataagaggtcacgagctcgttgaattttaaaaggtcaagagctactattaatatctttattgacgtcagccagacaaagtcacaatgttttatgattttttgtttctattttggtacaaactattcatgtttttgttttggtccaataattatttttgatatcaaaatatcagaaaaagattaaatcaaacgactactctatgatctatatcaaagggctaaaaagatcacgcgttgcagatgaagacaaagtgctattgacggtggagtatacccgccgcaatttcttatgtattttttttatttttttgtcgtttccttaagtatgtaacacttcaccaaatctattaatttggaatataatatttacaaaaattgttagttcatgatatattctttttttctgactaaatattttaagtataacgtagtaaaatgttaagagtcaacatatcttttgaaaatctatatatatggattaggataatttttctcactaaaatcacataaacgttataaaaacgacaattaatccaaaggaaaattaatactaacattgtagaaagccacaaaaaagaaattgaaatgtgagtagatgctgagtcagaggtttggtcaatacacaacagctaattgagataatattatacacgtcacgatgacttgttttttctcctcccaacttgttaatttctttattcttaaaattaaaccatcgcaaaaacagaagaacacagctgtttttctcgactcccaatttctattttgctgctaaggacatttcatttcattatttcccaattcaggactccttagattttcctaaatttgttttcctaacttgctctctctcattctaacattttctcatttttttagattatcttgtactttttagtagattattttatcaggttttacaaacatacattgacattctaaaaagggcttctaaaaattcagtgtggaatgctgatatactaaaaaaaggtcatgcaaaattatctacgatttatctaaaattagataatttgccatatataactattaactaataatcgatcctttgattttttgtttagataaaacgaaacagctatatcttttttttttgttatcggattttaatcgaataaaagctgaaaaataacagttatatcttcttcttttttaactaatgaaacagttatatcttaaacaaacaacagaaacagtaaaatattaatgcaaatccgcgtcaagagataaattttaacaaactaataacaattgagataagattagcgcaaaagaaactctaattttagagcgtgtaaacacaaacacgtcttgaaagtaaacgtgaattacacgcttctaaaacgagcgtgagttttggttataacgaagatacggtgaagtgtgacacctttctacgttaatttcagtttgaggacacaactcaagttatgtttgatatctaaggacttgcactgtctccaaatctgcaggaaggactttttgattggatcaatataaataccatctccattctcgtctccttccaacaacatctttcacacaacaattcacacaatttctcgtttttttttgtttatcatcaaaagttttaatctaaattacgtatcaaattccgagcaagatgactattcttgttgaacattttgttcctggtaaggtttcattgcttcttttaagatatatagatatagataattaatcaaatattggagattagattgatattagtgcatgagaatatgaacaatatcattacaagaaaaaaagctatgaaaataattttgtggtgacgattatagattcaagagtggatgaaaagaaagtgatagaggagagggataatgaattggtgttggatggaggttttgtggttccaaaatcaaaggaaactgatgcattcgatgctcctgatatgaatttcttgggccattccttcaggtttgtttaatggattgatccatatatttatggacataaatgttgttttggatcaaaactaattacagtctctcttttcttttagggattatgagaatggtgaaagcgagagacaacaaggtgttgaggaattttacaggatgcaacacattcaccagacctatgactttgtaagcaaaacaaacatactttcactatggtctagttaattaaattataagtaaataatgtttattgaaaatcgatcttcaaacaattggacaggtgaagaagatgaggaaagagtatggaaaacttaacaagatggaaatgagtatatgggaatgttgtgagttattgaacaatgttgttgatgaaagcgatccggatcttgatgagcctcaaattcaacaccttctccaaaccgctgaagccattcgaagggactatcccgacgaagattggctccatctcactgccctaatccatggtacatgtcttattctgctatatcataaaaaatatacaccacttttgaaaaatctaccatttatagtgttcaacaaagcatcctgactatgtattctttagtctttttttcttcttatggtttatattgagaaatttcaaaatgataagagcaaacgatttgttatgttgaacaattttgaaagttcatatagcttcttatactggttatgttactattcaacatattaaatatcttaatgcatacatgtaaactaatcaacatatctaagctacctattcttttaatgctttgcgttagattacgtgtgcaagataatttatttcaaattacaatttcattttcagatcttggcaaggttctccttctgccagaattcggtggtcttccccagtgggctgtcgttggtgtgtattcaatatgacttatcctcttctttgtttagaattaaattaaaaaatttttaacacttccaccaaattgtaggcgatacatttccagttggatgtaccttcgactcagccaatattcaccacaaggtaaaaaaaaaaaaaagaagataaaatagttctattcttagtatatttccgattttttgctaacgttttccgattaaattaagtgacaaaaatatacttgagctcttgattaatatatttaccattgttgtcttgcagtatttcaaaggaaaccatgatatcaacaacccaaagtacaacacaaaaaatggagtttacactgaaggatgtggtttagacaatgttctcatgtcatggggtcatgacgactacatgtatttggtaattaattatctacttcgtatttactatgaataaacctatcgaaaacaattacaaaaactattaccaattttgctgatttcgtcatttaaaatatatataggtggctaagaagaatggcacgacccttcctcacgctggtctcttcattattcgatatcattccttttatcgtacgttttcaaccatatatacatatttctttgtattaatgaattaattatacatattagataactattatttaaatttggtgtcattaacattgaatttaaaaattatgcagcattgcacaaggcaggagcctacacacacttgatgaacgatgaggacagagatgatctcaagtggctccatgtcttcaagtaagttttttttttcttttttgttctctctttcatcttatgttatttattttatagacttcatttccaattatgtgatactgacgaacaataatgtattgcagtaaatatgacctatacagtaagagcaaagttctggtagatgtcgaacaagtgaagccttactacatttcactcatcaacaaggtaaaaatacatttaaatataatttctttaataaccaaacttgtaataatttgtctaatgtgtatatatttttttgacattgcagtattttccggcgaaactaaaatggtgagataaagctacgagtcaattaattaactatcttttatgaggagaacgagatcgaaggttaacgagtttctattgtatacaacggaagataaatctatctaataaaaaagttggtgtgttcatttgtaattttttcccccatcagtttaaaagttatgttgtatgaaataagtatttcaataataatataataaaatctaattaaaatacataatgatatatttgaatttaagaagaaggactcatgccaaaatgagatatgtcatatgtcacgttctcaaaatttgtttttcgaggaactttactttactatatagttttttttaatttaatgagaagaaaatagaaaacaaatgtatctactttaatgttatcttttccatcttttctaaaaaataataaagtaaaacttgtgcctctagattcaaaacgaaaactaaataaaaattgtgcctctttcataattgttttttatgatagaaaataaacaaataaaaaatgtatctttacaataaattttaagatgatacaaagaaaataaataaaaatttgtgtctttggaatatattttagatatgataaagcaaataaataaaaagttatctttgaaatttgaaaattttaatataataatataataaaatttaatgaaaatacataatggtgtattttgagtttaagaagaaagacacgtgtcaaaaagagaaatgtcacaagtcaacttctcaaaacgttttttagaaaacacttactttattaatagaaaatttataacataaaatttaattttaaaaaatttgatcatattgccatactttttggccagcatacatttattgtcaacaaaaattattatattgcttcattttatttatgtcacaacaatataaataagaaagatagataaacatttttaatcacaaacaacaaaaaatgaaactaattgtcaagcactctcagataaaaatggtggtaaaaatggtggttaccttgtttcttcttacatttggccttgctcatgctagatatccaattttcccaaccccatatgctcctccatcaaacggaattgtgaagacatcagtgaatcaattcccaggctttacacctccattttatcctccaggacacaaaaaacatccaccaagtccagaacatctagctaagaatgcgaagatgtcaataaactaatatttaaacatacatttgtctttccggttataaaaattgcaccctataaattgatatgttttaaaataaaataaatatagtacatgacaataaaatttgcttggtattattgtgcattttaatatcgtaaatctatattactttatccatttcataatatttatcgttttaatatttaattataaatttcacaaaaaatcagttttttattttagatggaaattaatttaagttttgttctataactttattttattagttaaagaggtaaacacatgtagtgtattaataagagatataatagattgataacatctgctgtcatcgtcgttttacatctactgtcgtcgttttgctttgttaatggtcgccgtcaacgtcatttagatctcttgatgaggtagtcgttggcgactctccgtcgaacatggccataattaaaggaatgagactaagcgttgttcttgaattcagtcactaagataaagttaacccgctcttataacaataactatctaagcaatcaaatccctaaaaactaaactctcgtttgatttttaaaattcaagcaagcattaaaatttcaagtttcatttgttcacaaaatgtcttatcttcaattcttgttgactaaggacgtttgactctcctatatttcttcaaacaattcaacaatatttttggtgacttgatgaattaaacataagatcagaatctaggtaatcattctggattaagcgttgacaacaaccatatatgaagaaaaataataaaatccaaaatctaacaacctaacatcaacaaataatgaaatccatttgaaatcccgaaactcaatgaagaaactacacacaaatcatgtatatgaaatgtggtcaactctctccatataaatgatacgtcagtacgtaacagtatgtcacatagaatttaaagctaaaaaactaaagtcattgattattggtaaagtcattgattattgaaaggtaaaacctaaatgcagattcaacaatatgtggagttggttggatactagaagattaaaaaagagtggtaaggtgacaagactttctgaagattgtggttaaaacatggaagtggtaggtactagctaggacactagtgtggacaaggtcatgcttggacaacttggaatataagtatgttcagtttgacagtgactctaagcaattggttcaacctattgatgatccaaccaaatggccaaggctgaaaacatacacaaaagagatcttaaggaatccaagaagacacttttcagccattcgtttttttcaagaagtcgacaaacagacctatgtgcggatgtaatggctagacaatgtaactatccttattatcatcgggttcttgtgaattgtactcccaattggtacttttcgatttcctgcttcttttgtattatcctctctttgaagcatcgttaataataatacaagaagaagtgtgtaacaaagtgatgaaacggattaacagaaatagaaacagggtgtttagcattaatgggctttgtccataagttgtataggtgaaagtatgttggctttgcttgtctccacaatgcaaccattcatcaccatttcttccagcatgaaatgagctttctccagatggaacattatgtctagctcacactgcataaaataaaaaagagtttatataaatcacaaagtgggaaacacaaaaaacaagagagtctattcgattcgagactactatgaacctatacagcttaccacatttccaaaatgcttgtccattgtctcgaccaaaagatgtatgaactctagaatcgccagctcgttctacgacaagaatcagagagaagagaggatagtttgcattatgagtcatcatacattgtaaacatgtataatgacatgatatgcataacgattgcttccttatgatctataaatcaatcataaacactcttctaaattgtatgcagctcaatacgaaaacagtgatgtataacaaacttacttcatcgtcatcaaccccaaccatgaagaagagagatgcgtaacgcctgtagactatcttgtagttgcgatgctcgacaaacgaacactgtttattaagagcaaatgcagaaaaatttagtcagatgccgtaagctaaacagaattaacaaagaccttaatgtaattaggatcaatgatactaaattagtttgaatccaattagccaatggtcggtgatttatgcatcaccgctacgaaatttcccaaaatcggctatgtatcaatctagatttccaacaaaattacttcgattcccaaatttatcgagaagtaataaacctaatgcccgatcgatccatatccagatcatctaagaatccaaaaatatcaaaactaaggagatcaaaatagatatcaatgagacgagatcggaggagaatcaggagcgatctaatagaaattgaagaaaagagtgaggaagggacctgttggtcgttgcgagcgaggcatttacggacgatttcgccttcgagagcgcgacgttcctcgagagtgagccattcgtagtactgagcaagacgagtctggccttgcttgttcaccatcaatatgaaccttattcccatctccaactagctccaatctctctctctctctctctcttccgattcgttttttatttctttcagatctttttttttttttttttacttcttcttcttcttctacttgggagttaggacacgtcatcggtactctgttcaattttactttcagataaaatttaaaaaataagaaaaaacttgcacggtaatattgggcttatatgggccgaaaaaaacatgcatggtaatatgaaaaaaactaattttattttcagttaatactgggcttatatgggccgaaacatacaacgagtcaacgacccgcaggttcctctctctcttctcttcaaatttcattagattgatataagcccactaatattaaacattgaaaagcccatgttatcaaaactagttttgggggaaaagtgtatgtttctgcctatataagcccactaatattaaggcaccgaaaagcccatggtatttatgtgtactgacgttattggtttgcaattttaagaaattataggaattcattactaaaatatatcgttgaaccattgactacgcacaaaaaaaacatgattttggcatcgacaacgacgacaagtaacaacaataaaacgaacagattagccgtcatgccagctacaaattattaggttagacaaatgttatatggttctgttctgttctgtttcaaaatttcaaatgtttgttggttttgatatactgtaattattaatgtttaacacgtgtagagtcaaaagcttcgtaagcttttaaagtgtatgaccctaaaacaatataccgtgagtttaattcaaaactataagtctataacaatggcctttggttaatataatccattaccaccatttcatttcctcttcaaaaattgatacaatagaacatggaataaagataaaactcgatatgtttcgtatgaatgctatagatggcgcatgcggcatgcgatatagataaaagaaaaatgtgtttctttatgaatgctataatgtctctatactcgaaagtcaaaatggggaggaaaaaaagatcataatgtttattcttttataatcgttacctttttcacccaaaagaatagtgatgaagaaaaaataaccgttattagtggcctagtggggaatatatagcttacaactcaaatttacagaaaccccaatcaaattgttgattcttctcctccaccttcttcgcattcacattaaatctctcactcactaatttatgtaatcattaagtgcgctataacctaacctatttatcaatatatgtaacatcacatattaacactacatggaccaaatttattaaacattatacatacatatccacatctacttattttgtattatctaatttatatttaccaaaaatacctttttttggttttatatggagatatgagctggcggcttgcatatccaaacataagattcatacaattgttgtattcttgctagatttaagtattaatatcctaatattatgtggacattcttttgtttttattttgaaacactagttagctgcttgggtgccccagatataagaaacatacaattgtttgtccactagctagattcatatattttgtattttccttaatctttattaacattagtcttcttttgaattccatcaaaatttgtgtggatgatctcactcattcgtaaaaggattttttttttttggtttttgtcttatgtttatgtttttctagcttcagtagtgcaaaacggagatcaaaattatgttacgtaaattgagttaatatgagatgcattttcacaaatattattaaaaatcgtaaaatacaatgagatgcatgtataactaatagattttgaatggaaaaatctacaagaaatttaagtatccacctaatcttaaaacgaacaatagtactcagagccagaatataatgggtggaaaataattgtatattttaacgccatttattttgattaattttctagtatatatggatgactcattcccaaaatctattggtgtgtgtcccctccatgtgaggcgatacaaatctcccaattttttaacatttcattaaaatcgttatctcaagtcaacacaatctcacagcatttcacactcagaagctgctacatatttttctttcttctatactttaaatagcctccctagattctgcttcttcttcttctttttttctcttttctacttttgatatatgcatcatcaatgcatgataaggagtataaactaatactatctggtaatttgtcgtttttaattatttcctttgtatcaaatttggtcataatacgcaacagtaatgttgtttttacgtcggtcacaatagtggttcagttcttcacattattactttggtggaaatggaatatcagaaaaatcaactgatatgacagacaaatattatgatagcaaatcggagtcagtggaaagtggaacgtggaaacactaatattagtaggtactccataaaataagatgattttgttttatatacaaatagttaattttctttgatattaatacatttcatgtatttattatgatcaaattttaaacatatgtctagtgacatagttgtaaataagttttaaaaacaaagtgttgcttagaaacattcttaagaacgttctattgatagcacatggataagtttttaatatgtatttctctgaattctcaattaattcataggagacttttttcaggttctttaacaaaaaaagtcgatacaagaatcctctgaacacagaaggtaattaatggttttattatgacaattgtcactggtcagtggtaacttctaaaaataatttaatcgatagtatttttttcttctaaaagcatggaaacatgaactctaaatgttaaatgttgcgaaagacatacatataaactctcctaaccatatgcaataaataatatcatggagtatatactattcccagctaaataatgcttataaaattcatgtgacagttgatgaattatagcacgaggccattggaaaaaataaaacctaagttgaaaacaaaacagtaacggagaagcaaaactccatcaatcaaacccattgcccccacatttgctgctaatcatcaatcaatgcttcaaccacacttttgttaacaaacctcattaatccaacaaaagtttcaacattccccaagaagaaaagacagcaactttaatcaaagcttctcgagtttgttgagtatcaaaaagcaaaacaagaatcatgaagaagaaaggcaccaacaacaacaactttagccttctgtctttgtctctgttcctgaattgtttgattctaacaaacggatacagcattggagtcggagttggaatcggcggtggagacggtgacgacggcggagtttggataggtggaggaaaccctaattccaatcctggctcagctccaaaccaacaacagacaacaaatgcagcttacaatgctcttcaatcttggaaatccgccattacagaggatccatctggtgttcttaaaacatgggttggtgaagatgtttgttcttacagaggcgtgttctgttctggctcatctataacctccatagatctaaacaaagcaaatctcaaaggcaccattgttaaagacctctctttactctcagacctaaccattcttcatctcaacagtaacagattctctggtcaaatcccagattctttcaagaatcttgattctcttcaagaactcgatctcagcaacaacagattctccggttctttccctcaagtcacactctacatcccaaatctggtttacctcgatctccggttcaacaatttcactggctctataccggaaaatctcttcaacaaacaattagacgcgattctcctcaacaacaatcaattcaccggagaaatccctgggaatctcggttactctacagcttcggtgattaatctcgctaacaacaaattatccggcgaaatcccgacgagtttcggtatcaccggttcgaaattgaaagaggttttgttcttgaataaccagttaaccggttgtataccggaatcagttggtttattctccgacattgaagtgtttgatgttagtttcaattcattgatgggtcatgtccctgacacgatctcttgcttatcggagattgaagttttgaatctcggacacaacaaattctccggtgatcttcctgatttggtctgtactttgaggaatctgataaatctgacggtttctttcaacttcttctctgggtttagctctcagtgctcgagccttagcgttgggtttgatttcaccggaaattgtattcccggtaagggttatcaacggcctcagccggattgttcggcgattcctggtggccaattgagctgttttagaattccggcgcagccgttaacgtgtgctgcgattagcttggggttgaaggtggcttcatctccatgaaaacataaaaagttcgaagcttttgtattggttatgcaattgtgacttgatagaagaaaatggtttttatcagttacattattaatcaaactgatttatattagtagataaaacttatttctgattttgaaacctttgtaatctgatctttctaaaaaaaaagaaaagttgggatcttgctaaggattttttttgtttgtttactagaaagagcaaatattgttgagatgaaatttattatgttcatcactaaattaaatggtcttcaataaataaccaaaaaggaattgataatgttgttgttggtccaaaactggtcctgtatttgcctaaccaagtaaagaattctacaatgagtaatgatggctaagaaagatccataaaacatatgaaaaatgaaatgtgatgaggattagcaaaaataaaaaagaagacatgagcagaaacatatcaatacaaagatagataaccaaacggatctttaaagtttatgggttgagatagataaaattcttaaattctttttagacttcgcatgaatcgacgacattgagcctgacagatgctaaagagagctacgaagaagagaaatgtgtttgcatgcaaatgatgtgttgtaccgcaacgtgaaccactagttttgctcatttttatttgttaaatggtttgctccatcagaatttattttattggtaacgactctaccttcatccctgttatatcaatgttttccctcttcgttgtatactatactaatcagtcttgttatcatccgcattatagtagaccacaacaaaaatcatttaactaatcttcgtgtattgtcgattcaaattaaatgctctagtagataatttaggagtagctaactagctatagatcggataaaacactagtttcatagtcttttcatgcatttagttagttttgttgcaagaaatttgagaatatagtttggattaaaggaaaaaagcatgtggaaaattggagaaaacatcatggcgatcgccgatcagctatgatcagatcaatcgtcacctcgaccgatcagaagagggacaaattagcagaaatgacaacaactcttctgaaaatagtttgatcggtcactaaaatgatcatgatatccattaattatatcacgtttagaacagatacattggttcttttagctagaatctaagtctatgttgttatttggtacggcacaatgtctcaaagagtaaatccaaactgtgtcgagaaactataaagatccaaattcaaattgagacaatcttttttgagaggctgctacaaaaccacatcttttttacaaaatcttgttcatttccttagtcttttaatcatatatgctaaacaaatattaatagtttaatactgttattatttcctgaaatccttcttgttcgttattattaggaggaaattagcatagggaagaaaagacacgtggcgtgcatgtagtgaatgattaagctataacaaaggcgagacgtcagtagcaataataataaaaaatgagcggctgagaatgtgtctaatgaatccaacggcagatacttcatcctacaacattcttcttcgctccctatttatcgagacgaccaagtccccctgggagttgcattgcacacacatacatacgtagagagatccaaaatacccaacctcgcagagtaaaagcaaaaagaagaagaaatcagagagaatgtcgtggcaagcatacgttgatgagcatttgatgtgtgatgtcggcgacggccaaggtcaccaccttaccgccgccgctatcatcggccatgatggtagcgtttgggctcagagcgctaattttcctcaggtataattacctcctcctctattatcgatcgatcatgttttggtttcgttggtcttaaatcttttatgtagagaaatatgatttgatacttgctatttctatccgttacgtacgtatattatggacatatttatagtgatatataatatagatgagctgatcaactttgatttgtaatctcaccatttgcatcaagttcattgttccggatttagttcaacgttaaaagtctgaggattcatttgtcttcaaatagttcaaacctcaagagatcacagacattatgaaggatttcgatgagcctggtcacctcgctcccacgggtatgttcctcgcagggctaaagtatatggtcatccaaggcgagcctaatgctgtcatccgtggcaagaaggtatgtttaggattaacgctcgattgtttgtgtttgcattctacaaaaataatctaagaaatcctaaaatatattgttttatttttttaaatatgtgaattttactttgcgcatgttaaatgcacatgtataccattgcatttgaaacaatcgacgtttaaggcctagcaaccatcgggatcgaaaaatattttatgaaacttgaattattttctaataaaaaagattcacatgcaaacgcttaaaacaattgaggcctacgattttatgagaatcaacccctcccattgcactccatagagccgactatgattaagagaataatctcatgcaaaaatggtcaatactctaatcattttgatagtatttgatgttatgaatgtaattcaaagtcttaccaaaagcatcgcttatatggtacatagtatatagtcgatgattttgcactcccaaactttttcatttcttgaaatgataattacattcttgaaactataagcttatcataaaaacatttaatgttaagaatttggtttgaaactcaaaaccattaatataattggaacttgggcagggagctgggggaatcacgatcaagaaaacaggacaatcaatggtgtttggtctgtacgaagagccagtgactccaggacaatgcaacatggttgtcgagaggttgggtgattacttgatcgaacagggtctttgaaccatctacaatgttttatatctctttctctataaatcattaaacctttgtttctctttttgggttttggttttccgtttctataatttaattttgggtcttcctggtttctactttagccaagtttaacagaaagcttaagcctaaggttgcagataataacactaagcctgtgtgaagaagccaagacttataagacttttgtttcttttttctctttttcatggttattgattaatttgtgtttttaaaaaaaaattaattttatagtattgttgcgtatatataaacttgtcatgttaattaatatctcatttcttcatatacataccaaagccatcatggataacaattaattatgtaatcgggtgttggacatataatagctatccatgcgtttatcgcttgaatcgacggtgtcggttcacatacatgcacattgttaccggaggaagaatggaggacatgataactcctagttttttcgatgtttattttgacaagactacgaatgtaaacatgaaaataaaactcgactaaccaaaacaagaaagtaccaaaccagaagtatttcgattattcgttctttatttattttcagttattgcatacattaagagatttggttttccttgagtttagaaacactatctccacttttgaaattaatatctagtgttcaagacatcaagtttacattgctttgattattttagtaaaactaatggcgtttttatcagttgaaccaatatcacaaaaccctcaatattcatgtatgtatctcctaatttcttttcatgataagcactaaatagatgggatcttaaattgaaatagagactatattttcatattttgaatcttgtgaaacagaaggtattgttgtcaattaaaatgtctaaaatgaccagccatgattgcgagaactcgaactcaaaattttcaattcctataatgacctaccatgatcgagagaactctgaactcataatttataattccatgataattcttttaaccacaataccactaaattatttctcaagtttgattaaaaaattgaaaatacgaaagtgatggaccacacgtaaatgcaatatttggtgtaacgcaataatatatgattgagaatctcaatttgagatcttgctatagcatatccactctgtatttgaagagaacaaatgatgttgccttctggcatattaatttttttctttttttggaataaaaaactttatttttataattgggaaaagtttttgagtttcttttttttttttttgttaaacaaacatccatttggaaaaaattaaagaaagtattatgataaagaaggattaaaaaaaaaaaaatcttcttaatatagcttacaatgttttgttgttaaagtatagctaagtaaagtatgttataaatggtgcatgattttttatttttgattaaaaagtggtaaatgatatttttttcctccattttgcatttttacactttgtatgatccaatttgcttttatttatctacatataataaatctctataataaaccatttacataccattactaaaactaaaattataatggaaaaatattattatgttatttattgttactttggtaaagcattattatttattttgcttattttaagggctaataattaattgaaattaagcagttgacgaaagttttttttattaatttataaagcacaacatttccttgtctacacgatcataaagctcacaaagagagaattgagaagaaacaaactcgtcggagaattcagtactcgccgaagaggaagaagaagaagatgtcttggcaatcatacgtcgatgatcaccttatgtgtgatgtcgaaggcaaccatctcaccgccgccgcaattctcggccaagacggcagtgtctgggctcagagcgccaaatttcctcaggtttttttacttcttcatcctctcttttcgccttactacgatccgtcgcttgaattgtcggaatcctccgtgatcggatctgacgaatctcggatctgattttgaatttttcaatctccggaatctgatgaatattttcgatttgcatttctaaatctatcgatccgtatgcgaaattgaattcaaacgtagggctctagaccattagtctattgtgagatttcttcggtatcagaagttattagatcgtagcttccatagaagaagatccatatgcttgtgaaattgtacgcatgcgtgtgcaaccatcgatgcaaggtcttcttcttcttgtaggcatgtagattctatggtcttagtcagaattactgcttaacaattgcatcttggataatctctgtttccatttttcttatatgcttgaggaaatgttttgatcaatagcctaaaatgttgatttgattttgccaaaatctgatgatgtgttattgataatgtgtgtttagttgaagcctcaagaaatcgatggaatcaagaaggactttgaggagcccgggtttcttgccccaaccggactatttctcggtggcgaaaaatacatggttatccaaggtgaacaaggagctgtgatccgagggaagaaggtaactttctttacttcatacatcagaaagctgcatgtagattttgatagagaatagaatcggaattcatgtaacaatctgtgaatcttcagggacctggaggtgtcactatcaagaagacaaaccaagctttggtctttggcttctacgatgaaccaatgactggaggtcaatgcaacttggttgtcgaaaggctcggggattaccttatcgagtctgaactctaaaaccaaggtttcatttcaggttcttcttaactaaagagtgtcaatgcactttttattgtgattgattgtaatgctttcaaacacaaatcatttgttactttagaaccaattgtgattgattggtctccttcgttaccgagtttgagtttgtgtgttcttgtaatgacatttgatcatcttttttctccatatgtattgagttttgatttttgtttcttcatattattactttttcttgaaatgatctgctgtttatgatttggggttcaaaatatttttggtttggcaaacaaggaagagtttgccaagtattagtagcaagtgctatgagtattttcggcttggcgaacatcttcgtgtacacgtgtgacataacaaacctatttgagaatggtgtaagctaggtagatattacataaacgatgtaagttgggaattcgtttaggagagagatattgtatggtaagaatttcacttcgaattctctgcttcaacgtggcgaagtttgaaacagccattgaagtgcaacctctacagaatagagcaccatcgcaacatttcctccgatgatctctcctcaccaagcatatttttacgcggtcacaacaaacattgaaccaaaacagtaataaaattatgaaggactatgactgggaatgtgcaatgaaagatgaagttgttgcacatgaaaacaacaattcatagaccgttgaaacactagcgaaaggcaagaaagctcttggatgtaagtgggtttatcgcatcaaacagatcgcgaatgatgattacaaagaaatctttgcaccggttgaaaaagtgacagcaatgaggtgttttctcgaagtctcgtggaattgggaggtgtattaacaaaaaagaaaaaaaaacagacaatcaacggaaagttgggaacaagttcttaagttggcaattgatgagttcaaagagtggttggattctctgagtccccatgaaaacgaactgatcaaacgtggtaaataaagtatgcggagcagaggttttacaatagtggaatttaaagggtacacacgaatacataactgcaaaagagaggttcaataattcaagaacttaagtctaatctgaggagaaacaaaaatcaaattgacaagaaaattgacacaacatccactgatttgtagataaccaaggttaaaccactttgatatcgatgagtttggaccaactaatgacacaatatcaaaaacatcccataaaatctgaaaagggtaaaaccttcttctatctacttctctgatgagtttggtcctctcttcttgccaaaaccaacaactgaagaaaacatatacaaaaccaaatgagaatccaatcgttattcatttgtcttaaacaagattgtttgaacacagaaataatacaaaacgtagattgtttgattaggatttgataaagagctatgaacagagaattgatgatcaaaagcaatcactgcatctaatctaaagattagatttaaagcatttctaagaaaattgatatgaactagacttagtaacacgaatgtttgttatgatcaaggcacactaagattatgcatcaatgatgtcaaaagcgattcacaaaaaaaaaagcaaaatgatccaaatactgattcagtgatgtctaatcacaagtcctacgatcaataaaaccctaattcaactaaggagagcgatctcagacttagaattatcaaattaagagatggattaatcgatataagaatcatacaccgagaatttcaaagtaaaagctaaataccggcggtgacgaaacggcggttgtgttgcagacgcttatgagcacgaccacgaggcttcttcttcttgtcctgcttagccactttaggtgtctgacctctcaccttaccggcacgagccaatgaaccgtggacctttcctgcgagattgattacaatcattcaaagagaaacaaaacatgaacaacattgttgaagaagaatcagcaataggtagaagcataaggagacaaaaaaagtataggagaattacccattttttagattacagagattcttcaagcttctgcttctcttggctgttggagacgacgatgctcgatagcttgcttgcttactagggtttcggaaatttacagtcgtttatattagggtcctctttaatgggccgtattgggtttcaaatggggcgtattgagttttaaatgggccttaatttctttttttgtcatcgctttcaataaaataaaaattagttttcgaataactttatttatgaaattggttttggttttggtttcaagtttttcaacacattgaaacttcagtaaaaagttgcggattaattttatttagaacataagtaaatattttttccttaacatttgtaatactctttgattttatatggacttttggattatctacccttttagtagttatgataaactccaccaacctaacaatgtggagtatcaaaccaattcgttacacttcaacccagacaataaaccggtctggtacagaatcagaaagatgattgcgaagtaaagtgcgtcacaaaaagatcaaactcgtatgagtagtaccaaatctgttgtctatagaacttaaaacataagaaatgataaatgaccaaaataggtaagtgatcaaaacaagcaaagtcttttcgtttcgtcttttcatctaaagataaggttgtgtgagtgtacattcaccaattttcactcctcttcttcaatgaccttagtacccaaaccagataatccttcagccggaatctcagcgacggtgacgagggagaagaactcttccttggcatcttcatcatcgtttctcttacgggcaacacggactctaattctcctcgggggacctcggatacctttgctccatatctgcttgttgagtttaacatccactctaacgtcctttgttcccattgctttcaatgcaaacttcctgatctctttaatggcattgggtgccttcttcttgaaggtgctgttcaatttagaaaccatcaaactcagtatttcttaaaccacatgatcaatcttgacaacgaaaaaagctctaatctaaaatgtacctaagcaacaagccaacctttctatacaataaaaggagtctaatttctccattttaaactaaaatttagacaaagatgcaaggagccaaggtgatcaacaacaactaggagatctttatgatcattactcatctacagaatcaaaattttcaacaaagattcaaatattctaactcttttcattcatcaagaaacctaattcgaatcaatacaagttgcaattttagtctaatcattagactctatgcccagaacgaacttaagcaaaacggaaacgagatattgcaaataaggtcaaaagtattgaagctttaggttttaccagctatggaggcgcctgtggagattgatagtgtactccctggtcacgacctcttcctttcttccctttcctttctccattttgcttcgatctccctggtcttcgaaatggtgttggagacggccacagcaagagaacagaattaattcatgtctaagaaaccctaatataaacctttccgtatgctataagttgggccgtctatgggcctgatgggcttttggataagtatagagcatgctaagatggaattctcaagttggtttttgatgggatctaatgaaaatgtcaacattatagtccacaagaacatcacatttgatgcaacaaatctaaacatttatgtttgctattttgagtcaatttaggctttcaaaagtcataatatataaggacttggttgttgattacatttgatttgctaataaaatctagaatagagattttaagaaagttcttgattcgataaaaggatctaacaaaatgtaacacaagcacaccagaaacatcaagcataacaagataaacttctaactcctttataataaggataatgaaaaaggagaatagcattatggttcaacttcaaagcaacaacttaaataaaacctgttcaacaaaatcttttacttcaaaaaaaacagattgtgaaagaagaagcttaagcttgtctgtttctttgcttggcaccggacttggcaaccctgagacctttgctgatggcgctgagtctagcaagtgcagctttcttcaagtccggcctgtagtagttgtccaccacctaaacatttacacaatcatttggtttagattgtattcacgtatgaaaccaataaacagcaacattaagcagatcaatgaaaatagccaagtgtaaaattaatatttcatcaatatgccacaaaaaggagccttatatgaagttaaattttaatctttgcacagctatgcatcatatcgttttaccataacatattaactctcctctcacaggtagagggaagaacataaaaaccaattgtagatcatagccgtgaaaataacacacaaaactagatatagagacctataagcacaccatagacatataaaaaacactaaagtaataaaaattgagtaatacctggttagcaacagcctttgacatcctggggaattccttcttgaggatagacttgttgacagagagcttaggcttgttctgcttcttggtcttggtggtggcgagcacaacagcttggtccttgtcagcggcctggatggtcacagtctttttgtttgcaagacctgaaaccacatcaaaagattcaaactttagcctaattcaagacaataacaaaacctaatacatagtatgaagtgtctgctcaactcagactaccatttttgtctttaaattagaagatacatacacaattgtaatacagattcaaatggtcaaatgtaaagaaactacatttcacggtcaacttgcaacagataagaaaataagcttatactcgagaatcaataaaatagtgcataaagacgatctcaaacagccaagtttcaaccacaatcatctaatagtcgagaatccacaatctttcatagaaccaaaagcacttaacacatcaacatttcttaacaactttagttcccaatctattctactaaatcaaccaaccagagatgtaaagtaatcatttgttctcaaatggccaagatatcatttcgttcagaaacaaagaatctcgtaaacaagagtacaaatttaccagagtgcttgtaagagtgaacgttggtgaggttgttagtctccttgctgaattgaaccttagagtttcctctaccgaactgcttcaccaagaaacagttgttgttcttcacgatctcccagatcaattgtcctggaactgtcgccatttcaaatacctaccttcaccacaccaaaaatgatactaccaatcaacaacacatacattaacagatcgattcctaaaggctactactatagagctcgctgaatcaaaatatctacacaaaatcagatcatctaagctacgaaaatcaagacatactgaactgagaacaattgagagtaatactaagctcaccgtgaaatttcgcagatagagatcgagagattttaatggtggcgccggagctttgttagaagacgaatggagctatttatatatgacctctgaaaaaaataaaaccctagctcatgtaagtgaacgtgaaaagtctaaaatacccctaatgtttttcgaaatgtcgaaatacccacaattctgagaaacgttggaataaacccatttcctgctgctctgttgaactttaggggttatcgattctttttgattcgttgtcattcgattatagaatttgtattagaaatcggaattttcgatcaatggggaggagaatattgaacgatgcattgagaacgatcgtgaatgctgagaagcgagggaaagcttcggtggagttgaaacctgtctctaccgtaatgtcttcgtttctcaaaatcatgaaagagaaaggtgagatttttcacttcttctttcttctggtctaattgggtcttaattcatttccctaatttttcatctacttgtttagatttatcagtttcgtcgacattggttttagtcacttttgcttgtagtgaagtatgattaatgatccatagtctctattgttttgttggtccttgagctgatcctaacacgtatagctcaagaatttccatgtgtgatcactcgatgtaagagattggttacaacatggtcccaatgattaagctttgttcttggttaactatgaagttgcagaagattgaaaagtttctgttttttgattcttatggataagttacatcttgatctatggttggagaaagtcatatctgctcctgtttagtttatggtctaacttaagtttgtttcgatcttcgtctgtgttttgtatgtttttagttaggaatttgaagtagttcttttcaaagttgatagtttgtgactgaagtataaagataccatttctatgctcaaaccgcagaatcagctagttttttgtctattactttacaaaatgtatgttgatgtattatgtatagggtacatcaagaacttccaagtccatgatccacacagagttggaagaataactgttgatctacaaggaagggttaatgattgcaaagctctcacttataggcaggacgttaaggcaaatgagatcgggcaatacacagaacgcacacttccaacgcgccaggttcggttctacactagttctgaatatgcaactaatcgtaacttaaaccttctttaatttgttatatgcagtggggttatatagtgattacaactcccgatggcattttggatcatgaagaagctattaaacggaatgtgggtggtcaggttcttggtttctttcattgaactgcaatacggaaagaaactctgatggagggactttgatatgtcaaaccctgccataacatgtcatttgtctggctttttcgacattgtttgtttgtttgtttgttttcttgcactgcagtttcagcaagatggagaattagagaacaaaatttatttctattatgacaacatttcgaatggtattataaaatctttctcttcgcaaatagttattttctattctgtttatccacacaaaaaaaaaaaagacaaggaaaaccaatcaagaccaagcagaatcacaccactacttcaatctgtataacgtgtaagaatatcaaattcagtcagagtaaagaatgaggggaactgttttccgtgtgaaagaatatatatatgaacagaaggacaagatgagcagattcagcgtcgactgggagcacgaagcgctccgagccttgcaaagatatcgtcatattctgggaggttggggtgaacatgactagctctctccctctccctggatggggtgtctggatcgggtgattttacagtttgtggaacatggctggaagttactgtccttggagatggctgatcatgagactctttgtcggttttcttcgttgtcactggtaatgaatgtttctcattagctttcgattggccctttgtccttagagagaacccatacccggttgttttatttggcttggcattgatgcgtgcagcctctctttcgacttcttcctcatcttcagacgatgctgaaactggcatcttgaagttcgttctcttctgaacccttattcctgttgatggcttatgactcctctcttgaattcttgaagaagaccgtgttgggagtttttcttcctccgagtcatcatggttgacacgggaatgactatataaggaatctgattttgtttctgttcttcctggatgttgcatgtctgagtcgtcttcatcactagaagatggatgaggaggcataaaacttggtcttgtctcggtgttgcttgctttcttactgtaaagatcttttctgctagactgaccaaaatcatcgatttggatatattccttttcagccttggacgatgccgaactcattctgtagggtgggagtgtctttttgttcctaaatccaccggccaaagctccaagcctcagaccaagctgaggctctgagtctgaatctgattcttcccgtgtccttgaattatctgtgtgttcttctgtgtctaaagggaaaacttcgtgtccagcagaatcagagactttaaatttgtgagatcgatcagatgtcagattccccctctcatgtacatctccagaaactttgtctataggctgatcaccatcgctttctgagtttggaccataattgtcaaacttggcatgtgggtcaggctcatggtaagaagccggaggacttgtagagacatcatcaaataatcgggaacttgggttctcttggaaaacttgtgagctcgagctgctgtgttttccatgggacttactatgatctcctttgaagctccacgaagcagctgaagcagatgttttgctgccaagcaatgagaatcctacaccatgatcaatttcatcttgataatgattatcttccgcatgaaatttaggttgataaaaaaatgaactatagtcatcataattatcagtagctgcagcatcatcatcatgtccatgatcatgggaatctatatctttaaagctgctctgagattggtgatcatattcagtggcaaatatgttttcctccacgatgcttggtgacttcataaaatctgagccaaggtcattctcatcagaataattgcttgaatgtgaatgtgatgaaacccgacttgactgcttcctgaggtgaacatcttctgagtaaccaacatttatatccgtctcatcctggcttggctgcttctctctaccaaaggaaccgttatttctcgagttatccacggaatgtcttcctgatggctgatctacaggaggaatctgttctgccctatcatatctgtcttgcctggttctgtccatatcttcatactgcatcctaacatttcgtcgaggcgaaacatgatcttcagaaaaactttctctttgtgcattcgatctgtcacgtcgatgtgaaggctcgtttctgagatttacagatgcagaggatatatgcgactgtgtggaatcctgcctcgtcatcctttctttgttcgaaagttcggcagctgctctagcagcgaaacttgctctttcagcagcttcagcagcagcacgtgcagcgtctgtggaatcaacaaattctggttcccatttctgcttatttcttgaagatgaattctcatagccatgatttggatttctacattctccttcatcaggcctagatcctgtcaaacataaaaactccgttaaatgactcataatataaaaaaaatacagaaatagcagaagaaaaccgcttacgagaaggtctcgctttcgaatgatagtagtcatcagccttcccagaagtaacattattactacggcttgaagatcttccaccatttgcataagagttctctggggaatgatgtctttcacttgatccatgatgagcattgacagtagctggagcatggatgtttggaggctgttccttgttcgagtttatagatgaatccatgttcatactactcgctggctgaaacgagtttgctccattctaaaacagaagcaaagtaaaacttatggttaacattagcgagtagataaaacaactgatgcctttactctgaaacgtgataacttaccaacaactcggtatcttttggatctgattcgacgaaagattgtgcctcccagacgacattatgctcctcagcgattgccatcaaaattttgacctttgttggaccatcaggggctttggcagacaatttttcgaccaactagaaaacaacaatcataatcaacaagggttcttaatataaaatcaccatcaaagactaagaaacacagccacttaccaggcgactaacaccagaatccggacgcaactcaacagcagaggtagaaaaatccttgccatacttggttgtgaattgcttaaagatctctgagagctctggaacatctgataacctctgggaagcaaacaagacacttgtgacagcttctttcagatcaatggggcaatttctgcaataacatcacaacattcaatccattatacattagaacataacaacaagaacaacagcaataaggagtgtcaacattgtataaagggcaaatctttcttacttctgtgattcaataacacctaaacgaacaacaagaagttcacagtatattccaatgagctcataagccgccactgtcttctcttccctaacaacatgttccacctgagataaaaacataacaacattcccaattttagcaaaaaaaaacaagtgaaactcagattctctgaaactaagattccacattcccaaaatttgcaaaaaaaaaaaaaaaatctgtcacagaaacagagtattggttacccgaatcctagcagtaggggtttgtccagattcgagcaattgagctaattctctcctcagctgtttaatctgaatctccttcttgttcttgagtatcttcaggcgtgaattcgccatttgcaaagctgttttgctgcattatataaattcaataaaacctcaagaaactaaaccaacggatgaaacagtataataattctcttacccaaaaaaaaaggttcgaacataaatagaatctggagattttgacataacttcaagacatacagaagataggaaaaaagaaaaaccccagaattgaatttattaccattttgcaggcttaaaacctctttgaagcaccttcttcatgtacacgaaatttagcaaaaaaaacctcggaaattgatcgaatcaggtataaaagctagaataatagattagtttttttttttttttgtttgttatatagatcagacgcaaatctatgatctgaagaatggaatttttcgcgggggacctatcccagaagaagcgtaagaaattgattcagagaagacgaagaagaagatgaagaatatacaactattaaatatataaaaataggttggactccgcgaaacccttttatattatacagtatgttttgattgacgtgtaatgactaaaccgatttaaaccgtaatttactacttgtaaaaggaaaatgcaggatcctctgtgtaacggtgcacgttccacgaaacagatacataccgtggactgacttttcaatctaattaattattaatttccttttccgtatgatttattagaaaatgcataagattattttcaattttctatttgcaatttttgttgtttgctttggacttttggtacatttataaattagtgtctaattacaatagttaaacttttgtactaaggtaactaaaaggaaaaaggaaaaaggaataaaggaaaagaagagtaaatatttggctaggttttagggtgtagacacctgattgtgtatcagaacaaaaaggtatataaacaaaggctcttctctttctcattctcattcactttttttttatctctctgatattgccttcttacccacgctttcagaactcgagtttaggtccgatcacaatgactacatacaacgaggacaagatgtggtcgaatctctatgcattggcgaaagtcgccgctatgttgtatgatgatgagacagcggcgaaactctttgacttcacggatatcatgagtacggagtttgatgaagaagctgtagaagatcgtgcaaagatgggaacaacgccttcgaccatgacacaaaatcttaatgaggtttctacttccttatcgctccttgacattggcgctgatcccgtgacgcaaaccccacaaaacccgccagcttctttaactatactcgtcgatgaaatcttggctgattctgagatgatcgagaatgaagccgactcaccaaaccctaattccaaatcttcgcgcctaacagaatagctcgtccctttttaatcggagaaagttgtgtgtttgtttttagactatgactatagattggtttgtggaggtttttttttgtctagttaactgctccgaattctaggtttttctttaccttttgttgtttatgatttcgttaccacgaattgatgaaaagttctgacatggatatgttttgtgttgtgttaacagtttaagtttctagtttcacttttcgtctatagttttttcatacgtttgcaatggtgaattaaaataaacaaaccttgccattgatggatggatagaacataatccagaactattacaatatagatcatgattgtaactaatgacttaaacaaatcaaataatattctacttgtaactaatgtttttgcactttctttggttgatcatgattcataacttgaaatcgagatatggtgtaacataagaatagagaacagtttccgatcaaaacttgcattgtgtatagtacagattcacgtagtaccatcgcttcatacatgtaatctatcagcaacttgcaattgcaataaataaggtaatcatcaatcagtaacaaattttctgtggtaagctttagttccaacaccaatgtgatgcccccaagaccagggtatatgagaagcaaaactcatagctctgttttcatatcattacctaattgactgaataagattccaatatccattccttgattcaccgtaggtatgactactgaataagggcactttgtggaaaatccaacctttttgtttttagactgttttatcgctttgcttagcctgtttacgcatcgctggaacttcttatggcagcttatgttagtcatacctgcaaataggaagcaaaaatgcgattatttcatcgtaaccttgttaactcaagaccaaaagtttagcatttgaatcagtgaaactatagcttaagaacaatgaatcaaagcagcagagttacttatgatcatctgagccttataggccttaagagatttatcatacttgatatcttagcactctgcattacacaatttgtgtagagaaaccggacagaccagattgactacaatctcaaatccaaggactaatcaagccaacttacattcatactaactctgtagctaatttccagtttatctcagctctgtttatagagacctaatgggcatacaatattggccagtgtaaacctttccagatgataataccaaaactacatcccaattcctagtacacctaagaacggtaactagaccttttcgtgcagatccatatttaacacagcagtaagggatttgcgtattcttgattgattaccgtttaactcaacacaatggtcatggatcttacaacaagcatcaagatcatcacaaggctcctcaccaggacaaccagaatgtccaatcccacaatacttcccatatcgaatagaaagagctgaaacaaacatacatgtgagtcagctaaaaagctaaaaaacctaaggaaacttcagaaaagttgtaatcttactgtcacaattctgtgcaatgcaagttcttgtacactcctgtaacaatttgatgcaacaaacaagacacaaaatcaattcattgttcgaaattaccgcaagaaacaataaaacacagagacataaagtgaagtgaaattagcaaaaacatcattgtcaaaatcagatttttggcaaggttccaattaagtcaatgcctacaagaatgtgattcctttcgtctaatttgggaaacagagaaaaacacagaaccaaatcgaacctcactgcgagcgacaccgacgagaacgacgaagacaatggcgaagaaagctgccgcgaaacgcatcaatgaagtgcgaaacatcatcgtcgtcgtctcgtaaatcgttgttgtcttcttcgctaaggtttcgaaattgtggctaaagattccaattgggtctccttaagatcccattggtcttcctgctttctcgcacataccaaaattttattattatttttttgaatattctctcgctgagatttgaagttaattcaatattttatcttaagtccactcaaataaatgtattatatatttctatttttgaatttatcagctgcaaaattaaatttttacttcaactatgatatcagtttctcaaacaaaataaaaataacagttttttactcaaaaatcattttcttgtgaatatcataaattcttcaaaataacatttttttcaaatattcctctatttttgaagttattcgacaattaacaatcacttaatatattaaaaaaaataattctctgatgttttaaatattgtgaacagatattaaactttgtggataaaataaatatctaaagaagaatcttgtatcaaatgcatttttctcaacttattaagagctttaccaaaatgtttttttttcccttagctccaacacttctgtttcaggaaaaaactgaaaatataaatggattcgaggaagtatatatagttcaagtgaggaatcatatggagggagttacaagcgtcaggaagaatattccggcgacctggttgtttgttgtctcaatttcaagggtagtagccggtgaaagtgaatcctctgccgacgatttcacctgcgcaaaaccaagcaaagcattctaagccaaacaatgcagcgattcctgcatcttccaccttcagattcgctctgttcttcaataagttctttgcgtagtctacttctttcctaaatgtttcgtagcgcccgggaatgctgtagttagtaagaagagtattagctatagacgcaagattgcgtatcacagaaagccgaactcttcaactgatagcaaaacacaatgtggtgcttataatgtgttatctagacaggaaaaacaagacaggcacatatattatcctaatcaaaggatatttacaagctcaattccatcgaggacaaaaactactagaggataacaaattctcaagcatatttttttcaggcaaaaaaggctacctactcgcgagtaatgcaaattcaacttgcacatttcatcagcattctctaaagattaatgtttcaaaagtatacataaaagatagtttgagcatggccattgaaaatatgtccatgagataaagagagaagaaaatggtaatgacctagcaagacgagtgtagagcaattgtttagacaattcactgcacttctctatagttgcaggctcttggatgtattgcttgttctgctccaacaattgcttgtagtacgaattcccatgcttggccacaaactttgaagcctgacatgcctttgattgaagttgaaccaattttgatgccatttttcaataccaaaatcctacaaaatcatagaaaccaagtttagcatttaccaattgagtctcagaaactaagcctaaacaagaaagattagctcatcatatacaatagcatggttcattatacacctccacgatagaattcaataactaaaacaggaaactgaaaaaatgtaatttcagaagcaaggcatccaaaagcataaggcttttcacacatatcaagctaaatcactaaaaccctagtcctcaattccagactaacaaatcgaacgaatccgaattatggaaaaattaagcaattcaaaacctaaaaagcattatcgcagtgaagagatttcaaattagatctgagactcaaacacataaaaaaacaaactttaaacccctaaaaaccaaaatccaaaagagcgaagaagaattttagaccaaaatatcagaatcttaaacgaaataaaagaagaatgaatcggtgatcgtaagcaagccataccttttggccgtgctcaccactcaccactaccagcgtcagaatcttttcctccaaatttcatctacactgccttataattacgacaataaccgaaccggatcggtataaaccaaaccggtttatctgtcaaaaacaattgaaccggcggctgaaatagaatcatacacataacataaagttcgtatccatcctaaaaccctaaatctttttgcttattcgaatctgttagccatccaaaacctctctctttgccgcaaaaaatgactagtacggagaacaacaacaacggctctgatgaaactcagacgacgaagttacacttcgaggatgctgatgaatcaatgcacgatggagatgacaacaatgccgatgttgctgatgacattaccagcgccgattactacttcgattcttactctcatttcggtataaacccttgaactttcattatataatgttgctttcttcatgttatcttattctctgcaaagtgcttactctgtttccaattgattgatttttgcaggtattcatgaagtaagtaaagtctcctgcttttttgttttgttttgaatcctttgttctgaaacctaggcaatgtgtataacagtttttctatggtgatgttattattattaggaaatgttaaaggatgtagtgaggacaaagagttatcaagatgttatttacaagaacaagtttcttatcaaggacaaaattgttcttgatgttggagctggaactggaatcttgtctctcttctgtgctaaagcaggagcagctcacgtttacgcagtatgtctctttatcttctccgttaatcaaagtttggctcttattgatctgatttgactaatgattcttaggttgagtgttctcaaatggctgacacagcaaaggagattgttaagtcgaatggattctcagatggtatgtatgtgtttagagtgttattcaaatggtttatgatctgatggtagttggctgaaacaagtgtttgtgtttgttttgttggcagttataacggttttgaaagggaagattgaggagatcgaacttccagttcctaaagtggatgtgattatctctgaatggatgggttactttctgttgtatgaaaatatgcttgacaccgtcttgtatgctcgcaataaatggcttgtaagtgagagttttctgtgttcttatgttgatgatggtttcatcatagctttgaacagttttgtgtgcttttggttccttttgggttaggttgatggtggaattgttctaccagataaagcttctctttatgttactgccattgaggatgctcattataaagacgacaaagtagagtgtgagtaatatgaaagatcttgtctttctttttgctaacatttatcttcgaaacctgatttttttgcaatcggctttgcttcttgtcgtttcatgtacagtttgggacgacgtgtatgggtttgacatgtcgtgcatcaagagaagagcaattacagaaccgcttgttgacaccgttgatggtaaccaaatcgtgactgatagcaagctgctgaaggtaagtaagattgtgctgtagtagttaattacatctccctaattttctgtagctaatgcatattccttttgttgttggcctttgttttttttgactaaagacaatggatatctctaagatggctgctggagatgcttccttcacagctccgtttaagctcgtcgcacaacgaaatgaccatatccatgcccttgtagcctacttcgatgtgtcattcactatgtgtcacaagaagatgggtttctcaacaggttcgacttccctaaacatgagtgaaatatgttgatgtttgtcaatgtttggtactcacattacaagtcacaacatgcaatgcaggaccgaaatcgcgggctacgcattggaaacaaactgtgctgtacctggaagatgtgttaaccatatgcgagggtgaaacaatcacaggaagcatgaccattgcacaaaacaaaaagaatcccagagacgtcgacataaagctcagctattctttgaacggccaacattgcaatatctcaaggacccacttctataagatgcgctaaaagctctcagaggatgtaaaatcccccacaagtacctttcatcatcttgaggctgagatggacaaatctcatttgtatctctactgtttccattattgctgcttatgtttcagaattagatattaaccatctctctctttctctctcactgtgcgtctcttcctctatgatagtttcttgttcctctcgaccacaatattcgtttggttcaagaaacctaagcaaatacgacaatagtgtatatatcacacaactaattacaatttgatttgaccgcttacaaacaagttcattcagatgtagagaaggatcgataacaaactttaaaaattggatatagtcaggccttggaagtatcgccttgggtcagactttagttgtttcacatggcgtggacgctggatctcagtggcaacaataatcaatatttcacgtggtatggcattaattttgatcatatgcattatttgattattcatcgttatatgcccactttgagagatccgatagaaacaaaaatagaaaagaaaaacatcacaaaagagatctgtggtttgatttggatcaccatggaaaaagtagaggtaccaccaattcataaccatccgctgttaccttttactcgtttttcctacaaggcttgtaaagggtgtgggtatgttggttacatatatggaggctaccattgcaatgagttggggtgtgaatctgtgtttcataaagagtgtgccgacccgttaccagaaatcaaccactattctcatccagaccatcctctaaagctcctcataaatgtcgaaccacttgcttcttgtagccagtgtccatcttcgtttgaaaatggttatctttgttcgatttgtgacttcaagttggattttcgttgcgcgacgaggttgcctttggaatttattcttgaagaatccactgtccacgagcatccgattcagctctctgatggaacccgtgacggttttgtgcaactttgcaaaacatgcaaatggggagttttcgatgctgttcattacaaatgtaataaatgcgatttacgctttcatgtggagtgtaccaaactttttccacaagctagccacgttttacacccccaacacccactcaagctccttagatgtgaagaagcacccgattacgccgacaacaagtgtcttctttgcgggaataagtttgacggacgaattcaccactgtgatgtttgtaactttaccatatgtggcggctgtatggaaaacccaccgccgcttagtgttgtaagcccgaccacccatgagcatcaactttatcttctttcaaaacctctcggtttcacttgcaatgcttgcgggactcaagctgatcaaagcccttatttctgtcttcaatgcaacttcatgattcattgggagtgtatcgatttgccccgcgtcataaacatcaaccgccacgatcatcgcatctcctacactcgtcgtcttggacatgggcaaaatacatgcggggtttgtcgtaaaaaggttgatggcttctacgggggttattcttgctcaaaatgttctaactatgttgttcactcgagatgcgcaacggacgaggatgtatgggacatgatagagctagaagggacacccgaagagccagaggaagatgcgccattcgaggtgattgatgataacacgatcaaacattttagccatgatcataacttagtaatcaacaaggatgggaggattctccatgaaagcacactatgtaaagcatgtgtcttccagatctgttcagatgcgttctacagttgcgagaattgtgacttcattctccaccaaaaatgtgctaacctgcctcggaagaaacggcatgtttgcgacaacctaccatttaccctagtcacaaatgatacttcagacgaaacttcatgtgatctttgttggcaaagtttcaccggtttcaggtacgagtgtcttactcgtatggttactctagatgtacgatgtggttcaattcgagaaccattggtgcaccaaagccatcaacatcccttatacttttcgaaacgtagttctaagtcttgtacggaatgtggcaaaaacatggatctagatataggaagctttagctgtgatgagtgtgactatagtttggacttcaagtgtgctcttttaccgcagaaagtaaagtggcatagatacgacgatcatcctctttacttgtcgtgtggtgaaagtagtgtggatggagaatactggtgtgaagcatgtgaaacaaaagtgaattc

SEQ ID NO: 253 - DNA, 97814 bp, Arabidopsis thaliana
aagcttctaggaagagtttgagtcctgcggaagtgacgtcacttgttgattcttgtttggatctccttaaggatagtaattttagagtctctcaaggtgctcttcaagctcttgcttctgctgctgtcctcgctggtgagcatttgaagcttcatttgaatgctcttgttcctgctgttgtcgagcggcttggtgatagtaagcaacctgttagagatgctgcgaggcgtctgttgacgactctcatggaggtgaataattttacttagttttgaatgtttgttgatggaatttgcattgctcagaatttgttttttgttaggtttcatctccgacgattatagtggagagagctggttcgtatgcttggatgcataagagttggagagttagggaagagtttgcgcgtactgttacatcggcgattggtcttttcgcatctacggaacttcctcttcagcgtgttatacttgctccggtatctatctctctccctttaaaagctatttggatcatgtttttcttgtattggatcgaatttgattgcggttattttgtttgtttatcagatacttcagatgttaaatgaccctaatcaagcagttagggaagctgctattttgtgcattgaggtaaattttgtaccatccttgttctcaactactaaagtgatttagactttaaacatcaaggcagagtctcacacccaattgtatactctcgacttccataattatgactgagatagttagtagtgaactcaatcaattttgagtgcagtttgagcaaagaatttcactttatcagtagggatttgtctgtgtttttagagaattcgtagaattcagaattcagatgttctacttcgtgtttgatattaatatcataattctgtttttctcaggagatgtatatgcaaggtgggtctcaatttcgagaagagcttcaacgtcaccatcttccatcgtatatggtaattctcagaataagattaatccatctgcagtgctagaatgcataatgcatgtgtatagtttccatctgcatcataacttagtgtactttgataaagaataatatgattgcagtcttggggcgctctttgcttgaactctttctctgtttttttactttttactcaggtgaaggacattaatgctagactagaacgtattgagccacaactgcgttctacagatggccgtagtgcccaccatgttgttaatgaggtgaaggcatcaagtgtcaatcccaaaaagagcagtcccagggcaaaggctcctacgagggagaactctttatttgggggtgaaaatctttctctcaatgattgaagcctaaacattagtgttgtaatatttctatctcggctcactggttttgtatctctgcatttcaggagatgccgacatcactgaaaaacccattgagccaatcaaagtgtactcagagaaggagttaatacgagaatttgagaaaattgctgcaacactcgtcccagagaaagactggtcaatgcgtatttcagctatgcggagggttgaaggacttgttgcaggaggtactacgtcaatactttttgtctttatcttcgaaatgaagttttattttcttgtatctcatctcatggaatcttttttctgttgaaggtgcgactgattactcctgctttcgaggtctcctgaagcaacttgttggtcctttaagtactcaattagctgaccggagatctaccattgttaagcaggttagctaaattttcgattgatattctcattagtaggatttagaatgtattgtgattcttctgatccttgtatcggagacaaattgatgagttggcaactccgtgagatattccattatcattgagtaactaatttataggaagttcatatttttctatgccaacacccttcatcttagtaaaacttatattcattttagccagaaaacacatttgctagtagatccaatttcagtagggatgaagggtatattagattcatgcatcctatctatattcttatgttgttttgaaaaccatttttgccattgtctttccttcatatactgtttctcgtgttcataggcctgtcatctcttgtgtctcttatcaaaagagctactgggagattttgaggcatgcgctgagacgtttattccagtaagcttaacctcctgtcgtttactactatggcattcaacacatacacattcttgttaatattggtatatggtaatcaggtgcttttcaagctggttgtgattactgtgcttgtaattgcagaatctgctgataactgcataaaaacggtaaattattagctcgcttattttggtttctagaaccatgcctgctcggctaagttttgtgcttacacagatggtttcttgctattccagatgctgcgtaactgcaaagctgcccgtgtacttcctcgcatagctgaatcagcaaaacatgaccgtaatgcaattctgcgagcaaggtaagctggagcatttgtatcccattttcttgtatacagatttatgatgttctggaattgatcccatttttttgtatacagatgttgtgaatatgcattgttaacacttgaacattggcctgatgctccagaaattcaacgatcagttgatttatatgaagatctgattagatgctgtgttgcagatgctatgagtgaggtaggtttctggtaccattttccataatacgagatgttgaagtagggtttatggttgcttgtttatatatgtggtaatgcagttattcggattcgatgcaacttttaatgaatgtatgttttgcatcaattgtaacaaatgatttgtatttactgtattgcccagctatctctctcccatgtgccattgaaaggttttaatatattgaataacaggtgcgggcaactgctagaatgtgctacagaatgtttgcaaaaacttggccggatcgttctcgccggttgttttcgtcctttgaccctgtcattcaaagggtaaggcttttcaactctctatattctgcttattatcatcaatgaggcttgataaagcattccatatgttctcagctaataaatgaagaagatggtggaattcataggagacacgcctcaccatctgtccgtgagagacattcccagccttcattttctcagacgtctgctccttctaacctacctggctatggaacatcagctatagtcgctatggatagaagttcaaatttatcatctggaggatctctttcttctgggttactcctttcgcaatcaaaggatgtcaataaaggttctgaacgtagtctggaaagtgtgttacaatcaagcaagcagaaggtcagtgcaattgaaagtatgctccgaggactgcatatatctgatagacaaaatcctgcagcccttcgttcaagtagtttggatctaggtattgagtttctttccttatgaaagtacagtttgtttttgaaacgtcctttaacatgagctaagatatccttgcgcagctaaattgtcttctttttcccctagtgcaggagttgaccctccatcgtctcgtgatcctcctttccatgctgttgctccagcatccaatagtcacacaagtagcgcagctgctgaatcaacacatagtatcaacaaaggcagtaatcgcaatggtggccttggtttgtcagatatcatcacccaaattcaagcttcaaaggactcaggaagatcatcttaccgtggcaatctgttgtccgagtctcatcctactttttcatccttgaccgctaaacggggctcagagagaaatgagagaagttctcttgaggaaagcaatgatgccagagaggtgaggcggtttatggctggtcattttgaccgacagcagatggatactgcttatagagatttgactttcagggaatcaaacgctagccatgttcccaatttccagaggccacttttgaggaagaatgtagggggaagaatgtctgcaggccggaggaggagttttgatgatagccaactgcaaattggtgacatatcaaattttgttgatggtccagcttccctgaacgaggcccttaacgacggactgaactcaagttctgattggtgtgccagagttgcagcttttaattttctccaaactctgctgcagcaaggcccaaaaggtgctcaagaagtaattcaaagttttgagaaagtaatgaaactatttctccggcatttggatgatcctcaccacaaggtcgcacaagcagcactgtcgacacttgcagatcttataccatcttgccgaaagccttttgagagctacatggaaagagtcctaccccatgtgttttcacggctaattgaccctaaagaagtagttagacaaccttgctcctcaaccttggaaattgtcagcaaaacctacagtgtggattcccttttacctgcattgcttcgttcactggatgaacagagatcaccaaaggctaaattagctgtgattgaatttgccatcaactccttcaacaggtacgctggtaaccctgaaatttcgggtaatagtggcatcttaaagttgtggctggcaaagttgacgccattaacccgcgacaaaaataccaagttgaaagaagcttccattacttgcatcatatctgtttacaatcattatgattctgcgggactgctaaattacattcttagtttgtcggttgaggagcaaaactctctgagaagagccctcaaacaatatactccccgcatcgaggtggacctgttaaactatatgcagagtaaaaaggaaaaacagagaattaagtcttatgacccatctgatgccattgggacatcatctgaggaaggatatgctggtgcctccaagaagaatatattccttggccggtattctgggggttctattgacagtgatagtggcaggaagtggagttcttcccaggagccaacaatgatcactggtggtgttggtcaaaatgtttccagtggaacccaggaaaagctgtatcagaacgttagaactgggatcagttcagctagtgatctgttgaaccccaaggattctgattacacatttgcttcagctggtcagaattcgatatcaagaactagccccaatggaagctcagaaaacatcgaaatcttggatgacttatctccaccacatttggagaaaaatggtctaaatctgacaagcgttgattccttggaaggaagacatgaaaatgaggtctcccgcgaattagatttaggtcactacatgctcacatctattaaggtcaacacaacaccggaatctggacctagcattcctcagattctacatatggttagtaactattgtcacttctgctaaatgtcgttatcgttgttttctctggtactaaaaagcatatctgatgattatgctttcacagatcaacgggagtgatggaagcccttcttctagcaagaaatctggactccagcaattaattgaagcctctgtagctaacgaggaatcagtttggaccaaggtataactaatgaaccctgcactagttggaataattggtcccgacatttatatcttttatattacatttctactgttaagattgtaagtccatgaaatttacaaggctagaaaagattgggtaagacaagaaaaatgtgtgttggtaaactccgttgggtgggatatatttcatagttgctttaccatgtacatttgcctatcaatcctaatggtcattcctcctacttttctactcccagtacttcaatcaaattttgacggttgttcttgaagtgctcgatgacgaagatttttcaatcaaagagcttgctctttcattgatttctgaaatgctaaagagccaggtttgttccttacgtagactcgtcaatcaatcatctctaacacattaagcgtgggtctgtgaaattacaaacaccttttcttacatgtatatatcttgcttattaatttcagaaagatgccatggaagactctgttgaaatagtgatcgaaaagctgcttcatgtctcaaaggacaccgttccaaaagtaacgattgcatgctcaaacctttttcttgtggatcaacccctttttctgtatgtctccagatctcatatgataatatcttttcaggtttccactgaagctgagcaatgtttgaccacagtcttgtcccaatacgatcctttcagatgcttaagcgtatgtacatagaactcttttcacgccctcatttgttttattgtttcgtttcttctagttgatttaacctaagcaatatgtctttgcttcaggttattgtcccattattggtgacggaagatgagaaaactcttgtcgcttgcataaattgtttaacgaaggtaagatttatcaattatacggtatattcgtgtttttccgagattgttaatacaaagtcgcatgtagatataatcgtcaggtctcactgaaacagtttcattggctcttgtgtacagcttgtgggtaggctctcgcaagaggaattaatggatcaattgtcgtcttttttgcctgcggtttttgaagcatttgggagccaaagcgcggatgtccgcaaggtaaaggaattgaaaaaaaaaacttgacttttctactcataccagtaacttacgatttgatgaaattggacaagttataactaactctctatgagggggtctttgctgtttgttgcagacagtggtgttctgtctagtagacatatatataatgcttgggaaagcatttttgccgtatttggaaggtctaaacagcacgcaggttcgtctagtgaccatctatgcaaaccggatctcgcaggctagaaacggtgcccctatcgacgcagacacctgacgagccgcttgtacttatggttcagtgggtttatcttgtgtcttggggtcatattcattattgtttattttgtatatgggtgtgttttccgcgtttcaattttttgggtgtaattttgcaaattggtttttccatttgttgttgcagtgtgtggtctattttgagttgttttgggggaatgtatttattgctttcctctcgtaggacaaaaaaaaaaaatgtattttgacctcgcaactgatgattaaatacctttattagtgaacaaaacaaatctatattacttgtgaaaaaaaaaaaaaaaaaaaaactaaaacttctcatctgtccgtgaactaacacttggtccgaaaaccgaaattgatgattcttacaatattcaatcaaattctaatatattgaatatttttattaaattttaataaaataaaaccagtttaataaaatcagaaattataaaatataaaaaaatatttttttttaataactaaaagacttttctagaaaccatatctattgagaaattccctaaacatactaatactacaaaaaaaaagttttagttcaaagtatataactttaaacagtggtctcatccaaccgctcatctcgttcgttccattaacaatgttaaccacaaccgcatcgtctctcttagctgccacaacgcaaaaacaattttagtgaagacacttaattcattttcgcactattttagactagtgttttctacccattctttttttttcttgtaaacaattctttttgttgacctaataagtttacatttcaacccaagtggtattttgaaatttcattaatggtagttttgaaagaaaaaaaaatatatatagtgttttataatttttcctaaaatagattatgttaaaatggtcaggtatttatttatgtctaatgtattattaaaatatacaatcataaaagagaaattattgcgttggatagggatcaccaattattaccctctcgtggaggaacataacacgatgatacagcgagcagcttgtcttcctatcaatatatgctttttcaattcatcgattcctacatttctttacttacaaaaatattttacaactaatcaattatcttttttttttccacagaaatcctttgcctttatgcctcaaatcatgtgctagtcgtgagataaatttagaatcgtattgtttttattttctcgtttgatatacaaataaaatagtactagaaatagaaggtgtgggcaaatgagtccccaaccaccgccgaaatagtttgcagttttcctaaataagaatattataaattcagatccaaaatttaaatagttataatatttgggtccaccttatcttatacgattactatattcgtactaattaaatataatattaattattttatattgataaatattatatagccatgtcgccatcaaatatcattttcgtcatcatttttttctgtcaaccattttcgtcatcatttctacttgtaaattttgttgtcaatcatttctaccagttatttaattcaacattagtagtctacgactctacgagcctagcctgtttttttttattaaatctataaaaaaatttccataaatgttaaataatagttactagtttgaagcttcgaataggaacagtatgggccagaaaatgatggagattatagtttacattacgagtttatgttactacttttattatattgtaactgatgattctattttttgtcccttttttgccgataattctgttcttatatgcgattccatgtgttttatgatttatgagtttaagtgtttcatgaaaattccaacgttaaaattgtagtagactaaatgccaatcttgtgaattgtgaattcgattagtcatttaaaaaactgttaaaatctatatattttcttaaaacataagttatatacatatgttcagatcttataacctactggtttgtacttgtactaatgacgtcaacatattattatccaaatttaattatgtatatagtatactgcatttattaaatcactatttatttatttatctaaatttcacacggatatagagagtgattacagatcatttagcattgcataaagactaatattagacctaataaagtattattagcgtgcgattacctgaaaatcattgtcttatgcaaatgattaaggttttcttgttatggttatcgtttccttaaacccaacatgctaatttagtatctaaatctgatgacaaattaaatgttattctattaatctaataaagacctttttgatattttattccaaagctggtaaagatcatcaagtagacaataactttctaagaatttatgttattatcactaatcaacaatttaattattcaaatattaacacagtcaccgagagtacgtacttcagacggtgagaaaccaaaatgagtttctaaataataatataaattaaatattttcataaattaaattatcaatttttttttgatgaaaaagatagacaattatagacacataatgtctcaagagttttttgtgagttattcaaataagagacaaaaattttagaatttctcacttttctctcttatttttttttatattttattagtaattaagagactcccattaaatatgttctctcttaatgtctcattgtttcagttcctacttcctacaaaatcataatttggtaaagaaaaaaagctacatacaattgcataagcatatgtagtctataagacgagatatatatgataattttcggaatattattacttagcattttgtttaaatataaccacaatcaggctttaatttcagtttttgtcttgtcatttgcatctaacataaaatattatattttactctaaagaacaaaaacgcaaatcattattattcaatcaaaattttttacgacttttttatcaggagataatatttttttctattttgcgttttgtttaatttaaagtaactttgatggtaaatcaaaatatattttagataggtacaaatcattttagcggacaaaaaaaatgtacaacagcaagagggtgatttagcaacaaaatttagcttgaaaaaattgatgtttatagattatgtctaaatctgaataaaagaataaataattaagtttgatagatcatgcaagagggtggtttagcaacaaaaataaacatattaccctgtctcataaatcattgagattatcaataaaaaaaacacccaatttctgtcttaatattgtccccaccaatgtgagtccatatctgattctctgtttctttcttccctacttggaattatataaaaatatgtatatacatattaatgtgtatatatatatatatatgtgcgtgttcccatatcaatgataaatgctctttatcaaaaggtaaaatgattataaaaaaaaataagttgtttcattttatttgttgttttcaatgcaaaatttattattattttattatttttgattcttgaaattctgcaactttttattggttaaattattttaaaatatgtaattaaacatatttttaaaatttaagaaaacagaaactaaatgatcttaatcaatgtaccaaaatcttaaactagaacaaaatagaaacaaaagaagtattatagaagaaattaacactttgttcactaacttgactactataaatgattataaattaacactttatgtagcattcgacttttctgtttatagaagaggagactcacttaagtctttaatatcatgtttgcatatgttgtagtcttttgtttttaacatctttggattgacatggtctattctatagccaatatctattatgcaagataacacgatttagtggagtcaaactctggtggaaaaagcggaatcaaatggatttaaccacaagactaaaggaatatttcctgcaagatatatgtagtcttaaatctataatttagcgatataaaaaaggacaatttttaaatatgatacttaagtttttgtttatttctttaaaaataccacttaatgtttggtttcttaaaataacataaaacttaaatttaacttccaacattcaaaattaaactctaaactttaaacactaaaccctaacccctaaaaacaatatcttaaaattaaaatggtcaattcaaacttaatttttttaattctgatgaactcttgaaaatcaaaattgaagtataatatttttggaaaacaaaacttttggtggtattttgacaacacaacttgaaagtgtgatattttgctacaatactcctctagaattcgaggctcccttaaaacaaaatattattttcgtgtcagtcatatttttttgagacatttctcaaaataccacattttcaagtcttattgctaaaataccatttcatccggtattcgatcttctatcaaaagaaaattatattcatgtaggatgtctaggtttggtccagacaagttaaatggtaatctggtaacatgcgattcagttatgtttaagtgttaatcagttaatattctaaactcggaataaatgtgtgatgatccttgaatataaatttattttgtaatacttaaatatatttttaccaaaattaaccggatcattggataaagtttataaaataatttttttttgatgataatgccatgaaaacaatttatagtacggatgagaaacaatgaggctgattattttatctccgtcagctacaaatgatctcagacattttgtttttatgttcaacttggttttttattcagaggttaaaaaatgggcacaagtttctattcagacacatacacacataaataaaatagagaattcactgttaaagttagttgacacaatagtaaatgcgatacatgctagagtcacggaagaggcaaaaacaaactccaaagagagacatataagaaaaagacaaaaacccttaagaagcttatcacattcttaaagcacgaaaattcagaataagattcagtcatcctttagcacaaaaaaaaaaaaaaaaagatccagtcatccaatactagttccccagaaataaaggtgatatatttttttttttgagaagcctatccagtaccaacctcaattctctaggttagatatagtctgggtagtatatatgtttcttcactgattagtaatctctgtgtgtagtacacttactcactagtgctactcttttggatctttctggggtttttcttttggttataaaaccagaagaagaagataactgtttgttattttaatacttaccattatcatcatctttgtagagagagagatatgcatcattttgtccctgacttcgataccgatgatgattatgtcaacaaccataattcttctttgaatcatcttcctagaaaatccattactactatgtaagttcttttattcaaacttatattaaaaaaaaaaaaaagtttgattagttcaagatctgagtatttatagtattgaaaactttaggggtgaagatgatgatcttatggagcttttatggcagaacggtcaagttgttgttcaaaaccagagacttcacaccaagaaaccttcttcttctccaccgaagcttcttccttctatggatcctcagcagcaaccttcttcagatcagaatctttttattcaagaagatgaaatgacttcttggcttcattatcctctccgtgacgatgatttctgctcagatcttctcttctccgccgcacctactgcgacggctaccgcgacggtgagtcaagtcaccgccgcgagaccgccagtatcttcgacgaatgagtcgaggccgccggtgaggaacttcatgaatttctcgaggctgagaggggattttaataacggtagaggtggtgaatctggaccgttgctttcgaaggcggttgtgagagaatctacgcaggtaagtcctagcgcaacaccgtcggcggcggcgagtgaatccggtttaacacggcggacggatggtactgacagttccgccgtagctggaggcggcgcgtataatcggaagggaaaagcagtggctatgacggcgccggcgatcgagataaccggtacatcgtcatctgtagtgtcaaagagcgaaatcgaaccggagaagacgaacgtcgatgataggaaacgaaaagagagagaagccaccactactgatgaaactgaatcccgtagcgaggtgagtcaaaaaaacacagaacagagtcgttgttagctatcgtgcgcaagtcaaatacggcgcattttagtctgactttgtagttttcagcgcatttttaattaacttttttggtgttttcttgtggtgcaggaaacaaaacaagcacgtgtatcaacaacatctaccaagagatctcgtgctgctgaagttcataatctctctgaaagagtacgtttgtgttttttcttatgtttttgtaatctttttcgataaagatttcgcaatgaatctgaagaatgtcgcggatttggtaacagaaacggagagataggatcaatgagagaatgaaagctttgcaagaacttatacctcgctgcaacaaggtcttcgacgatcttttttctttctcttcaagttattgtatacgttaaccttgttactgattgttgtttctttgatcctcagtcagataaagcttcgatgctagatgaagctattgagtacatgaaatctcttcagcttcaaatacaggttcattttctttaaaggattctaagtcttgaaagccctttttaagttcttgaaaatgtacactttaccatgaaaactccagtttatatgactgagattaatgcagatgatgtcaatgggatgtggaatgatgccaatgatgtatccgggcatgcaacagtacatgcctcatatggcgatgggtatgggtatgaaccagcctattcctcctccttccttcatgccattccccaacatgttagccgctcaaagacctttgcctacacaaactcacatggccgggtcaggaccgcaataccctgttcatgcttctgacccgtcaagagtctttgtaccgaaccagcagtatgatccaacctcgggccagcctcagtatccagctggttacacggatccatatcagcagttccgcggtctccacccgacccaaccacctcagtttcaggtactaaacagtcatctctttcccaaaaatgactagttcctctgcttacaagtcacaagttcttatctttcttattttagaatcaagcaacatcgtacccaagttcgagcagggtgagtagtagtaaggaatctgaggatcacggaaaccacacaacaggttaataatgtccatggagcaacaagaagatctgttttcacaagcaaacacaatttcttatccgacccgacccaaccacctcagtttcaggtactaaacagtcatctttttcccaaaaatggctagttcctctgcttacaagtcacaagttcttatctttcttattttagaatcaagcaacatcgtatccaagttcgagcagggtgagtagtagtaaggaatctgaggatcacggaaaccacacaacaggttaataatgtccatggagcaacaagaagatctgttttcacaagcaaacacaattttgagaaattgacagagagacctaacatgtatatatatcgccatctgtttcttgtttttctttggtttgttttgtcctctcttctcaggttgtatacttagagagctgtacatgtaatgatccagagatctaggaatcaatacatagaggttgcagaggcttagtgcaaagaataaatatgagaaagttaggttcatatacatacccgatcattattcttttctcgtctattattattacttttgacgaaagcaattcttgattaagcttaacagtgaatatttacaaatgttccactcccaagtcccaaagacttatcgatacaaatgcacaaacaaatcttagtccttgcaactaagctcacaatgtgacacaaaatatgtaaatagacggacaaaagccagcaaacaaaagcaagaaaattaatgatgtaattggccaagcattgcccattttgtagtgtctttcataggatctcttcatctaaaaacgtagtgatgtcaactaatatggtatctccagtccatgaccataatatcgaaaatataaagctaaaagaaaaggcaaacaaatttctcaaaccgttaagacttgctatctccatgaccataagacttgacaaacatgcatatatatgtatcaaaccgttaaatcaattttgtatttgcttaataaagaagatgtaaaaagaagtttaacatttatagtatttgaaaacttatatattagtattactatttccttatttttgtcaaagttattttactatatatttccttaacacatcaaaatagaaggtatacttatacgtaaatgaccttaaagatttgttaagtaatggtgcatcctcctggtcctccatagaaaattgcactagaccactcctcaccgacccctgtttttgtttcgactttataacattttgggctgtttgcgaataatcttaaatctttaactggtggacttctaattttttctatttcacgatctatcactttaaggccgttcacaaaagctgcctttttgaaaccttcttttgggaaatgtccacttcccatgagtgggcttgtactctgtctcagtgcactgaaaacttctcctccccaaaacacacgacttgctccataagctaaaccttgaacatgaaacaatgattttggccaatacccaattggctcgttctttatcaaaaaccaccagtttcctgtaatattatcctgcttaaaccaaaagcagtaactcttttagaagtagcgattgaaattagagtttttttttttttttttttttatatataggttttatggaaattgaaaccaaatgaaaacatttttaattcttggttttggttcatgaaaccaaatcaaaacgtaaatttataaagttttgcttattctttattcgattacacaaaaataattttgggttgtttctgacttgagttataagtaaacaatagtaatcatcggtcgatatttttactaccatttttggtcaatatatatacctaagtgttatgcaacatcgacttgtcaatatgagtgggatttgagaaacatggggttatatatacctgataaatgatggcttgtaaatagtattgttcgccatcataagtggaagttggtctggcaagagttccaagtgcgagcttgctactcacttgtacaaaccctggacatactgtattgtagcaacctgtcttctcatgtccatctgcctgtttccatcataaattccaaccaatttagccagtgtggcttgacatgcaatgtagtgaactatcaaactttcaatatgtttgaagaacttacggtccaatatgtaaataagccactattattctgatttagtttcggggacacctgtaagatatttatttattttacaattttataggttttctttttgaattgttatgaaattttgaagtaattttgtttttgacttactatccatccagctgaaatgctctgtaaactgtctctaaaaccgttctcgacatatatacttgcaagactaaattgatcagggttgacaggtggatcccataaatttatgtttcccgttgctccatagttgtctctatagtattcagctatagcaaactaagataaacaaaagaggaagaaacaaaaaaattaagcacttgttagggtctcaactatgtgaacaagaagcttttcttacatgacgaccggtcatattgaggaaatccttgtcttttgaagttgtatacttaacccctaaatatttcaaacgttgaatttgtataagatcttcaagtgtagttcttttaataatcactgttccatgtggacaacttatgtcttcatcttgtcgaaatggcagagaacttgatttttgagtgtttttatctcttgtccatttaggtatgattgtaggcttcaactgcatataataatttaagccattaggaaaaaaaaaatcttgaatagcttttactttttttttttggaccaaaaaaattcttgaatagcttttacttgtagtactttgtagaataaaacctgaatagaatggtttttgagcaaaggatgatcaaaggcgagctgcttttgaatgtcgatgcagtccaatatataaccatgtttcgtctgtcaaaatacaaaatacaaagtaaaaataatattgatgtgttctgaaaaaagaaaaaaatgcaagttgaattgttgcactctaactgttttggcctttcagttttttttttttaatccaaaatgcagatttgctcaaaacatattaatatcaaattggtttagatacagcataaaaaggaaataggaaatagtaccgttaaatagatgtttcagttaggacttttagttatttcctacaatgtaatagtaatactttagctaattcatttagtctcttatgacatataaactccctagaatttttttattgcacacatcccaaaaatctactcttaaacaatggtcgtaaacggtgcatggcttgtatcacagaccgtgtttgtagaaaaacaacataaatttcatcatagaaagtttaagaaaaagctcaacttacttggaaactttttattgcgggtttattaatatggttgagtagtttcttgagctcttgtttctcatttttcaatggtattgttcttcgactctccgtaactaagatgagagttattgtgaaaaaattcagtaggataagcttagtgcatgacctcatggaaaatcaaggatcctgaactattttttacaaaagattatgaagcatagcaactatatatatatatatatatatatatatatatatatattgtcacatatatgaaaaaacaaaaaaacaaattagatatgaaaatcattattaaagtaaaataaaatctgaaaccaacaaagaacctatatagagtgattggaaagacaaatggtggatgatggacttttaaaattgtaggggattaataagctttttacaaaaaaaaaaaaaaaaactttaagacatagttgtccaatcacactttaattaattttatttctaatcttaaaagtttgttttttaatactgacatacatttttttcttgtcataattctttttaaagccaattatttatgacctttttttggtgaaaacaattatttatgacattgtcatagagctaattattttaaaaacttataaatagaaaatctcactatattatacccaaaatgaaaatttatgttaggtgaaactgaatccaatatataaatataacaatatatggttaatatttttttgaatattaagatagcatctataaaatctcatgaatattttttattagcatatgtgtagtatatgggtcaaatattaaaagataagataagagcctaattaattgattaggattttgttatatttacttttgctttctcttcccttatttaggaaaaaaagagaggaaaatatattttatatatatttcctcaattatagatttgacctcactctcaactcattataaaaagagagacttgcatagcctgagactcatcaatttcatataacaatttcttccataagatatctcaaaaatcttgctcttcgttaaaccagcaaaacaaacaaaatgtcttcgaagaagattgtgttgactagctccgatgatgaatgttttgagattgacgaagcggtggctcgtaagatgcagatggtagcgcacatgatcgatgacgattgcgccgataaagcaatccggcttcaaaacgtcactggaaagatcctcgctatcattatcgagtattgcaagaaacacgttgatgatgttgaagccaagaatgagttcgtgacttgggacgcagagttcgtgaaaaacattgatatggatacactcttcaaactccttgacgctgctgactatctcatcgtcataggtctcaagaatctcattgcccaggccattgcagattacactgcagataagacggtaaatgagattcgagaactctttaacatcgagaacgattacacacctgaggaagaagaagagcttcgcaagaagaacgaatgggctttcaattaataaccctaaagttccgttgtctaagtgttgatctcgatgttctttaatctttgttgaccacatttgtctctttcgtttagtgtgtgattgccttcgtctctttgatttcatatggtgttataatgtttaataatcttttcttataaatacatgtgttatctagggttaatttctccattcccaattgttattaaatgctttcatattttctattccctcatataacgttatttgtgagaaaaaatataaaaccatctaactaaatttaatctaagataatacatatatgggatatgtgtctatatatgaattgaaatatgattttcattatctaggttgatattttagtattctactatttagtaattcatatgaaaaagtttatcattattattttagaaattcttttaaagatattgtagaataaataaatattatattctcgaaaagttcttattatgattatccttaaaaagatggtattctcggtccatccgtggttgtgatcactagctttcaaagtatttactctatacggttgcaccatgacaccaagtcttcacaaaacatgggtggcatggttcaaacttcttttcttgcatggctctctcaacaacttctggattatgaaacagcggccaacctatacttggctggcaaacaagctgctaaaaatcagagaggatgcttttcattggataaaattgcgagtgggtaatggtcaaacctgcagattttgtcagataattggtctccttttgacaggctatcgaatttcctaagggactagagactgggaataaggaaagatgccactctatttcaactccatgagtagggactttgggcaatacctcatccgagaaccgatcagcaggtctccctacacatctttctaactactttatctttctcagataatgctgactattttggatgggaagtgcaaggcaaaatccacaatcgttactctactgggcttgtttatcatctcttccttgaggactctcctcttgttccttggcgtgctgcggtgtggatatacagaggtattcctaagcatagtttccttacttggttactagttctgaaccagtgtcctactcgagaccgtatacttggctggggccttcacacagatccagtttgcatgctctgtaacacctctcctgaaagccttgatcaccttttctaccagtgcaatctgtcttggatagtttggtcatcaattgctttgagaaccccaaatccaacctctccgctcatggtctgcctctgtctcccagatgcaagcccttcaaggtccaaaagataggagaagagtttgtcttctagcttggcaatgctctccggcacttcctctagggtgaacgaaacaatccgctccatcgtaatactttcagatctgcggatactctgcttcgcctgattgactgtactatccgcaacagaatcaccacctacagagaccattaccctcgtttggcttcatcgatgcatcagctttggttctcaacttcataatcttcatcagatgactctcactattccatcggctagactaccctatagtctaggttcaactctaagatcttttctcaatgtgtgtttctaattgttaactgagctgtgctctttctatttgggtttcgacctattaaacactaaagccggactgggattttgtaatctcttgtttcttatgtatttaaatagaaagacatgagttatataactagatacagattaccctaatgcagttggctcaatcgttacaggagtgttgttttaattaatgcaactggacttgagttcgagtattatgtgcttcatatgggaaatgatgatttagactatttaactccccacaagtattaccaaaagttggttatgagcctacaaagattatgaccaattccaaattataacttcttgctttttttagtgtaatgttaaattttattatcatttttcatattttctgttgcatattaatcaactaaacttgaacagaaagacgacaaacagaaaaaattaaacaaaagaaatcttacgcactcatctagtaagccaatgtgttctccgactaacagtgccaaatggcaacatattctcacagtcacaaacaaaacaaagataatcataaggagcaaaataaataaataaaattataagtacatgtagggtgttaattaaggtcttacctatatgaacataagtgtttcttacatgatgatggttcacaccgaggcagttctcgtcttgggatgctggatacttaaaccctaaagatttcaaacgttgaatttgtataagatcttcaagtgtagttcttgtaataatcacatttttaagtggtcaacttatgtcctcatcttgtcgaagtggcagagaacttgatttttgagaagtgttgtaatctcttgtccattagttaggtctagttgtaggcttcaacggcatatgataatttaatacattaggacaaaacaaaagagagaatcttgaatagcttttacttgtaacacaaaataaattttacccgaatttagaagaccatggatttaaaaggcaacacaaaataatttaggtatttttatttcaattttaaacttacaggtattaaacggccaaataaaaaataaatcgcggttttaagactttttttgagcaaaggatgatcaaaggctagctgcttttcaatgttgatgcagtccaatatgtaaccatgtttcgtctgtcaaaatacaaagcaaataagtatattaatgtggtctaagaatatgttattttgattccaaagtgaggttaaaagttgtggctattcggtctttaaaaaataaacaaatctaaagtgttgcaaaaacatctttggttctaagcaattgtagcctagttttaaacatcaaatttaaacaggtaaaacaaaaatgaaagagaattattgaaatatgagttttttagttctttcctatcattttatatgtttaacgtaaaacttaaaatagtaaaactgattttttttgttaaaacagaagagagaacaaattataacaaagtaagtgtatctatatatagtatgcaacaagtaaataatggaaatagttatctaaatcttttaatcaacaaagtgcaaagtaaacctagcgcaaacatgattggccaaaccgagaatttgatgggagtatcatctctacgtgtgatgaatgaatagttaacggcagtgatagttgtttggcacaaggcacaaaccaagcctagcatctctggaaaactaccaaatctgtttgatctttgagtttgatagtgaaaccaaggaatgggccaagtccacttccacacaactctgtcaactctgcctttgtgtaagagatctacaatgcaaagtagacatgataacaatgacattgacattgcagccaatgcatataaaggtttatgtgcagaggagatctggtcgaaaacagaagaaggtatctccaacatgaggttggtgatgactaaagaccactcaatcataacctgcttataagaagaaaaaaacagaatttatcgccaacaaatttgttagtaaaaaaacgtagctaagactttaaaaatggtttttgatctaaaagaccttcgttcttgaggctcttagcagtttgttctcgatttcccgagctattccattcaccaacatctcctcatcactgggaatataagcataagcaaaagcacactatttacaagtagagaaagcagtgatcataatattaatcccagagattaaaacatcttgtagctcacttacgacggtaactttaatagaaagtatgagtttggggttatacctcaaataagcagtactccatccagggaggttaatggcttctgtaaaactatctttccattcttgaagctgttcggctttatcccgtcgcttagcaaaggcatctccaaaacttcctgtctgattttcaatgtcgagaggatcaacatggtaaaggacaggtatcacaatctgaccaaacttttctttgcatttcaagatggctacaacttcatctaaacaccatctcgaatccccaaagttttccgagaacacaatgactgaaattttcgatacttcaattgcttttaacgactcttcatacctctcgtcagctggtagttcgtcatacaagaaggttttgatccgtttcctacgtagacagccacagagatggcttacgaagttgtcacgagtgtctttgctcctgaaacttatgaacacatcgtgtttcattttaggacttgaattcatttccttatttttgtcataccactttcctttcttctgttttcatctttatagttctttataactttctttgcaatttcctagaaattattatctttactaaagtacaaaaacacacgacttcaatcctctttttctattgcaattttgaaactttcttcgtagtttcttggaagtgtatgtattttatatttgattcagacagcctgtcgacaaatatcgacagctacttatgttgactttaaatatctccaagcttcagaaataagttcaaacaataatgtaaaataacccacataagcttagacttggaaattggactatatattcgtaaccgcaaagtaaaaatgatggaaatttcaaatgaataaatctatgaggttgttctgaagaaagcaaactaataaattgctaatttggaagcagattaataatgggcaaacgattttatatgatcagaaaaaaaaatctaagcagagagtgaaaacagaaaaacggagaaaaagagagcaaactcgaaaaaagagattgaaaccagtcgttgtgcatcattcacatgtaaagaccttcaggaactccttctttcttcttgaacataaccttctccttcgccttcttgaagtccacatgcgtcacctaaaccaatagaagaccaaacaaaggttaaagtaaaattattcaaagattgcgttcgatgaatcaagtggtgagaagccagagaatccttactttcatccgacgctctctaagagcaagcagaccagcttctgtgcatattgcctttatatcagctcctgagaactcgtcttttgtcattacaaactcttctaagttcacatcttcagccaaagtcatctttgatgtgtgtatctaataatggcatgcaattaaaaaccgatcagatctttctagaaaattcacaaaaaaagaaagaaaacttaaggatcaccagttgtggaacctggaagatacgtcttcttgttttgatatctggaagagggaattcgattttcctgtcgatccggcctggtctaagaagtgccgggtcaagactctcgatcctgtttgtcgcgagaataaccttaacatctcctcttgaatcaaacccatcaagctggttcagtagttccaacatggttctttggatttcacgttccccacctgagtttgcgtcatacctgtttcaaccaccattttatatcacatattagataccatctcttgagcaaaatcaagaacattgtttatcaatggatcatgtttatgttgtatttaggcataccgcttggtgccaacagcatcaatctcgtctatgaaaacaatagaaggagaaaggtcatcagcaaccctgaaaagttccctcacaagcttgggaccatctcctaaatacttctgaatcagttcactaccgacaacacgcaagaaagtagctgaagtagaatttgccactgcctgaaagaataacaagaaataacacttgctcatctccaacagttccgaatttaacaagcataagagacacattaaaaagaggcacactgcaacaatccatgcttgcgacatagacaaaaagaaaacgaagacattaaatcaatccacgtgactctgaaaatcttcctctatctacacaagtactatgatctaatatctcaattctaggtgatcaaaccaaagaagccactgtcctgactaattcatctttctagtgaagattgataaaagacagaaaattttgcatgcatgacttgacataaaaccaatcatacttgggaagtaccattatgtgctgtattaagcaattaacaactagaaagcttattatataatggatacactataggctaaaagacgaaccttagcaagcaatgtcttcccagtgcctggctcaccatacaagatcacaccttttggtggcttaattccaatatcttcatacagctcgggatgtgttaaaggtaactcaacagcttccttaatctcctgaatctgagcttctaaacctccaatgtcagcatatgactccaaaggagccttctccactttcatcacagacaccattggatccacttcatcttgaagaatcccaacaacagagagtacctatcacaaaaataataaaaaatatcacatagaagaattggttcaacgtttccatggaagagcattgtaaaactcaataccttgttatgcatcaaaatagagcagccaggttcaagctgatccttatcaacgaaagacaaaatgccaacgtagtactcaggaccaaccgaagaagaaacaatggcgtgattctcatcaataagctcttcaagattgccaacactcataggtgtaccacgaagatcatcaactttagatctatcttcctcagctttctcttcctgaggtttcaatctctcctgattcgctacgaactcttcctccataagcaaatagtccttgattcgctccaatttcagcaatcgaagcttacatttagtagaaggagtcaccgtcggcaatctcgccgccgcttcaggtcctttctgcttccgttgcttcctccctacacgagcaggtggtgcggctggttcgaacttcttctccttcttctctccaccatctggtttccgatctccttgccgattcaatccgccggaaggtccttgacccattgtgcttcgtctctctgaggtttcttgctctcggagaaacaaatcttttaatctgataacgggaggagatgattaaagtgggcttattattttaggcctttttacgatgtgaaaaacttagtgggccttaggtatcgcaaatttttttaaaactgattcaacctaagctattatctggtttagttcaataactcggtttaattatctttaatttcggtttaagttttgtaaaagtcaattcgttggtttggtagttggtacggtcaatcggtacaggtaaggaacttttcttttgccatttggggaaatcgaatcaaaaatcaatttcatcgtcttctctatctgtcattcatcatcatcacaatcatcatcatcaaatctcaggatcttcgaggtggttcttctgtttcgcaactagcttctagattgtgatttacaatcttcgaactctcggtgagtttctaggtttagggttttatctctctttacacgacaattgttatggccaatcgagaaagagatcgagagcttctgattcccgtcgctgatttcggcgacaaagacgatggttcttcttcgaagccttcttcttcttcctctgcttcttcttcgcatcaatccggccacgaggtctagtttttgtcacctgatctaaaaacgtgttcttcgttttctcatttcaagattcatgcgaaactaacagtagaattggatgatagttattcatagatttggtcgattctgtctccccttagttcaaaatcttggaacttgttttgccctagattcagtatatcacaagaacacttgcttagataagtttggtagttgtgattgagtagagtatgaatttgcattccaagttgttgtggttggaatcattcagattcttgagtctttgtattatgctcattcatgttttcaagcatgtataacttatagagcattgtggcctgatgctttagctcttttctgcagactttaagcttgttcattaggggttgggcgtcaaagaagttcatgacaggctggtaaggaagagttgaaattttggcatttgatgaaaacttccacagattagttttaagtctccattgctttttgcagtgttatcctacttcctattgcagttactttctatacaacatggtggtttattcactttgtcgatggattcttctctccaatatatgcactacttggaatcaacatatttggtaagaatttgaatggcccctctttatcctattaacaacttgatatcggtttcccacaatgagtttgattattgttttgtaggtttcggttttttgacttccattgcattcatcttcttggttggggtgttcatgtcttcgtggttgggggcatcggttctgaacttgggagagtggtttatcaagcggatgccatttgttcgtcacatctacaacgcctccaagcaaatcagcactgccatatcgcctggtctagcttgcttataaaaatcttgttttgcttctcaacattaagttgatctcctatctcatcttgttcttatccatttctcatcacagatcaaaatacacaagctttcaaggaagttgcaatcatcaggcatccccgtgtaggtgaatatgcatttggcttcattacatcaactgttgttctccaggtgagtgaaaatactttgctcaaggattttgttattctttccagaacgtctccttgaggatacaaacaatttcgagttatatggtttaccataatttcgtaatctttttacccaatgtaataatgctattcgttcttgcagaactacccaaccgaggaggaactttgctgtgtatacgttcccacgaaccacctttacattggagatatactacttgtcaacagtaatgacgttatcaggccaaacctctctgtccgggaaggaattggtgagatttcagaatctaattgtctatactagatacatttatcgtttgttatatagcattcaaattattttgtggaaagatactgaacactgtatactcattcttcatctgcagagattgttgtttccgggggaatgtcaatgccgcagattctatcgactcttgataaacctttggcctcgattggaaatgaatcttaaagtgactattcaaaaacctttggccgatcgataggaaaaaataaaaaatcagaagagacgtttcacaaaatctgagcgaatagagaaaccaaaaaacacagaaaaatttgtcgagaagtgtaatttgtcaatattatttgaataaccttgttttcttttagcccttttaaaaataattttttttcttttcttatagattataatttgtatccgcgtccttgtgtctttcatattactgtcgcattgactttataacaaaaagataatcaaagataatcccaccctaataataatcacatgacaaatggcaatatcgttttacatattagggaatagtataaaatgtggtatatatagagagacattgttgatcgaagaaaaaaatggtctaacatttctctgtctagctcttcttttgatctcaggtacgttttgtttccaacatgttactaattcttatggtgaaataaaatactgcagctaaaaatgtatcgaccaaaattttcttagaggaggattgtgcttagcacctgacctaattatgaatcttcatttctctgcctttgtaaactttaatttattttagaactttatctcatatagaaatctcaaatatatatatattatagtttttgcttaacttttatatttaaaataaatctgaaagttgtaagaaaattattttccatatcagatttaacattgggtgcagtcttgggaaaatatataatcgttagaataattttctcttttaatgtgataattcgaagacgtatgtaacaaacaaaaatgacaataataaatattacagtataaatcatttaaaacatatactataattagttattttttgcttaaatatgatggaattgttttgatattgcttaagaatcaaaaatgttttactctagataataaaatatttattgtaaagtttatttttacgatgaatgtatatgatttcaagtagaacaaataaatttttgatatattaattcacaacaataaaattaatcttttcatcttttgaaaataatttgtatacagtaatttgaaacaaaaattaatcatgttataattaagaaaaggataaataaaagaagacagatataaaaagaaaaatccaaaaacgacagagagctcaagttggagttagctaagcttagctacaaaagaacagtcgccggcaaaagtctcagcctttttcctctccgccgttcacagttcaccggcatttctctcttctttctttttctccgactagatttccttgtctctttggtttcttggcgatgggagacgagaagccggtgattgttatggccaatcgagaaagagatcgagagcttctgattcccgtcgctgattccggcgacaaagacgacggttcttcttcgaagccttcttcttcttcctctgcttcttcttcttcgcatcaatccagccacgaggtctagtttttgtcacctgatctaaaaatcttgttcttcgttttctcatttcaagattcatgcgcaattaacagttgaattggattggttttaagctcttaggtcttttcaagatttagtcttcagagatttggcccattctgagaaaccccttagtgcaaaatcttggaacatggtttagccctagattcagtatattacaagaacacttgcttagataagtttggtagtgtgttaacactgatcttaattcttaagatgcttatagaaatttgacctttcctcactgagtagagtattaatttgcattagatcttaagtgtttttattgggatctgtcagattcttgagtctctatgtcatgctaattcatgttttcaagcatatataacacataggagcattgtgatctgatgctttatctatttttctgcagactttaagcttgttcattaggggctgggcgtcaaagaagttcatgacaggctggtaaggaagagtttactgaaattttggcttgatgaaacttgtcacatattcaagatttgtgctgatagtttcaaatctcaattgctttttgtagtgttatcctacttcctattgcaattactttctatataacatggtggtttattcactttgtcgatggattcttctctccaatatatgcacaacttggaatcaacgtatttggtaagaatttgagtggcccttctttatcgaatgaacaatttgatatcgttccgtttcccacaataagtttgattatggttttttgtaggtttcggttttttgacttccattgcattcatcttcttggttggggtgttcatgtcttcgtggttgggggcatcggttctgaacttgggagagtggtttatcaagcggatgccgtttgttcgtcacatctacaacgcctccaagcaaatcagcactgccatatcgcctggtctagcttgcttataaaaatcttgttttgcttctcaacattaagttgatctcctatctcatcttgttcttatccatttctcatcacagatcaaaatacacaagctttcaaggaagttgcaatcatcaggcatccccgtgtaggtgaatacgcatttggcttcattacatcaactgttgttctccaggtgagtgaaattgctttgctcaacgattttggtaaaggatacgaaggcagatacaatctcgaggcatggtttactataattacatcatttgtttatccaatgtaataatgtccttcgtccttgcagaactatccaaccgaggaggaactttgctgtgtatacgttcccacgaaccacctttacattggagatatactacttgtcaacagtaatgacgttatcaggccaaacctctcggtccgggaaggaattggtgagatttcagaatctaattgtctgtactagatacatttatcgtttgttatatagcattcaaattattttgtggaaagatactgaacactgtatactcattcttcatctgcagagattgttgtttcgggtggaatgtcaatgccacagattctgtccactgttgataaacctttggcctcgattgatagagctacaagcttatagtttaaagcagaagaatttctctttttgttgggatttgttgatgagtgtttgtgtgtctctggagtctcttcaatattgttgtaatatttcatgtgtttacaagtgtataatgtaaggtaggtctctctctccctctcttcttagatatgaatctttttcctgaaaatattattcttcttgaaaagtattgcgaaatttcttctagttttacaagaattgactaaatcctctttttttaaaagaccaaaatttgatttggtttatttattcttcaaatctcaagatgaagtaacatcaggtcttctatagtgcctaaagcatatcagaatcagacaatagcatgtatgttccacaataagcatcactgtgattgccaatggtaagtaacaatgtacacaaataatgacaacaatttttgtaaagaaacagctctcttatgaatcagagagaagaatttggaggaaaggaaagacgaagaaagcctaataattcaaccaaaattattgtgaatagttatttagtaatactctctaagcacctgctaatgcgctgaagctgccacctctcctctgttttagaatatgtaagaggaatgaaaaggagtgttggtggcagtacctcatatatcaggcatggggagatggatgcagctgcatttctgtaaagttattgtttcctagaggagtaaataattgatttagaggtctttcttctcagacaaagctggagttttatgaagatgagtttgtgaggatgtgtttggtgttgttgttgttgtggttagctgggaaggttgctttgccgtttgtgaaactccatttgcagtttgtgaggatgtgtttggtgttgttgtgtttagctgggaaggttgctttgcggtttgtgaaactccatttgcaactggagcttgttgaaccactgggtcgattctgacagtcgtttgtacaggtgtatctagatccattcttgacatagaacaatttgattctgcaacaaacaaacaaaaaactaggtttgaataagtgaatctttatgtctgggcatatactccattttcttgatgatataagaaatggttaccttttacttctccacaggagattattcggttaaggcagtcacggaacttggttaatactactttttcttgttctgcataaacctggtcttgcccgtttggtagctgtgacgtaggctccaccgaacaattaggtgaagctgcaaccattaacattgtgtcccgttcgtcacacatcaatgccaaagtttctggagatagtgacctccctttggagccatctgcatttgaatcctctaaaccagatttctcagctttattattgacgtgtccttgatcttgcacagaagaagctacggaagtttctttctgatttgctaaccgtttttctgttaatgtctttgcagcttccccagctacagcaaccagaacagaacatagtgctttcacatccattggtttaattatgtttgccaaaagagaccttcaaaagaaaacatattttataactcagtttctgcaagtctcaaagaaaagatttagctttgttaacacatcagaaatttacttatatacaactttggatgggcctaacgacgcattgcctccagcacgagaaccagtttgcgaagatgtggttcttccgttatttgcctgataccaataattatactataagatctctcatttctctaacaaaggaggaaatcatatagaacccgactaagcaaataaacttgcgtaaatgatttacctggccaagcctatgagtggatgaatctttggttccttggttgaagaaaatctcctgacctttccttctcttaggaggtggagcagatgcaaagccagaggaaccaatagctccggttatggcagcatttgcgtgttgaagataagccaagttgtgggaatgttcaccgtgaaaaagagattgtctaacttcactcccttcaaagtttttgcaatccaagcatttgcagttctcagaacaaagaatgtttgcttgaaagcactcacaatacttcttaagacatccggatttcttgcagtgacagcctttgttgtgtctcgctaacatcacaacgtcaccaacctcctcctgcaaatcgagtcaaaatttataacttatccaacaaccttaagaccaacagtttaaagagcataacacaaaccacataccctgttatctcgtccaccatgtggactagcagcaatctttggcctgaacgcattcggattccgttccagagttgattcaaccgcttgtcgtctcgcaggttcattttcaacgttgttgaaacaatttacacagttgcaaccatcacagtaagtgccagatgcaaaacattcacaatacctgatcaaaaaaagacattgtacagtgttcaattcacaatgaacaagtccacaaagaaacaaagagttttgtcatcaaatggtatgatgagagacttacagcttcaagcaccgtgagtgtttacagttacactgtttcttcttctgaggggttccatctctagtttccccagcaggccttggcatcgaattcggagattcgggcctcctgcaattacaaaaacaagtgtcaactctagaaattcaaaccttgccttattcactatgaaaatcaaaatgtcaatttcaataatcttttcaaatcaatgtaaagatctatgctttaatccccaaatctgacttcagcaacatagaaacacatctctatcaacttcccaaaagttcaaatttttgaataagagagaaacttacggatgtctaattgggacgtgaaggatgatgccctgagattgtggcggcggtggaatcggagtcgccaccgtcggtggtgcctgactggtaattattggccgcgtaaccgtcacaatcggtgaagggattgatgcagcagccatcgaagaagcttgattagagtgtgaatgctcaacatcggaagaaccaccagtaaaatcgagttgcctcgccgacttcatagactcttgtgtaacctcatccgtttttggcgggaatttgtctccttcttcaccttctcccatctccaaaaaattcgaatttctcagaagaaacccagaaattttccctatttttcaaacacgaaatttaaaaaaaaaaaccaaaatttataatcagtttgagaaacacacaaaaatttcaagatctgaatccgcccttaatcccgtttctacgaaaacccagaaaccgaatctactaaaactcaaaacgggattttgaaattcgaatttttgatctagacttattgagatagatagatgaaattagggttttgaaaggttttagcttctgacgaagaagaagaagagagatttggtaaccactgaggaaccacccaacgaaaaaaaacagagaaatttggggtttttcttcttcttcttcgtcttcgcgagagctgctcctccctctcttatacatgttttgaaatttcaattttctggattatattcgacggttagatttcacagacattttgatcgtacggttgttattaaatacgttgatctgacgattactattcatataaggtttgaagtttcgtcgatcgttcaccgtccgatccgatcactcgtgactactacataatagagaagtaatgttttaaaataacggttttggcccaaattattaagttactcacgaaaatgccccaatagttttaaatattcaaaaacaaaaacaaaaaatctaagtaagaaaaggaatcgaaactgactattttgttgatgttgcgtgatgaagaggaatcgatttgcgaatctatgttcttccccaaaatcaggattttgaagagtttttttttttttttttggtttaaactttaaacatgaagtgaggaagagtttgggtttataattgatttttggggatttatagaaactgaaagtgacttttatttttagttaacagtttgattatcttctcaaaataataaattgataactaaaaattaacatttagttaatacaatagtatagttaaagttgactaatttcaggtctattttgcgtggtcaacaaaaagaacattgatatttactctattataaagttgagatttgttttaacacttattaccaatagttaaaagatttattatatatattttctcttttaattagatacgtaaattttagaagaatatttaattttttggtaccaataaacacacaagacttaaaaagacttaaaacacacaagaccaacgaaaactgaaaatcatatgagtgaactatgatgttcgacatcgggattagatcctttcctatgtgcttttcatgtttgaacttttgtagttggtttaatttttaggttttattcattaggctagataagaactttgtacaacttaggtggcatggaagcttcattacaggtttccttcatactttagagatggaatgaaaacgtaagactgtgattccattttaaaaatttgatgtcacaaatctattaaacttattttcaggttaattaaatcttaaatttgattccacaaaattctacaataaactcattgtgctagagaccaactgctaagtttgttcttataaaagtttttaaaaaaaaatttgcatgaaaataaaagatattacaagtctcaaaccattttatattttatgttttaatacgttgaaggacacttcactatatgaggaattacaaaagtatatataagcatactaataaaacttcaatccaactaatgcttcttcctcaagttcatttgcacaacactaaagcactgaccatgtgaaattaaggctaagctaatgccctaagttacattatagatctctaagactcaatccaagagttttagtctttcattatttcatcattgaacaatgactattaatgatacaatatgtgacctaaaaatagctaccttttcaattttgatttctaataacgttatctgcatccacaccagtacactactactatcaggaaatgcagtcttactctttatgaagccaccagaagtttctccacattgaatttttcatatattgacatttgacatgtgctgaaaacaatatccataaacccatgggcctgtagaatttaattcaaagtccataaacccaattatagtgatggagcaaagggcttataataaacccaccaattgagcactaccaattccaataccatggtgagatgtctgaagtgtctaaaaataaactgagctgagaccatgcacgagaaatctaaaaagacaactaaaacaaacgaaactttgattaggacaatttataaaagaaatcattagtctctaaattattgggaacagaaagtatctataagtacatctgttttctttccgaagacaacatttcttgcttctttaaaacatcttaaacgattaaacctagtgatgaagttagtatgaaaacatctttaactgtttaaccattctattataacaataataaaattaaaatagaaccaacatatacattaagagaataaataaagtttcctattaaagtaagaaaaacatgattcaacaagccatctcatactcgtcaactgaaaatgctcaaaggccaaacgccaaaaccaatcggttttagtatagcatcatgagcaatcaaatttggaaactcattttgatgttttctcaattgattggttgctcatgatgttataacatctactatttttttttggctgaccaaaaataaaataacagaaagtgaatagttcactggagagtggttccgaacgccggagcccaatagtcggcaccattgtcgctgccaacttgtagtgtgcatgagatgggaacaagacaaagccctctacttctcaaatctttcatcggttcttcgttaggatttgatttttgattgtccgtcgatgacaatgaaactcctcttttcatgcaatactcattcacaagctgattaaccaaatcagaaaatatttcttcagcatagatatttaaaataatattgaaagtgtgatctagtgggagtattggtgacaaaacgggttggcctacttcgcaacagcccaaattcttttgcggtgggtcggcctgtattacatgtaaatgatatatggataaaataacctatgccagtttcatgaatatttactgttttgcaaccaaaaaatgaatatttactgttttgtgcaccaatccgcgggtttaatacctttgagtgtgagtattttgtatttaattttctgaatttgaaaagcgataaattttgctttgaaaaatattgctaaaattttgagtcagagttaatttcaaactcacaagtagtcacaaaatataaaaccatttgtgggacaggtgaatcgtgatatcttggttggaaaagttgatttagatcgatcatttgccaaaaaaacttttgtgaccaaagctactctgattgaggaaaataaatataataaatcatttaaatggcttttctaggtttaatagaggactgaaaaggaaagttggtaatgtcatctttttattttattgaccatactttatcgtagtcatttcaatttcaagagaacaatagtagagaaaaagggtaattgttttggaataaagctggcaagtatttattttttttaaattgagatttgggtttagttgatccaataaaaagtaaagtatataaaactagaaagtaaaaaaatatatgtgcgtacctgaccagggtcctcaggaaatataccattcatatttctttgtgcctatattcacgtaattacaaattaataatgattagcattcagatacattttaatgcacttaccaaaaaaaaaaagatacattttaatgccccattatatatatatgatgtgttagtagaaacccatgcatgtatgtgcatcttgtagtgtataattacattatacatgttactaattaaagctgtatattaatttaatacttacatgttggtgcatcatattgttcctcgagggagtaccaaagtatggtagacttaaagcctgtaattgtgaaaattaattagagtgacaacaaaactaaatagtttttcacacaaaactaatctcacaaaatatagtcgttaaattaattaatgctatagaaatacataaacctcagctaattgtttcaatagaatacaatttacttatgttattcagttcttattatgatttaaaaaaaatcccaaataaaaaaggaagatagaactccaaataattccatacttgggttcacaaatgattatttgtgttgtagttgtgaggaagattcaaataaatatttgtcttgaaataaatgaaataagaagcatggtagtttggaaaagacaagtcacctcaatttgactgtggaggaatctaatgtatccaatagcctccgacaagacagaggctgtgtcagtctgaaataaaagggatcaatcaaccaaacagtgactaatataattcaattttgattcatagattagataatcttaaacaagtgattagtaaagggaactaatcagtaattataccttgccaaagggagatactagctggtgaagagatgctattctgcctccaagtttctcctttctcacctttgataaatacagagatcgtatataaatacactctacatgtgatcatttcgtaatttaacgaatgtaattagatctatgagtgattttatctattttaaaatgggaaaaaggaaaaagatcattcaagtctttaatatatgattagtttttgttagtatgagcgtgcaaattatacataaacataggaattttgatattgtagaaggaatatgcacttagattaaatcaaacattaaccaaaacttgatccaagatccaaacaaaaaaaaaggaaaaagaatgacacattttgataactgatcaaaataaagttatgttttgttacaaacataacaatatcaatttagacagaacaaaataaacagagcaagaaggagaaaacataataaagttaattaacttcgataatttttatttttttgttagaaaaggaaagctgagctaaaactgaatcaaactgaaaaaacagatttagtatctatttctcattttaaaataaaaactaacaaaaaaggattgcgtaactaccgttgaatcataggaaaggaagagaaaaaagaataataggatcaagaagaagaagacacataagaaagacaaaaatgttacaatcacacacacatgcagcttattctgtgcccattctcttttgtttttttctacttctcctttatgtttgtgcatttgttttgttatttaaaatgccagcaagagatagaaccaaagacatatggatttagttagttaccttgagagttgattgtgatgaaggaacttgaagttttggtttcttattagcaaaagaagacccaatcatctctgagctattacacttcatgaacacacatagacagaaacaaaattcagatatattcattgataaagaaaaaatatggagatgttaattaatatttggtaaagattatatcttgatctgaataattcactattttgacccacctcggacaagttaagaccactgtgaatgttattgttgttgtcttcattggtgttgataattgtagcacaagatttgtttggaggtgagtttggtgaggacattattccataactattattattactactctcttgtttcatggaagcttggtgcctcaaaacttgttcttcccaattttgtatcctcttcgcttggtaactttggtgttgattttgatgatgatgatggttcatcatctccattttctcttcctctcccatcatcaatccaccccttcattcaaagacaatccatattagatcatgtttgtttatatgaaataatataagtagattatgtatacatgagaaagaaaaaaaaaagagaaagaaactttataagatcgaattagattacaaaacaaatccaagaactcaaaaccgtttatacatagaaaacatccgaacgatagatagagagagagagagagagagagagagagagagagagagagagagagagagagagaaagggagttacaagaggagttgactaaggctccatggctgatcaagaggcagatcactcatttcaagccaagaagagaagttagggttactattaggaggagggaaagaaggtgaagaagatgaagaggaagtcggagaagagaagaagtttggcaagagacttggaataaaagcggtggtagacggcggctcgtgactcatcaacggcgttggtggcctcaagccgcggctgacattattccaccaattagggtttccagccgccgtgagatgttgaaccggcgaactctccaacactcctctattcatctcttttcctagtttctactaaccgagaatatgaaaagattttaagatttgttgtttctcgatgctttagtttaggctctagtttttggagaaaaggaaagaagaagagagagacaaacaaattgagcaatcgatacatgtcaatgatgggttttttatgtatttaacaccattctctctccctctctcgattttttttctctgtttttattttttattttttcccctaacatgcttttactttctttttttcttttcttctgaaaatatggatgcccatatggaccatattcgatataacgattaactaattttggatgaacggaggaataagttttctaattcatgaacacaatattatagtctttagtctttacgataatctaaccatgatacagataaacctaagtgtgtaagtttatgtaatacagtactatgtataaatatttactagattaattaagaaagactgttataatcagtaattcatttttctatacttcatttttgtccatgctttagctttatgcataaagtagggagggaaaggtgcttttgttatttaatcgaattatgttttttttttttctctagattatatttcatcgaactatgagctcagaatcaagaatgcaaaattttaaaattagaaacagaaaaggggttatattttttgccataagagaaaaggtgacccgggttatatattcgaagacttttttgtacggtgtataacatattcgaatataaatttttgatatttcccacatatataacaagtattttgcatctatgcatatttcttacatcaaattatcaaatgtattttaaacccttttaattccatatatttagttcagtttgatgtgatttaaattactaatttattatacgataagttcagagaatttaattttgttaagatatttgtcctgtttttgttcatataataatttcttcatccaaccaatgatttatataattctttttgttgatggtgacttaaatggatcaacatgcgttgcgtagggttttatacgtacccacttaaaaaggaatttcatttaacaaagctaattacgtttaaatgactcaaaagtttatatgactcttcttataccaaaaaaaaactaattaaaattagttgttgctctgtcttgatatcattaattcattggagaataaaaattcacttttaacaaataaaccaccagatcatagagtatgtgattaacttacatgcgttaaacatttaaaatggtatagagtctatagactacctgataatgtgttaggtataataactgtctacttgattgtgtcagatatagattaaaaatattgacgtaaaaaacatgttagggaaacaaattcatagatatatagacatcaactaaagcaaagtttttccatttcaaagcaaatggttcacttatccctctaagataagttgcttaattaatagtagtaatttgtatctttgtgggattaatcaaatataaggaaaacaaaaatgtatatttgcttattctgttaagtattcttcattttagaggctacctctttgaacttcatgtaacataaacaagtttattattttggtatgttaataaaacttatccattatcaattttctttctcattccaacgtgctaaaattatatattatatatatacaatgaggctcatgaacgaaaaccgtggaaacatttaaaggatcggctttaaatcaccatacatatatgcaattttttcttgtaatttgagcatgttagagtaagaaaaaatactaacaatttttgaaggttacctatattatgcagtatgcacctctggtttaaagtggagggaaatatttaatccaaaaagtagtactatgtacttataaatagttgttttcccactcacgcagaatatgattaaagcatgatttcatggtgacgcattcaatcccgactagaaggcgaaacggtggatttttttttcgtttgcaaaaatgaattaaaaataataatataaataattcttggagtagaatttagttttcattttacaccaagaaggcaacatttctcgaaggagtcaatttctagggtttggagatccctctgtctctccaaagaatgattacaatttccaagaaattttatatatgtaaaaaaaaaaattacaggtataaactacaatacaaatagttcaaaattatttatctgaaacttttttttttttaataatgccgagcaacccaaaatcttcatcagtcatgttataacaatttttcttagcataaaaggacgcatgggccaagattatgagacgatcttattttgccgtatctctttgtattcgaagtctttgacgacctgttaaacgctaaattaagttcatgtttgattggttttcacccatagagcttttttggacgttttgatcattttctccttccaaattccaaggtctaaccaaatctcgaattcttaatattcagaaactcaaaacctcttcattcagtattcttaacggttctctcccaaattatgattttggtatgcattttactgaatcaattacatatatatatattcaacattaattacactctcattttaaagagattgattgaaaaggcattacttcagtaatctataacataacattcaaaaaaaattgttatcggttttttcacatccaaagtataacttaaatccatgaaaaggctttgcaattaatttattgtggcaatatttcaaagcatagatggttaattaaaggtggtttgttgaacgatgtctatctccctaaatttaaagttggattaggtcttataaactcttaagtaactagtgcaaccaattgatggtggagtattatagcaataggaataccttgttaaaacatggttggtttggaatgtaaaaattaactaatgtcaaaagtgaggtagaagattaacctcgtgagatgaaacaatactactagtattaaatattgcgaacaaaggttttataacttttaaggccaaggggaatggaatgatgaagaatgaagcatgctttgtccgtacagtccaaaaatctttgtcggagacgatgtgtcgtttcttctcaaattatattctcttccttcactagttttttatgttgtcttttatcttatcttaagcttcttttcctttcctgcgtcctattttgtgaaccgatgaatatagctgttttctttttactacatcttagtatatgttttttttcttttaactatatatattctatgtttgttaaacaaaataatgtattaatataaataattttattttacgattttttattttgcaaatttttattatagaattttatacagttatgctattatgctaccaatcagaatttgagtttgctagtaaaattttggaacaaactttcaaaaaatataaaattttagtcagtagtttaatttgaatttgctatcaaaatggacaaaaaaatatttaaaagtcattgtcgattttttttctgcctcaaatttataacacttaatagttaatatcataacccatcaaatgcggtcgctcttttgtattcttcttgtttcatgcttggatgggatcattggattcttacacgaatacttttttttggttaaaattcttacacgaatacctttctcactcttttgaattttcatatcgtatttttttttcaacctaatattattgcatatatataacctcgttgatggaattattatagaaaactttcggaatactgtgaaaagtatatgttttctataatatcaagcggcaaattctttttattctatttatttacaattatatgataaacctaattatgttttaataaaattagtttttatgcttccagcatcaagctaagcatgttaaatcggtataaacaacgtttcgtttattttttccttttctttttctttttggcatgtatcaaacagttaaaagtggaacataatagaagctataacatttgtcatttgatatatagataagctttgtaggagaataagacttgtttactaaatatgttacgtcattgtttactgaatgtagatcttttaaaataaataaaataacatgtcaataaaatcgagcaatgtttgtttctaccgagcacttgcacattccagtgatcaaattttcatgttggacacattttcttacttagaaaatagttcatgaaagcctagaaatgtcaaactccatagtttgtattaatcatagtcgacgatcataataaattcaaggtccatcacaatcattatgcactagttttcctacttgaatacaattcacaactagacaggtccattttgggactggttacccgatgcggcattttcgtcccaaatgtttaggaacaaaaagttataaattatacatatgtttggaacaaaacactaaatcccaacgaatacacaaaactgggccggaataggtttgtgtcacccgaagaagttcccgaacttattgggcaacgacattacgttattgcttcaaatcatacaaaccatagaaaataaatctatttttcagcctatgtagatgtgcaatttgaaaggtatgtcaagtataattgtaatggcccaatcaagttttgaaatagataacggcatgaatgagtcgtatgggccgcggaaaggaatagcaaataaaagtacaacctgccttttgtggccattatatccacaatcaatcagtgaaatatatatatatatatatatatatatatatatatatatatatatatatatatatacaatcaattaaaactatatttaattgatggcaaaatcatgcaacatatgctaaagagatcacaaattaagtacaattatagaaatgaagaaataatagagagacacaggttttagtttgtaaaacatttgaaaaactagatggtatttaatattaattattcaacctcgagagaaaaatgaactttctatctttttttataacctacaaaaaagagtaccttctatcttgtttctttttttgtcgacctatcttgtattcgttgaaacaacagataaaaggaaagagacagcttaaaggaagtattagtaatttgttactgatttaaattattagtatgtgttaattcgaggaagcttcgttgaacagagatcactatattcgcttatctctttaatcaagatatatatagaaaaaaacaatgatctttcatgatctatatgtatattattcatccacgtgggtcaaccaatgacgatcttatatcgtttgtgttagacaatctcatctcataaacattaatttatttgggaactaattgccgaaatgtcgcggtaataatcaacttcaagaatatttactagtaaattctattaccatttagcatttttgtgttatgcgtaaattagtatagacgaataattttgcgcaattgcttaactaacttggtctcatgatccaacttttttttccttgtcaaacgattttactctcttattttcttcccatgacccaatatttaattccacaaattcgtaaatagttctataaatatgttgactattcaaaagcactagcaacatttagtccggtttccgcggacggttttaatgctatttagagtattcttgaatgtcggcttagaaatatgatggatatttggttccaatgctaatttagagttttcttgtccgtcagcttaaaagtgatagacttttgagccggatgctagtccaatgctagttacgattatcatatgtcagccatggaaagagctttggcgatgttttgttatctacattctggtggaaaaggtgtttcaactaagggaaatgaaaaatccgttaaaacaaaaaaaataaacgtagccacttatatagaaaagttatatgagcatattatgacatgaaaacggatttgtacactcacctacgcctcaagagtaaactaattgagttttgtatcatcctctcaaaagaaaactaataatggagttagttattatctctatgtttcgcactttgttatgtcttgttgacttaatgccctagatatcctagttattaagataaacaatggtcaatggtttcatcttgttactacggttgtgcttatcttctagaatgatctagtcgatagaatagttatttacgcattaaaaacaaaaagagtcaagggctgtcaaaaaaaaaaaaaaaaagagtcgaggaggaaactttaaaatcataatacatttaaaaataaataaaaaaatatgaacatcattacgactttttttattaaaaaaaataagtaagaaaattcgtttcaactgatttattattggttttaatttattgaaatgatttgaatattttgcaaaagatgtgttatcatttaaatagtgcttatataatatatacacaaatgtgcattagctagcgtgtggtggtaaaaaaaaaaggtgtgaaaatcaaacgaagttgtagcaaaaatcaagaaagaagcatcactccacatgtgcggggctttagattctttgaagctcacatttgagttcccaagctcatattataagcaccttatcttatatttgaagatatgatatgatctgtctacatgatgaccttgtcatggcacacaaatgtgtagatatatatttatattttaaagttatgatatattcgtttattaaattccagggtttcaacaattttaagattttgaagtcccagagacaaatcatgttaataatgtatagagagggatacctagggaccataactcacaaaaataaagaaaacttacaaattaaaggatctattgctattcaaactgatctccttaaaactaatgcttcaaattatttatcagttgatacgttaaactcaatagctcctccggctcaagctctagcaaatttggaccaagccaattcaagctcttatggtgagacaagctcaagcctcaaggcgataatatgttattgacatggctccaatgcatacaaccgtgcattaggccacatttgatggaaattatcttactccaataactcaattcttttttaatggtcaatattcctaggttttatatgtaactaatacatattcatttattagaggttttatttcctattttaattgctttttaaagttttgtttttcaaattttaagcttaattaaatacaattttactctttttttgttgatttaaatactgccttaggcttctaattcctcagacacgacatagtcgacatgttgttgtaaggataaacgaaagaagatgaatataatatacaagttttcaaagaaaaacaaattacttatcaaataaacctaacctatagtctagtgtatagtttgtatctagattaaatttaaatcatatttaatgcatgttactgaaaaattgctcctcaaatattacagtaccatgcatgcacgtccacataattagattctgcaaaaacataattaaaatcagaaaattgtcgccaaaaatagattaatggagataaacaaaacaaagattatacaatgttttatatgttgaagtatttgatatttgaacacccagtttggttacggtgaaccatgcatgtattttttttttttccaacaaccacacatatacatgtgtttatgtgaccaggctcctatttttattaaataatttaatctgcatgattgttgccaattaaacgggatatgccttagatcgatatctttcattatgtatatggccgattttctttttttttttttgtgataaaaaaaattctaccggtgttttctatatatgcatatacagtattttttttttgcaatctagtatatctgcggtatttttaaagccaaaccaactatcaagatccacgaattgagcataacaaaatttaaagccattgtctatatcagacttataatatatatgtcattcctaactgcttgatatagactattattcttcaaattaagatctataatattgcatgagttacttattttatggtaccactttcttctgcagagcatatcttaaattttacggttcatatttgttgtagacttgtagtatgaagtgttgggggttttgttacacaaatatctcgttgaattaaacattaaaaaattaagtgaactaaaacatcaattcaaattaagataaaagaaaactctgtcaagtcatatttatatcttttttttttttttttaacggcaaatcgatcatattatataatcaaagttttacatgatacataagaaacattcaaatacaaactttgaaacaaataaagtgatgataatttctatagtttctatcattctcctttcgttgttcctcctctcaattcacagtaaccgttctttatctcaagtatggcttgtcgttgaggcggttacgattcttactctaattttgattctcattgccccatcaaaatctggcaaatttttgcttatagatgttgatggtgattcaatttggggaatgatgagtggaacgatgctttggctcaattgctctctctttcaatttatatcttgttatcagaagatattgaaattgattattaataagtatatgttgttatctcattcaattttatattagacagtttcgaatttaatattatgtttttagaaactgattaaagatttttatatatgcccaaaagattattaaactctagtttcataactaaattcttagtttaaaatttgatttcttaataagggtttgtatgtaacaatctagttatatggattacgtgcaaataaagagatatgtactatctgtttgttttgcaaagtaagcgttcatttttttattgcttattgatacaatgctagattagatttaattttaaacagctaaatattgcgtataagtacatgttttaataaactaatatacagaaaggaatttataggtctgattggctgtcgaggtaagtagcaggatcaaagggatttgattcgaaaaaatatatatttttaataaaatccttagcaaatcaataatttgagtattattaaaccatatacgagaaaagatagacaagatatagacagagtgtgatataatgtagtaggggaaatgcatgtgcacacaatctacagtagatattatttcatataaatattcatctcattaatttttaataaatactctctccattatgctctgtctttttttgttattgtgctctcttacttactcatcaaatcacttattatctcaacataatcccctgttttgatacacttttctgtctctaatttaattcaatcattgtgatcataactaatcaactttctgcatgtatacatttataacctcgtatatataaacatattcttgaaagtttggacgaatccttattaatggtttgcattttgctaagcatatttatatatagaagatttgatacggtataaacatgcttatattatcgatcgttccatttatttgtttcaatctgcatgagctgaatttacctcgtctaaagtccataccggagagatcgattataagaacagatttagttttagtttggttaaatatttacatataatggaaatcgatgacctaaacaactagtataagaaacaataaaatatcatcaaaatcaaattcttatttacgtcgtatcataaaattacaaattttgaggttatttaaaaatgatagaccacaaaaagaatattcaacgtcagcagtactgacatgacacgtgtcttaaaatattgatttattaaaaagcgactcctcgttgctatatttcttagtatatttttccctgctgagctaattaaggccaagacatgttccaagaatcacatgattcacgacataagtttataaacatttattgtataaaaaatgttgttacacaataatattcttttgatcgttattgaacatatctttgataggtcagttaaacaatattgaggttagaatttacacaatatcttgtcgtgcttataaagtaatcataaaacttaaaagactttttgctagaaatttcatatcaaacatattaatttgaagcaacaaaacaaaaccattagaagaaatcgcttttaagtagtttgttggttacaagaacagatatatattagaacgtaacatgtttttacagtcataatttttttttttttgtaaatatagtggtcgataaacaactgtgcctaatctactaaaatgatgattctcgcttatatataatttttgtgaaatctcgtggaccattattcatatttgtaaaaaaaaaaaaaatggtcagagaagcatatccagtagagcaatctgtcgctcttataattgatcttatctgtttttgtaagaaaattaaatgttcagatgtttaaaatattaattaaatctttaaataattacataatctcaagatttgatctgaggttttaggatttcatgggataattttaaaatctaaaaggaagtttcaaaggaatttatttgcttttaaatgaatatatataaataaaaaagtatactcaatattttagttttttatatgttgcaaggatatagtttcagaaaaatcatgggttttttttaatggtaactgaacttgttcacatgtcttgcatttacaaaacagattggccagctgacacagcaaatgagaacttagaaaagaaaagacaaattgtaatccaatcgatcatgcgtgaaaacaactcaagtactcaacgacgacgatagatggaaactcagcttccactattaatgctagctacaaatctttaattaattggtgcgggggatttgctgttaatatagggaagtgttcagcaccgttagcagagttatggaaaaaaagtctattatgagctctacattgtttgggagaaaggaatctctaggtagagttgaaggtggattccaaattggtggttgggttcctcaaaacatggattaatgattctcatcttctctcttttctggtgtgattgtgccacaacttcattgcaaaagactgaatagtccaaattgtttacgtatataggaagatcaatcgtctagcagatgtattgactaactatgatttttcgttactattaagttttcactttttatttattgttccagttgagtttggaaaaattgtttgggaggatatataaacttagatcaatatgaccaagacgaatttatgtttgattgttatgttagtttatgaataaaaactggaaaacattgtctcccgatcatttaccaaaaatcctacaaatctttaatttgggattgctaaaattaaacgaagaaaaatagtttttttattttaacgaaagaaaaatacgtaactgtttctttctgaatcgatgaagaatgttagtttgatttcttaatgctaatatttgaaaatgaaaaggtaatagtaataattattgtatttttcaaactattcctatattattgtattgttcatatcctccatcgtgtaatgacactaggacacattaacaatttggtaaaaaaaaaactaaaaaaaaaaaaaacagtttggtaactgaaaaagtaactagtgttataaaagatttattagcgttaataaaatttgtcgtagctgtttttgttgtggtgattttttgccaacagataaggatataagaagtattacgacgacacatgaaacgaatagtttgaaactagttagagatcatttccccaaagcatcacccaactgtccctagcagacagtcctatggaatagaacccccaggcgacaaaggatgagacccactcacgacgcttttgacgggttttgcattacaactttagttcaatcaggatctaccaagtatttaactatgaataacaattgtgtcagcgatagccacgcacaatcccttgccaaaaagcaaagtccatcctatatagagcatctcaaccactacacactaatcctatatatatatattcgcatacatatagtgcacaccgtcttagatcttacggttactgtagtctgaaccgaggacggaataagctctccgactagaatatgtaagaacactataaaatatcaaatattaaaatctatatctttatccaaaaaaatgggatgaaagagttttggatgccaaaaagaaggagtctccaataagttgaacccttggagacatcattctagactcttctatctagaaggaatcttccagttagtttttccaagtacaagtcatgatcttcctacatactagcaacccgcctttcactccctttccttattttcttcttctctcttcacgattacatatattcttcatcataagcttcatatccattctgagagataatctttgaaccacttgtaactctttcacttagcagcggacgacagagcctagctaaagtttaagactaaagaaaatctttgaattttttcctggaacctataaagaagatttattgaatctacaaattaaatatgaatctaataaaatgttgacagaaaaatatgtaataaataagtacatatggttgacaaaaaaaaaaggtacatttaagtcattttacagtattttatataccagctagtttaattactttccgtttcttaacaacactttttgagaaatgttttcaaatgctagctgtgctatatatttttcctaacagttcatttcctgatataagatctactatattatggactaattatgacatacagtatacggagaataaaaaatcgaaaatagtatacaacgtagattgtatattatatgaaaatataataaaaacactcaactatttgctacttgagtcaatatgaaaataatattgtactaagtccgattttatatgttatatacttttggtagaccagattttatatgatataatatgagtttctcgaatggaaagcatgaaaattataatttatatcaaagacaaggagagctgaataattatagatcgaatcaacatcgaagtcttttgtgttggaagtcatccagaagaccaaaagcaagaaataattaagaaattaagctaatcatcaatattatcttattgcacaatgattgtaattaataaaattgtaaattaagtaaagaaataaaaaaagggagttgcaaaatcaaaataaggcataaaatctacgtaatgtaatgtataatgtatttgtgtgcgtggcgtatctattgaaatctggaaacaatctgatccagcgatgcagtagttatacactaaggttttctataaaaactcaaaatgaattgtaaaaaagattataaaaaagagatcaccaattcaccatgaaagagatctctccaatttcttagctcaaagcaaaataagaaaattcatttcttctctctctctccctctctttctctctagagaagactttctctctctagtttcttgaattttccggtataccttacgatcgcaagtaaaatttaaggccgatcaaagaaacatgggaagtactttctttggtagaccaaacgtggtgggatcttcgccgccttcatcgtctccgacgtcatcctcttcttctccagcgacaagaagagggaagaagaatggctccgagaagccgaagcagccacagagaggtcttggagtagcacaattggagaagattagattacatggcgaaatgagttgcaatagcttcaacagttataacccttctttgtatcctcaggtaacatatacaaacacttctttacataaccgagattccgatccgaaagcatccaaattaattaagacacgatatatatgtgtataatgaaccattaagaccccataagttggttaagacatatgtacgtatattctgatcgagttcttaggttttgcttttgtcgggtcatcgcctatgtttgttgtaaagttcacgaggctagtttccactcatttcctaagctatatacttcagaatatttagattttatgaaataagtttgactaaatttctctaattatctatctaaatcaaatattttcaagagtataagtaattttatattaattaaatcttcgtatacaaatttgagtataggaggatgtgaggatgcaaggaggatattcatccataccatcacaatcttcggctccttatggtttctatccaaatatgatggtatagattttccttttaatgatgtatattgttctttttaagtatcatatataggttcgtgtatataaagaataactgacttggatccatcctctaacttaaatctaattatatatttactttttattttaagtataccatcttaataggggaaagaaatcttctacaagataaggtcgatcatgtttccatatttaacaaacacatttcaaagaatctgaaataaaagaaaaaaaatcttaacaaaaggaaaaataccaactattcatttttttattttttttgctcttcgcagatgggagtacatagagatcaatacgacagagcaaccatgaggtacatataaaatcacttatatgcgtacgtgtaacatgttatatattttgttttgtcttaaaagtaatttcatttcttttgttcaaatagctggaatccaagctacggcatcttagagagccaacattctttggaaccaaacatcaccagacatttcttaaacgaggttcttactctataccctcaaacatatatatatatatgcatcatgtcaaaattagtaataatgttactcacttgatcatctttaattagttaaggggttaacgttgaattatattgttagtgaacacgttcattcacatgatcattagttccaaaaaagaaccaatcaattttacttatcttgcgacagaatttgtttcattttgatttttggcttaccgttgttcattgtaaccatggttcaaatgttggttgacattatttaaagtcttataaattgtagaggatttgtaaacaagtgattctaataaaaacaaaataaattttccttcaaatataggatccaagctcgacaacaaggcggagtaaatctttgggatcgggaatccaacactcgggatcgagtgaaaatcaagaggtggacttggagttgagattgtcactttgaccattactttgtaatggtttggtctttatgaaattgaaaagaagtcgtatcatttcaatatggtatcaaatttcttaatattgtaggaattgtatgattgtctcagtagaaaatatttaaagaatggaatttatttgtacattttgggggaaattataagatagattatataaattgcctcatagaaattatgcatgttattagttatacatcataggtacactcccacacgaatgttatacatcatgatcatgattgttttcgttcgaggtattccaaaaatcgtataatccgaacggtcttaacctaaaagatgcactatttgttttaatgtttaatctatattgttggaacttcattttttcaaaggatcgggtgggttggcctttggattttggtctatattgacatctctaagtttaaacgccggctcattatttcaagaaaccggatttttatgacttaccctctggtagaatcaaacatattataaactctattatttttatggaaagaccaaaaacactgcaatgcagtatcatatataggcatccgttaaaaaaaaaacataaatagccaaatttgcttatcaaccaaataaagaaaacagaaatgattgtgcacatcacatttcaattttcgaagttttattctagagaaaattaatgacattagtcaaagaaataacaatcaagcagttggtggaacatcaacaggtccagagtctttctttttgcaacaacatgtgtttcctggtttacaatatcctcctgcaggaaaccctaactcatggcaaagtccattgcaatctggtttaaccaaatttccacatactccaggacacatcggatcatatattccattcgatcttgcttctgaacctatgaaattattacaattatcattagttgtttgataattttttttttgttgaaaaccatctataaaagttttatatatgaaaaaaaaaacttattttgctatttacaagattatacctgaaattaaaaggatgagaacaagagcaatcatcatgaacgtattcttataaggagatgcgaccatattgtttgccattttagttgttataaaaaaaattgtgttgtgcttgcttctctttttcgtgtgtgtcgtgttatagaaaattaaaccatgtaaacctactcacttatatatagagagatatgtgtgtgtgcatgtaagctcttatttcaaatcctcatattgattttaaacttcaattttcgaaatcgacggtatttaattgtgtagatcatcttaaagaagagagattttggaaggaaatgaataaagaatattgtttctttataaaggctgattctgtctttaaaaaatttcaataatcaagattctgatttcttttactatcctttgtttcgtcatctcttgtaaaactttatttttggattcaccaaatatctatccaaggaagagtctctacatacatatatagatcgggaccaattggatattttagagcaccctggtacgtattgtaacatgggaagaacccatataagagttcaaacataatgttatcatttgaaaatcataattaagcataataattgttcattcgagtcataagtttttgaggcaaatcatttttcatagaaattttctatcaaaatgccttttcaaaaacacgaaagcctaagtcatatttaaaacggtaaaaaaagaatgtctaaaaacatagaaatagtatcaccattcattattttaaaactcaatccttcaccattctatgttgcaaaaccagaccaaaaagctaacaaacaatgaaccggtacagatactacatgcgggattccttgtgatctagtattcttattgagagtgccattttaagacattgttgtctcttcaacggttaataggagtgtgcatacgctcaacgatcttattcacagcatcacgggacatcagaagcgtatcgtgtagcagaatgctgtaaacatttagcccctgcaaagtgttacgtaaacaaagttcaagattcgctaaccaattagtcgagaaaccacaaggtttgatatgtgattatgtaacttactattgatggaattatgttgacatagtgtagattttgggtggctagcttcagcttttcatcaataggaccaccttctacaacaaggactttctttgtgttctccatttggttgtaatagttcacaatgttctttgttttatgcgtaggcaatcccaaatcatcaaacacgaggagctgcataaatttcccattcagcaggtacaattagatcagtttaataagaaggcacggttatcaagagtacattttatgattaagaagagaaagaagctgacttttccttctgcggctcgagctgtcaatgctattttcagtccaagccgtcgaacctgcttattcatttttatggcatggcttcttggtttgggtccatgcattacacaaccacctcggaactaatggttcaataaagttcaatcagagatctatatttgatggcaagaaaccttaaaattcaaacactgatttacctgcggaccacgtagtgtaccatgtctagctcgacctgtacccttctgattccatggctttctaccagttccactaacctcacttaacgttttggtcgaatgagttccctaaatatcaacaacatgtgtcacacttattgattgtttgcttatatgactaaattaaggcattgtgagataactaattaattacctgctggcgtttcgcaagctgccatcgcacgacattgtgaatgatatctttccttattggaacatcaaagacatcacctgctaaaaccatgaaacccttttcctcgttctgaaaattagtcactggaatgaccaagtcttgatattgtcctatgagaagtatcaataacagtaccagttaatacatgtccagaagtttttaaaagagagaaagtagaagagaaaatatcattgatcagagattttatcatgtctcaagcacaataaccaataaaagcgagaacataacagagtcaaacacgagcgaaaaaatggtactcaaatctgcgttaaccttcaagtaataagctaaataaggcctgaaaaactcttactcctccgaaaacacaaagtaactgcatttttataacacaacaactactcactctccattccaccaacatgattccaggaaaggaacaaaattttcagcaaagcacatgaaagatacagatgttggaattagcttgaaaaccagcttgtagaccaaacagagacgtacctatggttcggtctggtgtaagcacagtctttttggtaagtaaatcagaaggaaatgaatcatcaggagtcaaaatagaagtggagagctttcggttggaaagtaaagccattccatactgcattgataacaaatacgaaatcaacatctcaaaatcaggaagatgaccactcaagtagtagtaagtagaactcaataatatgcagatgaaggaaaggagaaagtgacattaactaaacacaccaacctttagatcattagtaagagaagctaaaccatttccagatgtattcgcagacaaatctgttgagagaaacaatcagagatccaggaaacaaacatattttataagaagcttggaaaatgagataatacttggtgaagaggaacgtcctagagctgaaaaggatccaaaagtgcgaaaaatccttcttgaaattgaagcagccataatctctgattcaataacctagcttctcatctacaaacacgaaaacaatccaatttctcagtgtaatctaatcaaaaggcacacaacatctacactacaatggcgaagattattcggcagatcagaaaactcaaaatctcagtagctatcaaatgctaattcgagcgattaagaaacagaaatgaaaaccagacccacgtacatctcatagagcttcaaccaaaataaactcaatagagcagaagaatactcaccggagtcacaagcggcgatgatagacgacggcggcgactattcaaggaggcaccgatttggtggtgaaggttttaggcttctggaggagtttcgaggtttcagtgaaggtttactcatgtgttggatcgggtcattaccagacgggtcgggtcttcattgggtcatgaagttaaatgtgtaaatgttaaaaagcccataagtcagatttttcattttgccaaaaagaataaaagatattaattatttgggccttgtgggcttatttcattatcttcgtttagtcaggcctcttctatacgtataggctctagagtttagtcaagcctgtaaacctaataagcccatcaggtgatgaaggctcatgggatgagaggcatctatagctttggtaagaacttgcaaaactgtgaacgagagttcaaaactgtaacaagtcacatgtgtactgttgtattctagattacatggcttcttgatcttgacctcatcaaatgaacaagaacattcacatgcatttgattgggtttttatggtgggttgggagaagaaattcgaaaaactttttgttacaatgatatttttgaacatagaaatttattggtgatgttccgacatgttatgggcgtaaggctacttgttcccactatgtacatggcatcttctattgccacccaccaaaacccaacaatttttttcttggacaaaaccaacgttttcttatatttttatatagttctctatttgtttcttaaaaaaaaaaaacagcaatgagttacaaatctatttttttttcaatcaagagaacatagttaaccaataataataaagtctaacatatattcaaaataattatttacaggttatcatgcgatttaaaatttaaagctttgaatggtaacccattatcaaaacagtacagtttgtacagctttgacaattaccatttacaaaaactttatcaaaagcgttacgaaaagctttactctcagctttttgatacaatttttttttacagctcttttgtacagttttacattattccgtaacagctaaagttttgtgttaccaatcaaactctaagactttttgttgtattctactcaaattccacctttttttttttcctaaaaattaagttttttcattaaacccatatcctcttttagtccaaaaccagcatttaataacacttgttaaaacgtaagttttttcttctgttttcagttttgtcacctaaatcttttatatttaccatgttgcttaatattttttagatttgccatttttatcatgattggctagtgcctactctaaaggtagtatgcacaaacaataaagtgtctatcacatcgtgtaatttgtatttgtataccaattagaaaaggctactagataatatttggtagcagtttgaataagcgaaactactctcatgagaacagagattggttaagtaatacattttaaaatttgtatattttgttaaaaactttacgtgagtaaccatatataatatagaacaacctaccgttaattaaccttcacacccttaaattatgtgatactacttaccaatctcacattcattataattctcttattgtggatacgtacgtatattagtggcatttctatatatatcatatagaagtggagtccatgtacagataagctagtaaacaactacgtattatgagttgtgacgtatatccaatcaaataccccacaagcgtagaaagcgctattaggcatgagaagccatttacgtttctttcgtatgtgtgacccaaaaactttctcttatcttctaactttcttttgaccaaaataaaatgcgaagatgacttaagataaagcataaaagaatctgcatttggatacacaactttatattcaaaagaaaccttatggaaagataaatatacatgtacgtctaatataccgaccaaatacaactctatgtcggcttagtttttggatggacatcagacagtttttatcgatggtggactttccaccggtaccaatttttctctatataaattatattgtatataaccaacactaaaaataaaaattagataaaaacacactataaaaataaataatcagtttcagacttctagtgaatttatgtaataaatataaccaatattggtctaaataatttataataacataaactaatattcgagactatatggttcattcgtaactaaattgttttttgcatgcaatattgttacgttgtaaagtttgaatcatgattcttattgacatcatttcaaacatgattgtcttaataaaatttagaacgcttctgtatatcggttgcagtcactcaaatattagaaataactacttgtattatatgtttatctagttagttatattggttttctatgtcttctttgttgagttttcaatcattgaaacatcttagcatattatgatctaccgtacaaaagcaatgaaaggttattaactaatacaggttagtggagaaatatatatagagaataataataattaagtaataatgagaagcaaaaaagggtaatgagacacgacgcaatataatgctaaataaatttcaatgagattaggtcgtgactcgtgagggaccattttcgcattcataacctcaaaaggctttacgtttttttttgttttagtcttattattattcaaattaaatgccttaacgtggctgcccttttcacttctcttcgccacatcttttctcacttataaagtgtcattaaatacgagtgtgttagattttgctgtgttttttttctttctttaaactaatttttttttaggtttagataattaggttcataactttctaggtctgatgactacaaaaggttagtttagtcgtcctctccagtacttaacctttgctgatttgtattcaaatctagtaaaatgtacgtgtgaactataaatcattaatattgttttgtggtaatatagttcttgtgtcatcattcgaattcaaatccacatactaaatgttgttgatagaaaaaacactactcaacaaaattagtagtctaacagtttgttctagtgcatgttatccttctactaacatttgagttttatttcgatgaaatgtatatttccaaaaaaagaagaagttatatctcaactagacatacaaaaactaattctaaataggcatggacaaattatccaaattaaattggaccaaactcatctgattcgaaaacacttttttcattaccatttttgttttgggttaagaagtatcatctgactaactcgatctaccaaaactaaaaaattcaaatttgattaacaaattgacgccaactttaaaattttgactcttaagattttagtatttaatcaactttcattaaaagtaaaactgaaacttagtagaattaatcaaatttatatcgaaattgaactagctagtatctatactagttttctcaaaatagccataataactaaataatatataacctgaattattagaacaccataaaattgatatcctttatataattaaagagagttattatgcttatgtggcaagcctataagttttctcaagatttttatttatttaaatctactattacatttgtcaaacacattttcttatcctcattttctttaacccacttaccaaacacacctaaatttcttccaatatatagagttatcaaattttgaattttttttcaactttccttattattactaaattaattatttcaaatttctatatattaaatgcttagattttgtttaatgcacattaattagaatataaatcattcaattatatgacctaaattaacaaagtttaatactagaaaaaacagtagtctacttttttttttggtaagaacattagtttacttttaaaacattcttttatttttttcccttcaacaaacatccattctaaaacattacaaccaaaataaaatgtcatagtaaacaaaaagatataaacctaactataaacaaactattctggtaaaataattatcttttatatatatacttatatttatattttatatattttacaattgagaaaactatacttaaaattttataggttaagatcggcccatgcataacatttgctcttaccaagtattttggttttaattcggtcttctttaaaatacctgaaccaaaacaaacagaatttattttggtttaaattcggattcttattttaattatactttaaatccgaattatccaaaccgatcctttatgaatatcctaatggtaggcctaattcaattgttgtaaatacaatttggcatcagtccaaagctttagcttaatttgttcctctatcccaatcactcactctccagcagctattccattggctgtaacacatacacaacaacaccaaatcataataaaaataaaaatcattcattagttaccaaaaactatcaatatttttttattttatcccttcttcttctctcagcaacggttcttacttgaagtagatcgagagaacgaacttgtctttcccaaatttcttcactttcaaatttctgttatcaaagaatctttagagatttttccgggatctttctttttttttttctttctctgtcaaaattttcgttataaagtttttgtattgattcactcttttaactctccgattccatttctcttttttttttcccaatctgcaatctccattagattccccagtcacattatcttgtctttttcgaaattttctcgaggaaagtttgatactttcgaggaaagtcatgagcttttgaacaaaagaaactgtttggacttccgttactatctccggcggtttctgaaaaaacttcaatgattcgttgaataagtagcttactttaagggttttgtgttatcttcatctctctctcagtgatgggttgtgcttattccaaaacttgcattggtcagatttgtgctacgaaagagaatagtatcaggcaaacgcatcaacaagctccgtccagaggtggcacgagagctactgcggcggcggcggcggttgaggaggataatccggtgtttaatttctcttcagatgcggtggatgatgtagataacgacgaaattcatcagcttggtttgagtagagaccaggaatgggggattactcggctttctagggtttcttctcaatttctaccaccagatgggtcaagggttgtcaaggttccgtcttgtaactatgaattgagatgctcgtttttgtctcaaagagggtattatcctgatgctcttgataaggccaatcaagatagtttcgctattcatactccttttgggagtaattcggatgatcatttctttggggtttttgatgggcatggtgagtttggtgctcagtgttctcagtttgtgaagcggaggttgtgtgagaatcttcttagacatggtaggtttcgtgtggatcctgctgaggcttgtaattcggctttcttgaccacgaattctcagttacatgctgatttggtagatgatagtatgagtgggactactgcgattacggttatggttagaggaaggacgatatatgtggcgaatgcaggtgattccagggcggttttagctgagaagagggatggtgatcttgtagctgttgatttgtctattgaccagactccttttagacctgatgagcttgaaagggttaagctttgtggtgctagagttcttactcttgatcagattgaaggcttgaaaaatcctgatgttcagtgttggggtactgaggaagatgatgatggagaccctccgagactttgggtgcctaatggaatgtatcctggaactgcttttaccaggagtattggtgattctattgcagagacaattggtgttgttgctaaccctgagattgctgttgttgagctcacaccggataatcctttctttgtggttgctagtgatggcgtatttgagttcatctctagtcaaacggtggttgacatggtaaggtattcttccctccgcagtcttgtttcatcacagttccctaagtagaggaagaagtctcacaaaatttgaatgtattctttttcaggttgcaaaacataaggatcctcgagatgcttgtgctgcaattgttgctgaatcatataggctatggctacagtatgaaactcggacagatgatataacaatcatcgtcgtgcacattgatggactaaaagatgtaaagaaagcttttggttgttgactgtatatcatcttttcttgtgtttgttaatggctgaggttagatattgaatattttgtaggatgctcctcggcaattgtcgagtacaggaactcaattgcagcctcctattccacaagttgtggagcttacaggttcggaatctccttccacctttggatggaactctaaaaatcaacgtgtgaggcatgatctatctcgagctaggatacgtgccattgagaattcactagagaatggacatgcttgggttcctccatctccagcccacagaaaaacctgggaagaagaagtaagagtgcttgtctgcttcgtatttgctcaaccaatcaggaatgcctcaagtcattcttatattcgaaggctaaatgctggattttctcgtgcaggcacacattgagcgggtgttgcgtgaccatttcctcttcaggaaactcactgattctcagtgccaggttttgttggactgcatgcaaaggcttgaagctaatccaggggatattgttgtgaaacaggtcgaagcatattcctccttgttgcagattctccaacatagattcatcaataaacatatgatatcataatctctctggcttattcttttgcagggtggtgaaggggactgcttctacgttgtgggtagtggagaattcgaggtcttagcaactcaggtttgttctatagtaactcgatttgacttgtgaccagctttgagcattatgatcatgtgcttaaccggggtgaatgttaggatggaaagaacggtgaggtacctaggatcttgcagcgttatacagctgagaaacaatcatcattcggtgaactcgccttaatgtgggttctctgcacttttacttttagaaataatcttcttcaggtgaagacgtactctctgtctaattgagtttcttgtgatatttgatggtgccaggcataacaagccgcttcaggcttctgtacgtgctgtagatcacggaacattgtgggccttaaaaagagaagattttcgaggaattttgatgtctgagttttcaaacttagcatccttgaagcttcttcgttctgtcgatcttctttcccgtcttacaattttgcaactaagccatgttgcagagtctctttccgaagcttgcttttctgatggacaaacaattgttaccaaggtgaagttaattttgctttttgtaaagactaaataactctactccaagagattctttcttacacgtttctgtgcatgtataggaccaaaaacttcagggcctgtatgttatccagaagggacgcgtaaaaatatctttctgtacagaggtgttggagagtcaaaatgtttcaagccttacaactggaatcactaacgagtatgacaatcttgaaatcggaacagaagtctccatagaaaagcatgaaggaagttactttggtgaatgggctcttcttggcgaactcaaagattccttaagtgtggttgcagttggcgaagtggtttgtgtggttttaacaaaagaaaatttcgagtcagcggtcggccctctgaccaatatttcagatgacggtcccaagtatggcattcttcatgcttgtatttgtttatttttgtggttatcgttgactgattccatataatgtttttttttcaggacaagacattcttcattcgagctgtcaaaggaatctgcaaaagttaccgataccacagctcttgctaaagccactcttgcagacctggtaagcaatcttactctacatcaatcttaaaacggtgctcctcaacttacactattttggtttatccaggaatggacaacatgcttgagtacaacagactgtagtgagattgggctcgtgcatttgaaagataaagaaaatttgctcagcttgaaaagattttcaaagcaaaaggtgaaaaagttaggtaaagaggcacaagtattgaaagagcggaatctgatgaagaacgtaataaagccctcagctattgttcccgaaatcttgtgtacttgtgtcgatcaaacatttgcggcaatcttactgaacactactcttgcctgtcctatctcttctctgcttcactctccgcttgacgagtcatctgtccgtttcattaccggctcacttgtgtctgccatagaagacatacacaaggtcaaaactttttctttaacatttctggttattactaagatttcgtggtctgaaactctgtttttttcgtcccgttttggaatttctagaacgagattctcttcagaggttcatcccccgagttactgatgttggatcaatccggatatctacaggtctgtgtttttccgttacatggctctttgggtttttgtataatccattacttccatcagatcgtaattttaatctcttgattgtagattgtagacttcagattcgccaagaaattgtccggggaacgaacatttacaatctgtggaaatgcagattatttagccccagaaattgttcaaggcaaaggccatggttatgcagctgactggtattgatttccctctatttctcttatgttttcttggcttaatatttgaagattcttaccttttttgtttttttgggctgattcaaaaaggtgggctcttggagttttgatctactatatgctagaaggagaaatgccattcgggtcatggagagagagcgagctcgacacgtttcagaagattgcaaaaggccaactaactttccctcgagttctaagctcagaagctgaagatctcatcacaaaggtctcatctttaagttccaatttcacatctattaaaagtagaaatctcctgtttctcattgtcttacccgcatcttcaaaactcttgtgtagttgcttgaagttgatgaaaacctgcggtttggtagccaaggaggtccagaatcaatcaagaaacatccctggttcaatggtcttaaatgggaagctattagtaaccgcgaatttcaagttcctcaagagataatctcgcgaattcatcaccatttggagaatgataacgttctccctctagaaacttctaaatcgcttgacacaacagaagatcaagatgctcaaaactggcttgaagaatggtaagacacttcagacgaaaccgcggctcttttatctccggttctattcaattaaaatttcgatacttttaaacagtcattgatgctaaaaacaagagagcctatgaatcttaagaccttctgattcatgagaaagtttaggatcttttggttgtggtgtaaataggtgtatatgttagataatggctgaagaagatcaatcaccaatcacctccaagttttgtatcctctgacttctttttctgatgggctctgacttttatagaaagagttctctgttttgtggcgccgtagtctaacatgatttcgaccatgcagaaggaatatatatgcactgaaattaataaccatacaaatcatagtaacttggatctgatcatttgtttaagagtggacatataacaaaggaaatgccatcaatctgctaattaaaataatctagcagctttagtggcgtacatgttttctaacttgtaggagtaggcttcacatttttcgttttaatactatttcgacctgtgtgtatcaccatttgcaatctcaaacgtgggtaagtttattagtaaagagttttcttgcaagtctactacaacaaatttcacatgtaaaacatgttggccaaaacccaagtgaccgatcaaatggtccccaaagagtatttgcaaatccggaaccataacgagtttatacataaagtcaaccctaaaagccaggaccattctagttttagttattcaacaaactcttaaaatgcactatgagatttttttttgtaaattgtgttaaaggggaaaaaactatacattaagattttggcgtgtcgtgtttaggtcattacttttctctctgttaacaaaccactgagccgttcttctagcgatcggcagccataaccgccgtcttctttcttccgtggtcgcagtaacggcataattctgcgaagtggacgcggttgaacctctgtagcttcctccaaccgccttttctcttgaaacagtcgtgatctcagaaaccgttcttctggatgagtctttgtgcttaatcaacattcttttcatttccatatcttccttgtcccgcaagttacctctatgcactcgatccaccgacgaaaatctgtcgcttgacaccgaattcagcatttctgatgtcaaaaacgtcaaatcagatgaagtgatattactccagcggttcttaaacacagcatccgaaacaacgatcctgtgattgaacttgtgcataagtttcttctcatcgatgttctcatttccttctcgctcaagcaacaacgatttctttagaatctttcggaaactgctgaatcttgatgacccgtcattagttccttcttcgcgttcaatgtaaatctccaacctcgagtcttcttctcttgtctcagattggttcaagatcctaagactagtgctgctattacccaacacagagaggtcgtcttcaatattgactctgtttctacacaaaggacacgtagcgtgctgctcaagccactggtcaatacaaccaatatgaaaagcgtgtctgcatttaggcaaaagcctaagaatctcaacatcttcgaatttagacaaacaaacagaacattcaagcccttgtttcaatcctttcaaagcagagaatctgaaaaagggaagagattcgattgctttcttgtcaagaccagagaatcttgaagaccgattgaaaagtccttgccagagacgatcatgtcgtattctttctccatcactgtcggtctctgatcggaggtcattgtggaagcatttcgcgtagacgaggagaacaaaggtgagagtgaagacgatggagaaaactccggtgatgatagctaagcttggcttgaaaaggtcgcttgttgcgtatagattaggaggaggaggagattgagcagatacatagtctaagaagatgatgaagaagaagagaatggagatttcttgtggtgaattcattgttttaggatggtgattcgatgagaaaaagacgaaaacaaaaaaagtcgtgtttatgaatttggacagaaagatgtttttagacgcaataatatattatcaacgtgacatcgttattgaatctcattgagaggcatggataattctgtgacaagaaataaaataatacatatgtggaataagttaaactatataactaatacttctataggttctggttggtgattagtttaaggaattattgtgaagaaagtgaaggtgaaagattttttgtcaacagaagaatatgaattgaatatatcgatatttctggaaatatatgtcttgaattttgaattgtggagtaagtaacctttttttttttatgtgaactaccttatatttgttttgaattccttaagtttaaaatttttagtagtcaagttaccgagaatttacatgtttgagtcaattcacttacgaatattaaaagaaaaataatattcatgtattttttattaaaatagataaaagtatccaaaaaaaaaattgaatagtatttaggtgttggtaagaaatttcacttgagtttgtaagcaggattttatgttaagaaatctattaccagcttatgaaggtggattgtatataacttttccaatttctaaaaagctattacacttttgacaatgatgattagactacattatacactagtcaacaaatacatacacaaaatttcattatgcaagtagtttagctagttcatctaccttcaatgttccatgcggcatcacttctctgtaatcttcagcaaactcgtccattttcttcttcgatccctcctccttctcctctctttcccccctctctgcaacttctcttttcccaaaaaccacaacattacttgatttggaagcattcctagaaaccactacattacttgattttgcctccaagtctccgtacccgaattcttggctttcctgcttcttaaccgttggttgttttctcaagccatgctggaaaactggtcctggtgaagctacactcgaaaaggcaacagcttttgaaaagactgtgtctgcgtccagatcagcagcatctaacacaagtgcagtcccgctctccacagcttgtttcatcaaaatcagaactctctctatgctttgtttgctgatctcttccgatgtttctggttcgtcttcaggttcttcaaggtctcgaagaaaactatctaccgttggctcagttacatcttttgtagaccagctctgtaaagaattgattgtgccttccatttccgaggaatctacagttgaagggctcaaatcgtgaccatctggatcattttgcagttccatagaatccagaggagggttctgggtcatagtttgactctgatttggtgacaccgatggttcgtcatcttctggcaaggcagtatcaacttcgatatcttcaaggatatcaccctttttatctggagttgtgagagacgatttccattctcgtcctctccagataagaatctgctcgttttcaaaagatacgagcacacatggaacaagatcctgcaaaacgattcataacccaaccaacaggttcaacaagaggttgtacacaagatttaaaataacaaatctcaagtgaataataattagagtaaaccttgagtttggcaccgattttcctaaaatcactgcctttcatcccttgacaatcgatccgaaccaattcacaaacttcaaatgcttctttaacatttttcacaagatcacaatacacaccattcttccctatatgacccaacacaggacaaagttaacattctccgtcttggaggaaaccatatcaaaattaatagtactattacccagaggtaagctgctagcttacctagcttgcaaatgggcatgagctctcgtcctttcctccgcatattggtagcttcctgacgagttaaaccctcaggcacttgttgaattagccttggataaacaggtgctacaggcttccacaacataagagggaaccgcggtcttgtcctgtggttatagtttctgccacggaataggaaaagcacacctcctcttctatatatcaccttcccaccaattttctcctgccaattcaattcacaacttcatgaagacaattacaaacagatcataaagcatgatgcatccatgcattatccactaatatgaaaagatataatgaaaacagttccaaggagaaacctctaactgctcgcaaacattatccatatcgactgtacaaactcctttgcatttaatcttacaaacccttcgccgcttccatagatcatgtatgttgttcaacatgttatgcgtcaaaccatctctgcctgggaaaagacaacaactttatatcatatcttcttctactctaactctcttctctgagtctatcatttgcaataagaagtagaaccagcacttcaaatgcacctaaacaacaatgtctgagcttccaaagatactaattctgatcatcacaaagaaactattgatctcgtaaagtaaattcaacaaaaagtattgaactttatacccatattcaattgccttgttgtcttcaagcaagaagtaaccagctctctgacctcttcctttgtcaatggctctcctaaaatctcctccttggagtaaacataccttggacctaccccgggtcgaaaaggacccggtttctgcaccggcttcagccctttcttccccacaggaggcaatcgaaaagaatcgaattctctcggcgtcttctgcgactgaggaagcggagcacgaccagtccatggccttcccatagtcgtaggtccaaaaggcgcgtaagcaggctcacgaagcttcaaaggcttaacctttggcgtctccgtgtaactgtacttgaattcgaaaggagctccattgatgacgtaagttaatccatcttcgcttagcttaacctcaggcttagcgtctagttgcggcggcgaatcgggtactctaggtttgttcttgggtctattgggtcctgaatcgggtttggagtatttggatcttcgacccggaatcgaacgagcagagggaagtgaaggagtgcctcttgatctaaacggtgacgttttaggctcagcagctgctgcttcggaatcatgggtatggacgattttagtagcggcgtcgaatcggcggtcccgacggatctcagcctcgagttcttcttggctccggcgacgctgctcgaaccgttcggcattagcgttgccccatctagagaatcggatctcgctgggtgctcttgggttatgattaggaaatagagatggcgcgaaaattggaaaaggagtgttgagttttaacgacattgccggagaaaacagaagaagtcgaaggaagccaaggttttagagagactcatccacagttggtgacttggtgtggaggaggattgaaactatggggacgaatttgtgagaaaaacaaacataatgggtcgcataagcccacctgttttaaagcccatttgttttcaaaccccattattagctgacttcgtaagacaatcagcctggtttaaagcccattggtagcggaggaaaaatatttacatgagaaactttacagtttttttttttttttggcaatactatttatattaaaattatctgaaattgatttttttatatatagtcattagaacaaattcgtttatacataagataataagtatttacgagcccaaactttcttagctaaacaattttaataaatgttatttgcacttatgaacaattgtgtttatttgacgtaactttgtgttaaaatattaatgatttttttttgtttttttatcgcacatttatgtattggcagttatttttttgtgtttcaattttgtttggtggatcggttttgttcggaggagatgacgacatattttttgctacttttggaatctctttttgtttcatatacaataaggagaaataataggtgggactatacagagatattaacgaaatgaccggaatcgttgccgtgtataaactaaccagaatcattgtcgtgtagaaactgaccagaatcgttgccgtgtagaagaatcgcagaatatttcctcctcctctcagtctctgcggcatcgtttcgttaaagttgacagacggaggagaacatcaatagaagaacaaaaatcttcaaactatcgtcgattaaaagcaaatcgaagattagataaacaataatttgaagatttcgatgaaacatgtaaatatggtaaacaatatcattaaccaaaatgcatatttttcatagatttttattttctccctaattattttttggtaaaaatttatatgaatccttgctttttgattttcttaattatcaagacagtaaaattgtcacttaacaaatttgatctacagatcactttcatcaatttggttttaaaaacagtggtaaaaaatattgatgatgcaatgtctacatatatgttcatttgtcttttagaagttgttttattctttataaggaatttgaaaaagattatacaactcatcgagagacttcacgagttgaatcttttcagttttcaatattatgatctcatgtaaattcctccccgatgtaattttttctttcatccccatgtgttttctagacttacaggagatttgttccaagcacgtaaacacaattggcaaaaacaggttcggtcactaggccaaatgcagattcttttactagttggctttagggacctagttcgaatacgaaatctgatatcaaaaaatagttttggtgattcatatataatataataagtactactgtttacgtaaaattgaagaattcaaatgatctcattcaatccaatgattatattttgtcttgtataattctttaattatggttatttgaaaatgaaggaacaaatatattgattagaagaataattaaacaatggtcaacaacggcctcaccacatgataatattaaagaatatctcgtagtacttgaccaaaaaaaataaaaatagcttaaatgtatttagttgaatcggtacttggtattgccgtgtgtgggaaagaaatgttgtcaatgctaaataaatttgccgtgtgaaaaattcaatcaatatgaactctagaacccataatggtagaaagtcttcgactcttggcagagaacaaaacaactattgaaattgtcttcaaataacaacattatcgaaaacttttcaactctagatctagtaacatccaaaggatatgatgctacataggtcttctagttcgaatcacaaagcttgctccaaatcacaaacttacgcatctcagtctccaacttagcggattaacaaaaacttaatttataggtcaaatatcaatttgcaattaaatgaaaacatatttgatctcttccaaatttgagttaattttgatttcccattataacatttagacattaatgagggctggacaaaatattcgttcgatccgcttcgattcggtattcgatttgatttgattcgaaaaattcgaatatccgtaagattttggaccaaatcaaatagaaaaatgtagtattcgtaaaaaccgaagcaaataacaaataatgtttttaagataatcgaatatccgcttcgatccgtatctatcgatatatatttaaatatatagttatatctatatatagatatcataaatagtttatgtattgttgctatcttatatttttatgttaaaatatttatttgatcatttttctctcatgttatatcttgatcaataacatcttaaactatcgggttttagtttttggaattagtttgataacattttgttgaccggtgataataacaacggttatgtttggtatttagaacttattttgtaagcatgttaaataataactttaaatatattatatggttatatagtttacaaatttttttaatatttatatgtatcaaagcggatatccgcaaatatcacaaaaaaatccggatattcgaaatttcggatatctagaaattttcgaatcaaagcaaataacaaaattaagtattcggttaaaacgaatcgaataacaaatatcacaatttttctggatatccgcttggtgcccagacatattcacaatccctaatctctcttctactattgattaaattttcttctcctgaaaaatatacaaataaaataaaaacatgtgcatttggtaccaaagacaacacctttctcaagtcttctctttcatttttttgttgtcgccgtctggttttactttttttctttcttcaaaatcattcattctttaacatcaagcaagaatcaaattctgggcatactcaaattcttcatctttttaatatatatttttgccaagaacaagtcttttactttatctctgcagtttttgtttgctcctttgtgcatttggtgatgattcaatcaatgattgtctcttacctttgatctaatcgtttccgcaaaattctcttctcgttttttctgatttcaagctcaacaatctcaaaataatcaatttttggtagtgtgttaaatctgagaagggtttttgggttttgggtataaagcttgttactttgatctttattttgtgaattcgaagtggaaatggaatcgttaccatctccatttggcgatccagctcctaatttatccaattcggagctccgagaaactgcttacgagatcttagtcgctgcttgccgtagcactggaagtcgtccgctgacttacatccctcaatcgccgaaatctgatcggagcaacggtctgacgacggcgtcgttatctccgtctccgtcgcttcatagatctctgacttctacagctgcgagtaaggtgaagaaggcgttagggatgaagaaacgaatcggagacggagacggaggagcgggagaatcgtcgagtcaaccggatcggagcaagaaatccgtcacggtgggtgagttggttcgggtacaaatgcgaatctcggagcagattgattcaaggattcgtagagctcttctcaggatcgcttctggtcaggtacgttcattttagtaaattgagaaatatctgtttgaatttgaggtttaagagaattttgtgattttgattttagcttgggaggcgtgtggagatgatggtgctacctcttgagcttctgcaacagcttaaagcttcagattttccagaccaagaagagtatgaatcatggcagagaaggaacttgaagcttcttgaagctggtttgatattatatccttgtgtgccgctaagtaaatcagataaatctgttcaacagcttaagcagattatccggtccggtctcgagaggccgttagataccgggaagattacgggggagacgcagaatcttaggagtttagtaatgtctcttgctagtcggcagaacaacaatgggattggttctgagacttgtcattgggctgatgggtttccactgaatcttagaatctatcagatgcttttagagtcttgttttgatgtgaacgatgagttgctgattgttgaagaggtagatgaagttttggagcttataaagaaaacatggcctgtcttggggataaatcagatgattcacaatgtttgctttctctgggtgttggttaatcggtatgtttcaaccgggcaagtggagaatgacttgcttgtggctgctcataacttgatactcgaaattgagaacgacgcaatggagacaaatgatcctgagtattccaagatcttgagttctgttttgagtttggtgatggattggggtgagaagagacttcttgcttaccatgatactttcaacattgataacgttgagacgctggaaactacggtttctttggggattttggtagctaaggtactaggtgaagatatttctagcgaatatagaaggaaaaagaagcatgtcgattcagggcgtgatcgagttgatacctatatcaggtcttcgttgcgtatggcttttcaacaggttcgtttatatttctttttctgttgatctgatttcgtatctgcagccatttatgtagctttattgttttttgtttgtaatagacaaagaggatggtggaacatagcaagaaatcaaaatcccggcagagcacgaataatcttcctgctcttgcgattcttgcagaggatattggtcatttagcttttaatgagaaggcgatatttagtccaatcttgaagaattggcacccgcttgcagctggtgtggctgcagctacgcttcattcgtgctatggtaccgagttgaagaaattcgtctcgggtattactgagttgacgccagatgctattagagtactcactgctgcagataagcttgagaaggatctggtgcaaattgctgtacaagatgcagtagatagtgaagatggtggaaaatcggttataagagagatgcctccttttgaagcagaagtcgttattggtaaccttgtgaaatcgtggatcaagatccgagttgataggctaaaagagtggatcgaccggaatctccagcaagaggtatataacaactttaaagatctttcctggtttttgttccttttaagagttttattcatatattgattggttttgtaactttctattgtaggtatggaatccgagatcgaataaactcggtatcgctccttctgctgtggatgtactgaggatggtagatgagacattggaagcgtttttcttgttgccgattcttttgcatccagttttacttcctgagctaacgtcaggactagacaagtgtatgcagcattatgtatcaaaggcgaaatcatcctgcggtaagcagttgattgtttagtttttggaataaaaaagctcacgctttgttcatttcacttatggagtttctggttttgtttttatatggtttctattaggctcgcggaatacgtttctacccgttttgcctgctttaacaagatgcacggtcgggtccagactacatggtgtattcaagaaaaaggagaagccaatggtagcttctcacaggagaaaatcacagctggggacgggtaatgactcggcggaaatacttcagttctgttgcaggatcaacactctgcagtatatcaggacagagatcgaatcatctgggagaaaaacattgaatcgtctcccggaatccgaagttgcagctttggatgctaaaggtaaaatatttgaacagtcgattagttattgctcgaaaggaatacagcaattgtctgaagcaactgcttacaagatcgtcttccacgatctgagcaatgttctctgggatggtctgtacctcggggaagttccttcctcaaggattgagccgtttcttcaagagctcgaacggtgccttgagattatctcctcatcggttcatgacagagtccgaaccagagtcatttcggacatcatgagagcttctttcgacgggttcttattggtcctccttgcaggtggaccatcgcgtggcttcacaattcaagactctgctgccgtagaagaggatttcaagtttctatgcgatcttttctggtcaaacggagacggattgcctttggatttgatcgagaaggtttcgacgactgtcaagagtatacttccgctgctgcgcacggatacagattctttgattgaacggtttaaagcagtgtgtctggagaatcatggttctgacagagggaagcttccgttaccgccgacttctggtccgtggagtccgacagaaccaaacacacttttaagagtattgtgttaccgttacgatgaacctgcgactaagtttctgaaaaagacctataacttgccgaggaagctaacctgagagtgacctacttactacattggtacaaaacccggtttagtttgaagtgtggaatatattttggttaaagcggctagcgattggtatttggcaaattaaattacttgtacaagaaagtagaaacgttttagtgaaatattcttcttttgtactaatcaaaagcttgtgggctttgttatatgttgtcaactgttataaatttgtatatttaatacctttgtttttcatctttctttttcaaatttatcagatttctgattgataattcaagattgcaacgatggttcatgaaatggtcctttaaaaactcataatgtttatgtgatggataacatcagatatatgatgatatggttgaaacttgaagtattctaacttgaagtcatgattcatgatccgtttaacaacgtttgaaatgagtatcagaaaatgattatcgtagatatgaaacttttcctgcagacacgttctagtattttgctaaaataatagtttgttgcttattcaaccaaacaaaaacacttgttcaagtagcgcaatatcttcgatagttcgattcattattatgatacccttcttcgacttctttgatttcctcgagttcttctccatacgtcacatgactcacatcgtcagcgatttcatggcaatgttacatgtggtggacgacatggagtatccgcgaccgcgagatgatcttgaagaggtgtttgctttatgaatgacgatgaatcggctctgttttcctgtttccaacggttgtaatcacaccatcatcgttgtcttcatctatactaatattcaaatggtcaattataaagcccaataagctaactaagcccaaaaatgaaaacacacggactcagcccatacaaattttaacacttaaggctaatgggtctgtcacgtgcggaatagactgaaaacagagcatcgcacgtgccgcatcaaaatttgaaatcacgacgacttcaaaaaaatcccaaatggtaagaaaaaaataaaaagttgcagaaaaaacagaaaaccctcttttctctctcttctctctctctcgaggaagaaaggcaacaactatggaagctatgcttgtggactgtgtaaacaacagtcttcgtcattttgtctacaaaaatgctattttcatgtgcgagcgtctctgcgctgagtttccttctgaggtaatcaccctcttctttcactctctctctctgattttacctctctaattcaaattctgtaaatcgaagctcttggaatggtaaatttgatatttttgggtttgtaattcctctgggtatctatgaattcgtcgaaagtgcgtctctttttggatttggaattcgatagcttcactgtgttcttcgagattgattttggtttcttaccttttagccctttgttttcaagatccgtgtgttcaattaggagatgaattcgtgttcttttctctctcttgttgaatttgttttctctagtagctgtgctcaatgctcattactgatttggtctttggaaaatttgcattttgagggttaatgacttttgtccatatatgtgatctcaagtttaagtatttattatccttggaacttagctatgagtcaactgttagaggaatgtctctgggattatctcaagctttgttaaaatttgggttaatacagcttcaatagtagttgagaaagtattcattcattcagcctttggtctggaatattttcaacattcgtagtggttgtccagtttctagcttcagttagtagaaatcatgtcaataaatgattggcctttttgtttgatcactttctgaattttcctcttatataggttaatttgcagctattagccaccagctacctgcagaataatcaagcttacagtgcatatcatctgctaaagggtgcgtggcattgtttcttgacttgttgcttgttagccttttagtcagaattttgcaccttcttttgttaggtcgttttgattatctttgtatatatattttttttttgttatgtaaaggaacacaaatggctcagtcccgatacttgttcgcattatcatgcttccagatggaccttctcaatgaagctgaatctgcactctgccctgttaatgaacctggtgcggaggtatttaatgttctctggtattttgcctttattcgcttactgaatgtcattttacaaaaacagtgtgtcagtttctggaccttatttattgatttagttcagtgaagataacaacatgcttctgattattgtgcagatcccaaatggtgcagcaggccattaccttcttggacttatttacaagtacgttttttgttctgtctatgcattttttcttgattctgaatggcttagatgagatgattcctcatatataacagtgaccttttaggtatactgatagaaggaagaatgctgctcaacaatttaaacagtccttgacaatagaccctctactttgggctgcatatgaggaattatgtatattaggtgaacataatccgttttctgcatacttcacagatatgttatggttctcttacacttttctgtctgctcaactttcaggtgctgctgaggaagcaactgcagtttttggtgaaacagctgctctctccattcaaaagcagtatatgcaacaactgtcaacttccctcggcttaaacacttacaacgaggaacgtaattcaacttctactaaaaacacgagttctgaagattatagtccaaggcagtctaaacacacacaaagccatggccttaaagatatctccggaaatttccattctcatggagttaatggaggtgtttcgaacatgtcattctataatacgccttcgccagtggctgcacaggtaatgtcacacaattgtcgtactgcttttttatgtaatacaactatatctccatctgttgatcacacattctgtagtacttaggagatttgtgcatcatgggtgttgatttcacagcgtttgtatctgttttttctatatctgttatgccaaaagaatgggttgtctattcttttgactattaaaaatggggtcttcattatgttttagtgtctttggtttggcttgttaattttatcaacctttttagttatctgaataataacagctgtaagtaaatgcttttttgtatttttgaaattgtagctatccggtatagctccaccaccacttttccggaattttcagccagctgttgcaaacccaaactcccttattactgacagttctccaaagtccactgttaactctactcttcaagcacctagaagaaagtttgtagatgaaggaaagttacgtaaggtaggattcacataatcacatatctctacttgacatcatcaaatcataattttgaattattggtctttctctgtaatagtctatttcgtactcgggatgaaattttctataccaactttcttaccgtgagtgcatgtctcttatgtttgcagatttctggcagactattttctgattctggtccacgacggagttcaagactgtctgctgattcaggggcaaacattaattcaagtgttgcaacagtaagcggaaatgtgaacaacgcttccaagtatttgggaggttctaaattgagttctttggcacttcgttctgtaacacttcggaagggacactcctgggcaaatgaaaacatggatgaaggttgtgacattccatgcactataccactatattgtttgaaatctgcccttgtgtgactattgttatcatgccttctatttttggtgtctgcatatttgtaataccgtcattctgatgggtttaggggtccgtggggaaccttttgatgattcaaggcctaatactgcctcaacgactggttctatggcttccaatgatcaagaagacgaaacaatgtcgattggtggcatagcaatgagttctcaaacaatcacaattggtgtttcggaaattttaaacctccttaggacactcggagaagggtgtagactttcatacatgtacaggtgtcaggtaggcatattattgttctcgtgaattatgcaagtgaggtgaacctatataggcttatctcattgtctccttctgcttctgggtcgttcaggaggcactggatacgtatatgaaacttccacataagcattataatacaggatgggttctttcccaggtaactagtgactctttctcttttaggctgccatatatggatatagcctgaatcagttttactctagtggcctgtgatagttattgttgaaaggtttatatacacatactatggctattaaatgtaggtcgggaaagcatactttgaactaattgactatttagaggctgaaaaggcattccgtcttgcccgtctggcttctccttattgcttagaaggaatggatatatactctacggtcctctatgtaagtgtattatcctggtttctaaacatgcaatctcggatgagtgcggaaagaaatcacatttatgtaaatttttcatcagcaagatatgatatttatttgcagcatttgaaggaagacatgaagctgagttacttggctcaggaactaatatcaaccgatcgcttagctcctcaatcttggtattttttgtcgaagttgtttttctgattaacgttttcatttattgttggtaataagagaaataagcaatcaattatgtaggtgtgctatgggaaattgctatagcttgcaaaaggaccatgagaccgcactgaagaatttcctacgagctgttcaactgaatccaagatttgcatatgcacataccttatgtggccacgagtaagagagcctctatccatttgactttgtcttgcacaatgtgcttaaaattatctggttattggtctaattgacactttctatctttactgtctctgtagatacacaactcttgaggattttgagaacggaatgaaaagttaccaaaacgcacttcgtgtagatacaagacactacaacgcatggtacgggcttggaatgatatatctacgccaagagaagttagagttctcagagcatcacttcagaatggctttcctaataaacccgagttcctctgttataatgtcttatttagggacatctttgcatgccttgaaggttatcttattactttcatcttatcaggtctacaagaaaaacaatctttgaagaatgactaaatgcttcttcttgttttgtgttaatagagaagtgaggaagcactagagataatggagcaagccatagtagcagatagaaaaaaccctcttccaatgtaccagaaagctaacatacttgtctgcttagaaagattagatgaagctctagaagttcttgaggagctcaaagagtatgcgccttcagagagcagcgtttacgctttaatgggcaggatctataagcggcgaaacatgcacgataaagccatgcttcatttcggtctagctttagatatgaaaccgcctgcaactgacgttgctgcaataaaggttcgagtctttaaaacagagtcgtccaatgatggtttttaaatctgaaaattcaaggattcatagcttaaactggttattattgtctgaaacaggctgcaatggagaaattgcatgttccagatgagatcgatgagagcccgtgaaaccatagctactccaagaaccttgggtatgaattaatgtgagaccgttgctgctccacgaaccatgggtatgaattatttagtgcaaagcctacctcttttagggaactagttgggtttgaatgtagttttgttaccaaaccgtaacacagccacaagagcccacatgacttgagtatgtatcatgagttgatctgtatgttgtccgtaacactacctaatcgcaatatatgatttttccacatctacatatacattttaccacttaaaccttgttcatcaaaagataatttatttcgttagtttttaaaccttgattcaaacttatatctttattttccaagaaatatctaacaatattgatcgactgagatataatcaaaagatacggcttcgaccacatactgtacatggtttaaattaacttgtacacaaaaaagtctttttatgattcatctttgttttcaaattgaagaattccctaagtaatatattttgtttttattaaatgaagcagggacacacagacacagtatagtaaagtaatcagcgaatatttttaccataaaagtaaaaatttaacaatttaaaaaaaaaaaaaaaaagtcaacaattattctcccaaaatgaagctgagaacaaatcacggatgttgaatatataattcacgtgaattataatctcatgatgattatagaaattttacgtaatttacgagatttgcactcaaaaatgaagaagaagaaaaacgtaacttgcgagacttttgatacgtataattctataattatatgatttttttttcttccgaacaatcataactcgactttcggtgggattaacgaacgtcactgattctgacttttgtggttatttgcctcagtttatatcgtttgaaaagtaacggcgacgactaccagtaaacatttacgacaaatcctatgattgcctttgcttttataactttctttttttctatattatatgtttaatcctaaagtttgttttggactctttcatacatatgtttataattgcttatcatgttataaccggatttcataaaactagggatagtacacaattaattaagatcgctatacttttgttttctagttaaagaaagtacatacaaaagtgccttctaacccatgttatatgaacttgtatatgtcaagggtaaactatatcttaatctagtttgtctgtgggatcaaatcttaatttatagatgctcttgaaatcactttttcttgtacgtcgaagaacaattgatttttgtaaaacatacactttggaaatgcatatgcattcgaattgaaccattgcttttgtttgctattgtcaatctaaagtgtgaaaagcttggagattgtaaagttgacgctaaaactgtaattttgtattgagttatggtcttattgaatgagatgtattattgatagtgatattctgtttatatacaagagtaatcggaggactaattagatcaattagatgagttttcttgatctgtagaatatcaagtttccttattctatcaatttcttgtcctggatttacactatgtaaagagtttttcaacattaggaaagtgaaaagaataagatataaaacgttccaaactccgtaaccccaccaaagcaacttctataaatacgttagccaagaaaatgctttcttttacgacacaataagttccaaaacaattaaccacacaaatacaaaatgaatgaaatgtcgttctttggttatagtttcatcgtagtagcattattcttcgatttaactcaagcctatcgtcacactcccgctcaaccgccaaaagcaaacgcaaacggtgatgtcaaaccgcaagaaacgctcgtggttcacaacaaggcccgagccatggtcggagtcggaccaatggtgtggaacgaaactcttgcgacctatgcacagagctacgcacatgaacgagccagagactgtgccatgaagcattccttgggaccattcggcgagaatctagccgcgggttggggaacgatgagcggtccggtagcaactgagtattggatgacggagaaggaaaattacgattatgatagtaacacgtgtggtggtgatggtgtgtgtggacactacactcagatcgtgtggcgtgactcggttcgacttggttgtgcctccgtgagatgtaagaatgatgagtatatttgggtgatttgtagctatgatcctccggggaattacatcggtcaacgtccatattagtgattggattttattatactgaatcaacaagattactatatatggtaattaatgtgatttaagaaaaattcatactataacattttgtgtccttaaatgataaaagcatatataaatgcacactagtttttttaccatcaatgtgagatatgtttccatgatatatcaaagttgttgatttgattataatcgacttcagaattcttacaaattttttctttcatttcgctctacagcaaaagaaaacatggacagtttaagattgaataacagaaaaaccctagaacaaaatagaacattttcaaaatatgtgaaatatctttaatacagtatatagcactttaattcaatatacaaaacatataagatttaaagttttttttttttgccaaactttaaagttgaatttttattaataatatttttagaaaaggaaagaaaagaatttccatataaagacagtttcaaaagttgaatctcgtgttgggagatttaaaggaccctcctaaagagctatattggacttctaaacgataccactactttcctaaagttgttgttttgtttgattaacccaaaactctaagagaatatttctttctcggtgggtggaaatatcgttaccctacatttatctcaaccatgaataatcaatctcaccgacattgagtatctacttatgaatcgagttatatatagttcacgtgcgtagtatgtttctctttactgagtttattaaattgatcaaaaccatattgttagaggtatttatcggtttcggttaagattgttctttattattacaaagcgttgtacgttttctcacgggtgtgctaaaagttccaattcgttagagaacgtacttaaactcgtaatttttttttatttttttttcttgattatcttccactccaaatccaaaggaaagatcgatataagttcaattacgtaagaagtttttaggcataaggtttaattcgagtccgtgactgacaaattgtttcttttttttatatatactattttatcaaatatttactatttatttaatatataaacatacatgtcaaagaccaatcagatccagtcaattactagaacattttttttttggtctaatgttaaattcagttactagaaaccatttgactactaagcatatttttttactctacattacaaaatattatcccacaatgatcttcagaaatggtttacatacgtcgaacaaatatcacgggtgttaaatgaaactcacgagagttaatagagattatatatatacgcgtacgtaactaagaagactaatcaaaattccgattggagattaacgaacgtttttcactttgactttcttaattaattaattatttaccagaatttcgttaaaggatttgtaaggaaacatctaattagtgtgtctcagagagcaaaattcttcttaatacgaaaatagtgtctaaaaatagatttctgttactgaacaatctttatgggaatacattagtgatgaagtagaatattttttttagtgataacttaatgataaatatcttttgttactctaaaattagaatctcatcctaatttctgttaatttaagcaatttcgaagagcaatatataggttttactatttgataatttaacaaaaagaaaaacaacttcgtcttctttttttggtttaatggtgaatattgaaaacttaaaaatagtcacgaagctcttgttttgtttgaggcttacaaaaggagatgaaaacccatcagaaaaggaatctgataagtcctcacgaaaacatagttagttccaaaccaattctacaacaaaaacaaaagagagaaaatgtctttttcaggttatagcttcatcgtactaacattattgtccatcgtcttaactcaaatctatggtttgagaagctttagccgaatggacgatctccaaccggcagaaacactagcggttcacaaccagattcgagctgcggtcggggttgctccattggtgtaggaccaaaaacttgctgcccatgcacagaggtacgctaacgtacgttcccaagactgcgccatgaaatattccaccgacggaacgtacggagagaatatagccgccgggtgggtccaacctatggacaccatgagcggtccgatcgcaacaaagttttggtttacggagaagccttattacaattatgccaccaacaaatgcagtgaaccgtgtgggcattatactcagattgtggctaatcaatcgacacaccttggttgtggtacggttaggtgttttaagaatgagtatgtttgggtcgtatgtaactatgctcctaggccgatgggtgatgctaatactcgtccgtactgatcaatacggtataatgtgactaaatagaaaattaagataatgggtaatagacacgattatatgcgacatgggtttgcagtttagtagtttgtattagtacattgttgatgtttcaatatttggattcaactataaaagaatgcgtgttttgagttgaaagaaataataacatgtaatattgattctttttggaagactttacaaatgtgttttgagttggactgcctaaaaatgattaaaaacaaactaaaatggaaaaagagggatagaatatggaaacgcctagctagaagaaagaaaaaaaggtttcttttgttatggtttgattatcagaaaatatttcggcaagacatctcgtttgtatatgtcatcctgagattatcctagtcatattatgttaggttgctcgtcaacaaacaaaacagtcgcaaatttaacaaaatctacgtttatggacggattgtttttttgtttcctaggtagatttactaaacttaataattatgtaatgtaaataagatgtttatagctttgttggtaactgttaccccatgctaatcttaaccttctgaggtttgatcctcgatatgtgcttcttttttattttatttttgggtgaacgacatgtgttcccctaacaagtttcatatatgaccatatctacacagatttcagatctcgtttccagtccacatgaaacgaaagttaaactccagtttccccctaaaacgaaagttaaagatctcggtccccatattttttaatttcgttgtttattattggtttactgtaccggaaacaacattaaccgataaataaaaacttcaaaaccggatttacccataaaccaacccgaattagtacccgttaacccccaaagttccccaattctaaaaatctccaattctagaaatccctaaagcaacaaaaaccctagaaacctaatgaagaaaaaaggttagaaataatcagttttaatcttcaaaaaattgacaattcggttaaacaaagtgatgcttttacattttttcaaaagtaatttgactaaagaaactaagtgtcagaattcagaaaaacaaatttatttagaaaactcaaaatgattggctttaatctttctctcgtacgtcaacgaagacgaaactcttgtgttcatcttctttatatattcaccattagctctaatccaagtcagatccaacacatacacgataaattccaaaagcactgcttggttttcttcacaccaagtaggttcgtacgggtaagatcttgacatagtccaaggccagagaattccaattccaaatccgtctaaaacctgaaaatcctttgttatagcttatattcatcgaaggtaagcaaaagagatttgggtcatcatgatttttttgctatgtttgtcaatcgtattcatattagagctctgacttatgttgaagattgaagaaaacagacgttgaagagatgaaatcgaaactacggttctaagatttttcaatttggggatttttctcattcgtatttatttgggtatttcggattgtcaatgactcgaatcggatatacattcggtttaatcgactgggtttctgattttgcatcagatcggtacaataaaccaatgataaaccacgaaattagaaaatatggggactgaggtctttaactttcgttttagggggaacctggagtttaactttcgtttcatgtggactggaaacgaggtccgaaatctgtgtagatatggtcgtatatgaaacttgttagggagacacaggtcgttcacccctttttttagttaactactgattttgtgttctattcaaaaatatgttctagatccgccactgcttccgtattcttattttttttttgcaatagtacgtagtcaaaaggtttaaatttcatgaaaattaacccacatttttttgtctaaataaatatttacatttttaacacaaaaaaaaaagtctgaagtagggacacatgattttactaagaaagaaatcatcgaaccttttatgatccaatactaaaagagtaaagagtcaacaattactctccgaaaatgaaggtgagaacaaatcacgggtcttgattcttaaataaaattcatgtgagttataatattacaaagacttagagggattatacgttacttaaatggcttgttgatacatcttttcttacgagcaatcaaatctcgatttccgcggaattagcgatcatgtttctcgtcactaattctgacttttgtggttaattacctgaatttccgagtaagcatttacaacaattttctgattttgtctttactcttttagtataaattttcttttggagtaaatgttgatgtcctaaagtagtttttgggaccttttcatacacataggttaattaatatattacagtagtattaaattaaatgctgtacatgttaatggactaacgaccatgtacacctagctagtgatttaatttgtgttagtgttgaaaatatgtacgacaacggacaactagatttttttccatgcaaaataatgataagaatgaattgactagtgtctgattagagtcggctcaaagccaaactgctgaaacttgggtttggggtgctaggtggtttataattgttttggccacatttttcatgtggactcattggatcaattggtgttagtatacaaaatcactcagtgtgtaacaaaaagtttaggtgaatccgtaaagacaagtcttatcattttctgtatattactactcatcattcaaagctttgatttgatttgatttttttgataaacctttttttttaagaaaaaagaaaaagaaaactaataaatcacaaatctataaaattttgggattttttcctataaatctataaagtcatagaactaacaaaatatatatctataaagtcataaaatgcacttgatctctttttttttttttgctatcatattttcttttgttaattctgaaattcaagatttaatactaaaattagaatttattctagatttatattatttttaagggatttctaagattattgtgtgagattatgtgagattgactaatgaatagaagaaagataaaccttccaaattcggctgtaccttaccgaaaaatagttgcagagcctttcttaattattattctaggcctacaaaaggaggaagaacaatcagaatagagatcactgcagaaccataagtccaaaacattttacaaaaccacaacaaaatgtcctcttttcgttatactttcgtcctactgacattactctctgttttgttaactcgagcgtatggtctacctagggtaagaccaatcaaagatgtccaaccgagaaaaacgctaaaggttcacaaccagatccgagccgcggtcggggtggctccactgaagtggaacaaaaccgtagcggcctatgcacagaaatttgcaaatagacaagctaaagccggagtctgcgactacagctccatgagacattctgatggaccttacggcgagaatatcgccgcgggatgggtccaacctaaggaccaaatgagcggtccgatagcggcaaagtattggttgacggagaagccaaactacgatcatgcgaccaacaaatgcaaagatgtttgcggacactacactcagatggtggccaatcaatcgttaagtctcggatgtggctcgttcaggtgtcatgagaatgagttgatttatattgtatgtaactattatcctatgccagtgggtgatgagaatacccgtccttattgattatattgatgcaaagaaatgatccatatggtaatgtgatttgacaattattaatatgttaagttactgatcaatatatatgtataagaatataaaaccaagtttatgatatacattggtttgtataagttgctgctgtgaaatgattcagaataaaatgtgatgttcaattggttaaacaaattgtgattacatatatttgatataataatatatgaactttttgttatagatgatttataatattttcgtaaattatattcggagttattttcctttgtatttagtccgttggtatctagagcaattgtgaaaatgagtagctaagacatgaaaaattgtgcatttagataatgatggtttatgtttctttttgaagagcatgcccaatcaatatacaaatagacacagctctactgctctagcagaaaatatggagcaaatttctgtcttggggagctttatgctgcggttaaagcggctatgagactctaagcatcctagtagagtagataacgaattctatagactatatagcgtgtggacatcaacatgtctttaactttaaaatgattaaaagttgtctaatgggtcggtttaatagcttatcatcttccttattttaacttctaagtactagagttaaaggaatcaaatgatgcgtatgctttaacttttcaagaaacacaatgatgcatagttttaagacactgtaactgtaagtgcaaatgaaccaaaaatgatgctttaacacgacgttgagttttggggaatcatttcatctgacatatatgggaggacatgttttgtttgtatatcgaaattcggaaaatgtatggctaagtgggaatattggatatcacataacttattagaatcagaagagattgcaaatttgtccaagaagcatatatcaagacactgtaagcgcaactctgaaaatttcattgttgatcaaaaatacaatatagtatgtggcaactggcaagtcatacaatcacatttgatcgtactagtgagcagagccatgccaaggttaatggttgacggaggcggtcaaaattttttttctccaactaaaaaaaacgatgcttataataatagaagtaaaaatgtctacaaagataaattgtcatatgacgaaaatacgaaaaaaaacaaaacataaaaatagttctaaagcgtaattcttcttcctttcttcccaacaaaatcattagccaaacgttcaaagtcaacttctctaaccaatgctctttcgatagataagatcgccaagtcacttaacctttcttgtgacatactcgaacgaagataagattttatcaatttcagctttgaaaaacttctttccgcagatgcaaccgaaactggaattgtcaacaatacttgataagcaatccatgaattaggataacaaccttcaactttttgcaagaagtctaacacttcaataggcctcctaacttccttgggtaaagcttctcttagaatttttagttcataaaagagatcactagcaagaatatctgaatgtgttccatgagttaaagcatctttaaggttggtacaagatgccatcaaactatcatcactcgccgactgcaactttttcaaatcaaacaaaaacccaaatatttgttcatacctttggaattgttcgaatcttgtctcaagcgagtaaagagcttgatccatgatttggatgaagtagtcaattctgtaaatttcgaacataagtgttacaaaatttctgattctaatttgggggaaaactacaacatgtataattaagaattacatcaaaccataggatagaacaaggataaataaagtatcaaacttactctaacgagtcaatgttaatacgttcaaggctcaagagtaacaggattagaaaaagtcttgtggaaagagacggcgattaaaaaataaaggaagaggattctctaacctaacttaataatgctttgttctgtttgtttccttattctttggatttttttttatttttattttattttcttattatttagataaatgcaaatgatctgtaatattggtctattaaactaagagtatcttatagaaaaatatgcttctaagttttttttcaaaaattttggacgtaagcgaaggtttctttcttatgccttgaggcacggctctgctagtgagttatagtttcaatgaccaaggagttccatgcgatacacaatgcaccaaatttggtgtgaagaagtaaacgtaacttatcaattgttcgaatttctgtggattttatgcaatcagtattcgtaaagtaacttggttttataagtctgttctcaatttccatggcatcaaaagaaaacgtttagtctgtttacttcgttatctcataatccaaattcaacggccacgatcagctagactactgtaaatcaggtggtcgtgacagcacaagatcaacgatctgagttcttccttcttcgctcatatgctaaattctgattgaaacatctgacgaattcgttcttcccctttctaatttgattctccttggaacaaacaagctctgttacagagatcagagtcgaatccgtaacaccattgttgattctctaaagcatctactgatttcaatcgtgaaattagccggtggtgcatggaagctcctttagcggagagttagtttcaattttgattcatcaatggcgtcttggcttaaagctgccgaaggtaaattctaatggtttatctgcaactgaaattcgtgataacaaatttttgaagtatccgtttttttttcgtcagatttatttgaggttgttgatcgaagagcaaaatcagtggttgaagatctttcagaagaacagaacgatttgcagttgccaggtactgtgtggagattaatctgatagtactaaaagctttctctttggtactggtttgatctgtatatgaatgattagaaacataggcattgtcctggagtttatctaaagcaaagctt

SEQ ID NO: 254 - DNA, 93868 bp, Arabidopsis thaliana
gaattctctttccttgacgctttgtacctttgggaggtaatgacaaactttctgcatttcttttcttggttcctggttttacttgccgtgattgtttatgaagccgtaagatcttgctgtgtgtttattatcttcttcttttttgcgttatctgctgtttgggtaatgagaataatgtgagatggattatggttgcagctgatgtgggcgatggagtacaatccaaccatgtttgcaacgtacgaggaactagaaaaccgaaacaacgcagcatccgatcccaagttactaaaacggtatggcaagtttgaaaggaaatacataaacagtgggcagaacgagcaacatcgcaacacgcttgctgtttttgtggtcgcaagcgttctacagacaaagaacaaacgtctcttgaaggaggccaaaggcttagacgatgttgttcaggtctgtctctgtatcttttcactcgtttctctcaaagccaaacaaggaaaaatcaaactctggaacttcaaagttaaagttggtatgcagatactaggagacattgcgggtaatcttgacgccaaaaaagcatgtaaagaagcgttgaagatccatgaaaaattcctgaaaaaggtttctttcactatcactataacttggggaagatataatatgatatacagttatactaatgcagatggtgttgttgtgtgtttcttgcaggctaatagtaataagcaataaagatttgctcaaaacttctactcgacgactttatatatcaaacatatactaatacagtttttgatcagaagattgttcattgccggccagaaattttcttgaaaggttctggaaggagattgatgagaatcctctgctgaataatttttttttttttttttaatttgttcattttctgatgttctatgtattttgtggtaaaatgtgtgccgtttttcagttatacgaatgaactacgtacgggccactaacctctccttacattatttgactcttggtgatatttctttttcacatttttctgttttgcatgaatgtataatcttaagaaaaatcgttaaatgtatataatgattattttttaattaaagtaaattaatatttttatttgctaatagcaaatgacatagagacatacaaaaattgagagaatattttcgtcaaaaaaaattgtgttacagcatataattcacacatttattaatttatgtgatctatgtgtgagaataaaagaaaattcatgtttttgtaccattttctaaattaatttaagagtttaattaacacattctctacatacattgaagtttactaagatttggaaaagaaaaaaaaaaacagagagagacaaaagaaaattaatgttaatgattattcatttgatggaacagaataacgtaatttctatatactaattctaatttttgattgatttctgatagtaatagataaacaaattgtaaccatcagattaacgaaaattttggtttaaacaaacatttttgcactctttttttgccgtatcacctgtatacgctctcaacccatcattcaaacaaacatcttcttagtttccttcatttttgattcttagtttcttcgtttgatgctttttttttcctcttggagtactctgaggattttgtaggtaaatttcaaaggaattttgtttatgtattcttaaatcttttcttattaggattatcaatttgttctttttgatatatagaagaatctgcagaaagataaacctacaattttctgagatgaattcttgtttctctctgaacaatattttggagtcttgactatatacacaattttttttatctatcattttgtttcctcaatatttactgccaccactttcttattttctgggaaaagtgagttttcaaaacctatcattttgttcttctgtactcccatttttcttatttaaaaaagaaatcataaacctaaaaagagatctatgcaactcacaatgtcaagctccaagatgaaaagcctcttgaaagggctccgatacatttctcaagtatttggtaagttcaccctatagatctcttgtttaatttcttctgatttttgttcgcataagagtttatacatatgataaatccttttttccttatataaaaactcgaacttcatgatcagttttgaattactatgatgcaaatcacgtagaaaatttgcatgcatgcattgcaagtacgtttatatggattgaggatgaatctaaatgattgattatactttcttgtttctttcttttaatgatgatagaaagtgaaaaagaagaagaaatacaaatcggaaatccaacggacgtaaaacatgttgcccatatcggttgggatggaccatccgctaatgccaccgcaccaagctgggtatgtttttactcttttctacttctttggtaattcttaaaaggcgtaaacaataatcgtgataaaataggcaaatgaaagattgttttattatcctacgcatatttggatggatgtgagctctagattaatacttgactcaaatctacgaggtcatatatattaaaaatttgacctaaaacgttttcagaaaatgtcgaattgatttggttaatgttatgtgatttgaaagatgactgagttcaactccggcgggggattcgaatctgctgaaggagtcggagaagatgattcctccataaaatgtatgtcggaatatggtggtcggtctagagatttgccaaacctaccaaaatctacgaggaaagcagcgtccgagaaaggttctccgacaaaagacaaatcatcagacaaaactaaacgtcgctcttctaacaaagggacatcgtcatcgtcgaggagaccaaaggaagccactgaagaacaagacgagttgtcttcttggcctagtggattaccggaaattccaaagaaatctaggaggaagaagaagtcgacgaaagaaaccgcggttaatggagggtcatcaagatcgacaagaagatctgatgtcgataacatgtcggaatatatgtctgagactggttctgtgagatctatgcctcaattcgacaatagagatgatttttgaaaggagagacgacatatatagagactttgctgctagctccaaatggctaattttcattgaacacaacacaccaattgttagattttcttgttcattcttgtactattattaactatgcaaggagaatttagacaaatatttttcggtgctatcatccaaatcacttgaacatagatcatcattgacgtcgatcataaatataaaagagcattcttacagaacaaatcaacagcatctttcactttactagaaaccctatatatgaataaaaacttcttggacaagagctgagtagtgttagtgtgattttcctcttcatcatagccctcagcaatagagctgcatcactacaacaatggagctgcaatcctggtcaaaagtttttgtaaataatcttctttccttttggtaatataattaacattctatcaaaaaataagtttatcgttttgaccgttaaattggaaacagaggacagctctgttttgtgaaagccttttgtagagagagggattaattttgttgtttcagtgacagctatagtgtggcttcccacaaaaacgatttttattcatgataggaacagtacgtatgagataaacttgaaaccctagtatcaaccatatgagttggttaaatacaaaaagatattgagaattctgatttgaatctctttggatggatcacacaaaaaaaggagaccagttcattattgatctgtttgaggaaatgatatccgcaagaaagtgtaaattgggcgtcaaccacaaaacaattaacaaaccggcttttggtatatatagagagattagtgagctaaagctttaaccgctttctcagctgcatcatccaaatcatcagctgttatgagtttcattccactttccttgaggattctctttccctgctcaacattcgttccttctagacgaaccaccactggcactttcaatgcgacctgtcctcgccattccacacaaacactcggatttattttcaatcatgaatatatgaaatattatggtaacaaggttgtttctcactcacctcttttgcagcgttcacgattccactagcaatcacatcacatttcattatcccaccaaatatgttcaccaagattgctttcactttatcgtccgatgtcagtatcttaaacgcttccaccaccttattttttgacacaaacctctattaaaattggttttcattccaatgattcccaaaagtgaagaaagaaagaaggttccttttacctggtgctcagaagcatttccaccaacgtcaaggaaattggcgggtgttccaccgtgtaatttaatgatgtccatggttgccatggccaatccagcaccattcaccatgcaaccaatctctccatctaaaccgatgtagttcaggtcaactttagcagcagccacctatgagacacaacacactattccttttaacatcctatcgaattaacataacaatggctttcttgatgatacaagagatagacagagacctctcgtggatcctcctgtgttggatcacgcatggcgaaaacctctttttgtcggaacgcagcattatcatcgaagttcaatttggcatcagcagctaccaattgattagttgatgtctccgcaaggggattgatctacaagagaaatttggaggttcaacaaaagatatttataactgaagaagtgtgtagaaaaaagacagtgagagagaactcacttccaacattgtgcagtcagtcttgcggaagagttcgtatagcttcttcacttgttcaatcgaatcttttctgtcagcagctttgggagccagaccatccacaaccttagcagcatcttcatcagtgattcctgcaaatacatcaattggtacctacgcaaaaccatgacttgaggtgtcaaaaacccgcatgagaaagaatctcagaatgatatttactggagatcagaccaccaaatacgaatcaaacagtaacaaccttgatgatcatgtcagggaacttctcagcaagatcttcaatactggtaccaccctttttacaggcaatgatcaactgatataggaaaggaaagcgttttagatattacagcagggtatgaaaacagcatgcctagaagtagggaaatgaatagcagcagctcatcatttgcgtagtagcataccggtccagcagatttacggtccagaataatggaaaagtacatctcattgacgagtgacaatttctcacacaagtaaacctgctcaaaatgaagacacaatgaataaacaaaggtgcaagagcagtgacaataatagaagaaaaaacaccaatcatgaataacagataacaaaccttgctaactactttgccttgaggaccagtttgcttggtgacaagtacttgtcctagcatctttcctacaagtaataaagatttgaaatagatcaataacttgtacaacaacaacaaaaaacagactccagaaagccacaaacaagaaatcctgtacaataccagcaatctcttcagcctcatcacgtttaacaatgtgaacaccacccttaagaccactcttgaatgttccaagacctcttccaccagccaaaatctggctcttaacaaccaactgtatcacacgaaaatgacactctttcaattagacaacaactaataatagagattagaatcgaatccctcactgaatttacctcgctttcattagggaaaacatcttgaatagcctttttaacttcttccaacgaagaagcagctactcctttcggcacattaactccatatttccccatcaattcagctccctggttgtatcagaatcacaatacaaactttacattatcctaaacccagagaattctatcaaccacaaatcaatcagtggatcaacacagaaacaacagacaaagacacagatcgtactcgaattctgacttgacaaaagcgaatctaggcaactatcaaatggaaatgaagagaagaagaacctgatactcgtggatgttgagacgacgaagctgttggttctgccatttcccggagatggagagagatctggacacgagcttgttcaccaatcccctcatcgttggatttgttagtagtcgaaaagtagcccaagagaaaatgagaaaatgtagaaagagcagagaatagtcgcagctatgaatgatcgagtctaaccctaattttttcctactttatgaattttcaatttaaccctctctattcttctatgtcgccggctcatttaattccaaaatatttttggtaactcttgttagaaaaaatctaagattttattttcaaaaagtctatatatgaaaataccaaagtaccattttaattcactaacaatataacaataaaaaaactaagcaatacaatttttcaataaaaatgctaacccactagagattgacatcagatatatcgccggataattttttcctttataaatctataattttattgtatataacatcgactgattgtgtattatttgtagtattattttacttgtatatgactaaatatttatatgaataaattttatccgacttatcgacaagacaaatttttagttactgtattttagataataattttcagtttatttggttttttaatttccagttatttaattttgagtctaattaaaataaaaaaatgatcatttattgttttctcaatacatttgatattatttactttctgaaaaaatgaggatacttacaaaagtttcaattatttattatgtacttatgatattactgttatcatcaccaaaatgagctaagccaaaagctttagtattactgtaaggaatcttccaccggtacggttgagtaagttgagtaaaccgggattactcaaaaagaaaaaaattgttgtcattggaacataagccccgttcagttagtccgatgaggaccaagtgaataactgtcgtgaatcgaacggccatgatgtcatcgacggagagacaacagaagctccacacacgcgtctcagcttatagaatctctccaccgcatgattctctcgttaccgaggccgcatctctgcgaaaagtggcccggggactttcctgggtcggaacttagacaagcccatgtgacccattcactttgtccaatgactattgttacttgttttcgttttcgactaaatatatacacaactgatattttgaaactaccgatgtgggacaaaccccccaaaaatataaacattcttctaaatctgaccaaaatatagtaatttagtaaaattcgactaaacagtctactcaaaactcattgctctgtgtatttattagtccacatgattattctctcatataagttaaattgaatgtgtatacaataaacctataaactaactctaaaacgaacttctcaaactttgaaatgaacatgttttagaaagaatgcaaaatatggtacaaccttgacgcattagatcaagaaggtggcttcaagttcctaattgcagcggccatgatctgaaataattccacatgtgaaataaaatcagacaacaacaaagtcaacaattattgttgtaattatcgcttaatgtaagataataaacgtacccgggcagatccaggatcaaaccttctttcaccaattcttgtattcctgtcctcactctttgtgactgcacttctttgactagattcaactttgctgctgctgttgctgctttcactacatacttcttcacccatctgtgtgcctctgttcttgcttcttgttctataagtacggtcagacgttccaccagaaccaagaaccgggttatctagggattctgctgcttcatcttcaataactttgctcttgcttcttgttgtgtaatcaaatatattatttgtttggagactttgtcccttcttagaaaattgtgtcgccgctgcttttgcaccggcgattgcagctgtgaggctggtaacttgcttgattgcagctgtgaggctggtaacttgctttgaatcaagttctttcttctcttgcattgtacaaggaatagaaccaggttttaaggaaaacgggtcttttgggtcaggaagagggaatttcaccttaaaagagttttgagaaggcataagacctctagctgctgctacataaatctgtttcatttagaaatacagtaagtaactggtactaatttatactacaacaagaacccaccaatccctaggctttgaagaacagcaagattaccttattctctaagttatagacgccctggtacccacgcatctcaaatggaataatcagtttctggaagagttcacagaatcaaatgtcaaataagtcaatctaaacaaaacagtaacagccaaaagatgaagtgactttcacctgtggcttctcacatagccaacaaaagttagtttgtccttcaagcctcacctattacataccaaaacaacagttgaggtttttgcttattatactaaagaatcatcgataacgagctgttttcaatgtcaaagaatagaacacagtaataaggaaaattgttgtaccccttgaggtaaagcatcccagttctgaagctcatcggaggtgacacatccaacaacctcaacacatcctataccaacgaaaccgtattcaaatatgttccaagcaaaatcaggtcttgcttatactataacatggaacttagactttcaaatatggagattagtaaacaacgataccaattagtcttgaaacagggtaatgttgggggaattgaatatcagtgatcccatcaacagcataaatttgttggtaaaactcttccattgctttgatagtagcttcatcaggtactttacttgcagcatgaatccataaacggcctatttacatgtttaaaaacaacatcatcttcttcttcaaagttatgcaattatcacagtgtttcaaattcaaattaaatctcagtcgaatccctgagttcaaaattagggttttttttacctcgaattggggaaggccaggatctgccttcgatgcgtttgataccatggacgagaagtgatgcccatggctgatgcatggtcaagcacgggttcttgtaattcccacgactcatcactctttttcttccaaaatccaaatatcaaaacctatacttaaacctaatcgaatccaaatcaaccaatcaccaaggatatatccaattaagctcaaacctagaatatgaacaattccaaaatcgaatttttctcacctacgaatttgagtttgtcctctgtcgagaagacgtaggttaattagtgtttagctccgtcaaaaagtttttattaactacgcttatatcaataatttggaaattataaagtaaagtaaatcattttactattcgattggcgggttgagccaagcccgtgcagtagtgcaacgcatgggcgactcgcggaaacccaggtagcaagctaccttaatgggcttcctcccttaaaaaatagagttaatatcgtgtgggccgatggcccacatatcagatattaaactgataagaacagatactacacttgatcttagccaaaaggccgagaaaggtatgatttgaaagatcggcccagctttctttatatacaggttggttctgactaatgcttcacgagcttagcgatgtgggacaaaacctttaatcttgtgcatatctttcttccatatgcaaaagcaaaaatattttcgaagattaatctaacttacatgagttgattccatacatgcaattatgaaattaacgcagtatacaggaagaaactcgaaataaaagctagtttaaaatccacctaaacactaaatctaaaatctctgcactcagaattacatcacaaagatggaattgctctttatttgtttcttcctagagagctgagaatcagaaaattagagttttaagaaagaaaaaaaaaagagaaaaggcctgaagaagactgaaagctctactcctaataagtcatactctacaactccaccaaaaccacagttttatgatctaccatccgaagaaaggtttccttcattcttcatttctcggacgctttggccgcggggattccgactcctctgaaccattttcaggcgttttcgcacttgttttctctccttgttctggtccgccgaaacccatattttgcttctcaatcatcatcaacagcgcctttccttgctcttctatccgaagttgcattgttcttagactctgcaagcacatcaaaacaagcccccttttcaatccctactgtatgcaacttcaaggaatataaacagataacaccacaaagctaagactcattatatgttcatcgttgtacctcaagctgctcatgcagtttcttctgatgttccatctgaattcgcagagtctcagtgatatctatcccactgcaaaatcagtaatgtcaatttattagaaaggataatggtgtagcagttgtgaattgtgatgtcaccaaaccccaccgtttcgtatcatcagatgtaatttgctcaagcggtgtcaaccttgcctccggcgaacctgctaatcatcaaagaaagtcatcttaaagtaaaaatcgtctgtaggaagttaaacataaaaaaaactgctcagattataacaaaggctaaatgagtccgggaagagggttcttagtctagaaaatcagaaaatagtggctagcaagcaaacaatgtcgagagcctttaacttaaatatcaagataagagtagaataagatagatcaacaagagctgatcgaatttgtgtatataagctactacaatatttactcatcttaagaaaaataaatgcacatgaagactctacataaaagagtcagtttttaccttctgatggtactggtatatatttagctgttctatatttctgcaatatgaataagaaaaattgtagacttttacaaacagactatgaggattaggataaacatatgttaggaaaaaataaaaactaaacctgcaaatgacttttgacatgaaaaatagtcaaaccttcgactttcatatgcttcaggacacctttaggagttgcttctacattaaaataaggcacaaagcaagagcttcatcatcgttaactctattcaaagacaaggatcttaaaatcaagaaacagagagagagggggacagagattctcaccattactgccaccgagctggttaacagcgtcaacaaaaacctcatgaagttcaggcgtccaacgcatacgtcccttagctgctgctgctgcattattactgttgctattgttgttgctgtttgaggatactgtcctatcaagtgggcgcaattccacacaagaagaaggctgctgcagaacagcttggggttgttgaatctgcgattgcatacttggttgctggacctgaaacaatatcgcctcataaaacatgcgtctttttatggtgtttgctatgtatacatattggaggggttaaaaacagaaaactttggagacaacattaccaacctttgaagctgagttgaaattagtgtcaaggagaagatcgcccaagatactagacatgagtggatcttcatcagtggtaatcaagtcgtcataccaaagtggcaagtcactttgtttgtgaatctcatcaatgacaccatcctccattattagattgggagaacccgaaggaaaataaatatgggggagtggagagggaatccaatctgttgtctcggggcagttgaatcctggttccaaaaaagggttatgaccaacagctccaccattggcagggagcatatcacaaggccttgccatgatttgattgagttctgaattgaaggacatgtctgctgctgcttctgaagggtttggtaaagaaggtggtatcaatgaacaagtgtgtgaaagctccgtcggaattgaccttaacggataattctccatagaatttgcatcatcatcatttaacggataattcttcatagaatttgcatcatcatcatttaacggataattcttcatagaatttgcatcatcatcatcattcgggatcatcactcgagtttctgaattactcaaaacctaagaaaatcaaattcatcaatgtaaaattcctcaagtccaaattgcgagagcagaggataatactgtcagatagcaaataatccacacacaaattaagaaaactgaaaaagcagaatcaatggccaaaagccagcacaaattatcaaaaaccaatggaaactgaatccaccaatcaccaaacctaacgccaattatgctccaacctagagaagactatcaaattacaaaaatcgaaattctcacctaaaaattcatgataaacccatgaggagaatcgaatcgaggagaagaagaagcggagagcgtagtaaagcagaatcttccaccggtatggcggttaaaccgggattctagaaccggatttatctctatctctctcacgctttgttctcttcttttccctccttagcgtcgagacgatggtggctcggtgttaaaagagatgatcagtcatcattctctcccgcgagtagaacggcgcgtgcaaatgccactaattttcctacgtggaatgttctgaatggttaacaaattttgtatgctggggctttttcaaatagcccaaagtgtttctcactaattgttttttttttatataacaaaatgatgattttactaacaatgatcaaagatttgaatttatccggaagataacaaatctcatgggaataaaaatatttagtaacaactcgtatttaaaatcatttatacctggaaaaaaaacctgtattgtttttttcgtggaaatgtgatatttttaattttcaaagtgttaacactttaaacgtagatattactgtattttactaaaacactataaaccatcaaaataattttattatcattctaaactttaaaactagttttcatgtttgtgacactataaaaaatgacagatttccgtaaagaaaaacatcagaaaagatgaattaaagaggtcataatcacatataaaaatggcaatttaatattcatcacctaagattagcccgaaaataaatggtgctctgtatcatagtattaattaggagagatggcattcctaatctcttaaatagataaattgaaattaaattaattaaaattaaaattaaacaaatataatttaactatttcatgttagtagatgttattttccgtcatttttttatggcggtacaaacaagaaaactagttttaaggtacaaaatgttttataatgtttagtaaaattatattgaagattaaaatgctgttaaatgacacgttaaacattaaaggttaaaaatgttatttttcgggttttttaaacatactattgtttttcttttaatctatatttatttcaacgaaaaaagtaaaaataataaaatctaaataagaagttgcaaaacccagaaccctacagatcatcccctacctcgctgcttcgggtcgaatcagcgagtcgggtcaaaattcacctgagaaaaatgttcgcgaggcggttcacttcgttcttcaaaggatcttcaacctcaaggtacccaaaaatgatgcaacttctctgatttttctgcttgaatttgcaattcttgaccgtgaaaaatccaatttcggattttgatttgcgatcttacaaattggaatccgatcgatttctcttcttcgcgcatctgaattcattccatctctatcgcgatttcaaaatcgacctagtttttctagttggtgaaatgatctatatacccatttacacctattgacttgagcttatatggattagattcaaaatttggatgatttatgttatatatggtcgtttaggagtgaaaatgagctgaagaatgtttttgaaacagcccggacaaaacagctgggacattgggctcttttggtcgcaaggcagtgtctttcgtcttgattacagtcactggtggtgttgctttgagtgctctcgatgatctttctatctatcgtggatgtagcaggtaatctcccatcacatattcgtttcatcaaaaatgcatttatctttccattgaagtttagctattgcaatagacatactatgtgtgtaaccttcactgatagttgaattgtgaatcgattcggagtcttgacaaggctttattagcaagagactcgtttggacaacaggtttagataatgtttaaaccattttgttgaagtggtggctgagaccatcaattctttgaccatattttgttatcaatgggttggggtttaaaggatcaacttcgaaagacaacaaacgaaactcaaattctcctgctagtgatacatgtacgtgaattgatgctgtctccatatttcgattttggcttcaagctttagtgaaactggttaagcaaacgaagagaaagatgtgtagtctggtagtctatcttgtgcttgtgccgccactttacaaagtaatgatacttcttctacctgtcctcgttaggaatcgagtgaaaagtcagccgtaatatccagaacaaacatattttttttggatttctatacgcaccattttgttatttgttgtccattctgtcatgaatttctctatgatcttctccttgtatcatcaaatcaataacatggacatgattttcaagaatgtagtatctgcattggcgattactcaaaaagtctttgtatgcttaattttcagcaaggcgatggagaaggtgatgaatagtaaggtgatgattgaagccatcggagagccaattgagaaagggccatggtacaatgcttcactagctgtttctcaccaaaggcactcagtgtcttgttcattccctgtgattggaccacaaggcacaggaatcttgcatctcaaagctgttcgcaatggaggtaaacattctcaaacccgaacagtcactcaaagacaaaacatatgtgttaggtatctgcatttgccatttttcttactcattggatccccttttctgcttgggatagaagatagcatgttcgggtttctccagcaaagggactgggacattctgataatggacgcacttgtccatgtcccgtcaaacgagggaccccaacaaaccttgagaatcaacgttactgacatcgttgatccttcgcctggtacccacgataaacctttggaaccattagagccagagaagagctaaaaagagaaagagagagagagagagaacgcttggtggagctcctggctagggttttattccattccattatatcttgtggaacaagagagagaattgggtcttttatttactaataatgaacaattttttaggagtatacaaaagttgaatacatgattgagagtctagtgaataacagcattgctatatccgttttgatttggcctcctttatgttttcatatatatgttttacgtgtttgtttaagcattcaagtcctaattgcatcaatcaaaatgtaaattagaatcctaacactgcttcaatcatattaattgcatgagaattaaaatgttacatgaccatcaaggcctagttagctaaatatcccaacatcatacaaaagaagaagccaatttgaaaaaagcaagcccacccatgggatcattagaatcagagaagtcttgcctgccaagcgatttccggagaggtttccgatttgtctgatctcgccaatgtcgtcgtctccagagaagaagaggaggaagaaactgtcaccagaatcgaactcacttccgaatgatttgatagtgaccatcttagcccgcctctcgcaatcatattaccctaagctctccttagtctccaaaaccttcagagcaatccttgcttcaccggagctttaccagactcgaatcctcttaagccgcactgagacatttctctatgtttgcttaagctttcctggtgaacctaaccctggctggttcactctctaccggaaacctaatcaaacccttaccactaaaaagaagaaaaatagtgttcatcttttggctccaatcctcaactctcctcctgtggaattcccaagtctcatcgctgttggttcttatctttatgcctttagagcagccattgaagaaggttctccattctctaactctggtttcttgactgtcgaactcacacatggcttgaagccccaagaatgcgactagctctcaccaatagtgaccttgatgggtatatgtatctagcaggaacctctgattctctgaactgtgttgaagtgtacaacacagacactcaaacttggattcctgtgccgcccaacaaacggatattcaaactccaacatatgaaaggaatgctttacatgaaagttagtaaacttttgagctttgttgcacaggatgctgaggagcttgcgcctttatttccgaagcttcggtcattactttctacggaggttgtggcttttaagccaaaggtttcggaaggatatgaagtgttaggattttcggtcaatacagatttaggtcgaggttctttttgcatgatagaggagattacctatcattatgaccccagtgtaaagtttagatggagaagaagacagggaggagtttggagatcattagtgggattagaagggctacctaagtttgctagatatagtagtgttaagttggcggattgtggtggtaagctggttgttttgtggcacaagtatgtgcctgcaagtgggtatgaggagaagatggtttggtgcgcagaaatttcccttgaaaagcgcagcaagaaagagatttgggggaagatcgagtggttcgatgcagttcttagagtccctaagtattaccaattcgttggggctaaatctgctactgtttgacaggtttgagcgcttataaatatgatctgcagtcacttgctttgtaggatgatggtttaagcttatttagtgagttctttttcttttagtgcctgacattgtttttgcttataaatatgatctgcagtcacttgctttgtaggatgatggtttaagcttatttagtgagttattttagtgcctgacattgtttttgcttataaatatctggcattgacttgcttgtagatgattaagcttatttcgggacttgtctgtctctttgattaaccctttgatgacaaactcggtctgctactgtttgatgaatgatgcatgagactagcgggtaatgtccgtttttagttctgaatatgtgttgcaaatgcaaaatgtcaaatgcaaacgaaattaaacataggcactgtcttcagttagaaacttgaaaagggtcacttcttattattaatttctgtgggtaactgatacaaacaaacttatctctatgaaactggagaaactacatttgataccaatacaacaaaaataaatcattttttgtccgtataaatagtaaccgaaaactatatcaaaaccgtaacaaaatgtggtttctgtctcttttcactgtgtcttatctctctgctcactcttccatgaattcttagctgcatctgctgaaatagtcgtgcctccattaccatcgctgctgccatcttctccgggctttggtttggagaagaacgggtcccacacatggccccctgcttcccgttggccttcctccagcaacgcatacttccagctgttctcctccacgaagtagtcatactcggttcggccctcgatcatgttcttccttaaccgagtcaccttgtctatcacagcctgtaccgagacatcaaatgcatctttctgcgtctccagttctgatctcgggtctgcgtagatcagccttgggatgaggttgatgacattctctctcattatcttgacctgcttggctggaatctggaggagtcgctcctcgatgcttatgtttctcttccgaacatcatcctcggggatgaataccgagtaggttgtgtagttcttgggtagatgccacgtgtattgcgtgtaggctgaacccggatggaagaagaccggtatacaaccggcaagcattgagtcaaatgccgatcttcgggtgtaagagtctccctgtggctgcaggcagaagagagagctttgaaacatttgcataatgctgcttggtgcatggcatttgctctccccaaaatcgcattctaataatttgccaacatttgagtttcgacattgatcaatgatctgccctctgatagatttcggattgtcaggtcgtggggctcctgcaaacgagaaaagccacttcctttccaggtttctcatccggtcttgccattcaaaaacctctgagtcctttgctgggtggaagtaggttgggtacgggatcccaaaatcattagcattccatgggctcgactcaaccacaagcatagacatgttcttggcagccggtaagaagagaagcttgttgccccaatcagtttcttcttcagacaatctcctaaaatcccacgttatcctacccgccacaaggaaatgatcttttcccctcattatatcccactcaggccgcttcatgagccaatcgaccaactcaagcgaagcagcatcccttctcgagatattgtatccccacagatacctagcaatgtcgaatccagcatagaacggcacaaagatggcagcagcaagggaagaatcatttgtcaaacatttgtactgcttcatccggttgctgaatatcacatcaacagcaaactgattagtcgcataccaaccttcatcagagaagacaccttcaacattctcaagcggcggcccaaggccagcattggttgtgaacttacacatgttagtccagagactaagcttcttacagtctctaagcatatcctcattgaactttgagggtagattgtgaacataaatgtacttccctccacaagggtcactcttgttgtctactgtcttcaaggctcttataaacgaaaactcctgtttcttcccgctctcaacaattctaggtggcttaaaggtggaactagaattggctactggtgcaggagggagtattggcttatcgatagtaactaaaggctctttgggaggtggtttcgatggagctgcatgaggctctatagggaatttatcaacacgaagagagactgatgatggctgagattgagcataactaggttgcaattggagctgtttatcaatgttactagtccctaagacaacaaaatggaagtacaacaacaatgcccagaaaaagagtgacaaagcaaccaacaaacagattcgattagtctgattttttccatttcccttctccattggctctgtaggagaaacttcagcagagcgacgcctcatagaaacccttggaaacatatatagagtgtacgaagatcacaacatctatacaataaagatcaaactcaaacaaaaccctaaagagtaaaaccaactcctatcaaagcttatcaaagcttctagaagtgatttttacacgagatcgaagtaattgaagctgaaccgtagctcaggagcaactccagaaaggaatcagatttgagaatgtagaagtgtaccgacaaggatccgcaagagaaggagctacgaggaagaaagaaagattacagcttttgattgatccttctatggaagatctagagatgtgtgaaagtaaagatttttaacattgatgaggccaggattgatggattttgacctggctttgagctggtcttcatcaccgtcaatgaaagaaagagagacttctgtataatgtaattgaaagcgcacgttagtcggacggctaaatctgcgccggcagttttttcttgtagttgtcggtgaccagtgggaccttgccacgtgtgaaaacatgtcggtttcaagtgtcgatgacgtcagatataaacctctttgactcagtttcgcgcgtaacgtgcgatttcgacgagcgtgtgggtacgattccatgtgtaatcatgtgagtggtttgtagcatgctatacgttggaaataacacaaatcgcagaatttgatggtaagcactaagcatgaaccaaaacacgttgtaacatgattacttcaagttcaagctcattgtttaacgtctctctgctaatcaattagtatttcaataagtacataagttttgactgccttagtttgaatgttgtgtagaaataggttaatatttttgttgagaccaaatctcgtgcatgatgtccaactaatgatgacggattgacagtaagcataaagcagatgactagcctttttgcaaacctaattacataaataattaagtctaaacaaagaccaaaaatgctccaaaatgactttgtttgtatgaaactattgatgtaggtcgaataagagaaaagagacattagaatgcaaaacaaaatgcactgctttgttttattgatgagtaaaattttgttagccagttgaagatttaagttttgttttcgtttgtttaaattcaaaattagagatagtttatatgaatactggtgtctaatttatggtggtaaatccgtaaatggttccatagtaggtaataaatatgctcgtattgaaaacaattttctacaagtctaaagtagataaatatctaaattaaaattgaatagtataaaattcaaaaacaggtcaaagcgaattaggagaattacattcgaacttagaaaaaatgtttgtcgtctaagtcgggattagtagtgtaaatgttgaagtgttcaagggggagactccacttccatacactcataaataacaaaccaaaaagagcgaaaattaaaaaaacttagaaactttaagcgacaaacgtggcttgtgggagtggggaagtttgtgctccccaatgtataactcacatggataccacaaaaggacttgcaaaaaaacttacttactcctcctttaaataattgaagagagttatggactagcattaagtatttcccaacaataagtattaaaaaagaaatcacttttgattctttaattatttgttacaattggtgaacatgtaagggtgatttggaaaagtggggtggggattaattattgaacaaattcataattaagaattatattctcttgaaatgctcttgaatcagtgaacaccaatgagatcgtggtcttctaatcatcatcatctaatgggagggtgggaaaatgcatggaaagaaaatttctagctaattgatagatctgtattcgtcaaatcgccaaatcggtacttgtagttataatccggtggttgagaatcttgagattgtaattggtaacgtacttcatagcttttaatcctgtaccctcttgatatcgtcacgtcgtttgtcccactagactactacatagtttatatgattggactatagcattaatcttcgatttaatctggaatgatatgaattaagacaacatatggtgtgtttttgactgttatagataggaactttctggaataatctacaaattaggacatagataagtataactaaatcgaggaaacaattataggcgagatcgttcttacttcttagcatgatcatcggttgatggggagatctatacggaaccactttccttccggaaccaagaggagaggaagagaatgaatactagaaacatgttaaaaagacagaccaaacataacccaaccttaatcaaggtcatctccttctgtctagatatggtatcgtcgcgggtcattttaacgtcatctatatggagatgaacaccaggatctcttagcttaaccttgctaccgatcaaagctgaaccacatgttgcttgaacattgctgttcacgtagatattgatcctgcaaccactttgactcgctatgtctacatccctaggcgccaccatcaccgcaccaacatttctcccgtttaagtttattccaccactgccagattcgggttcgggatagtctccgtcatcttccattttggtacagactgcaaaaatgagtctatcctgtctctccagagatgatatttgctctatatgctttgcttggttcttggggttccctaaagttctttactttttctatagccagaagcaaagtgaattattctacgatttgcataaactagattccttacccacccctaaattaaggataccgaaggcctcaagatgggttaatggacatcaatgtttcattactgggagataacggagtcgaaataccttcttgaccatgtaaaggaaacttcaaattactcagggtttaacctctattgcatacagatgcatgttgatacgttttgtcgtaagtaaaacatacaacaccgagctatatgtaatgcaaagatgaaagcatatggctttagttttactcaagggaagtagtacatggagttcgaaacgaaccagacattgcataaatcctaagggaccaaccacatcaagaaatatattgtcccctctctaacttataatgatgttgatgtgttataattttttcaagaacacaacaaagaggaggacccgtttattattgacagaagtaaatgaaagtcatcaacatagcaaatctggtttccgcaatctcattgtgacacttgcatgaaaaaattagtccaggaaatgacctttgagcagagaagcagcatcaagggtagaagtctgttggtatcttttcactgacagtagaaccgaagttaggaccacccttgcgatattggataagaaactcgaccggatatcccttcaatttatgggggacaaggtccagatcctgaaacttcaaggctgaaatagccattgttgtacaataaaaagtgagactcaattaactcaaggaaaataactcatttcacttctatgaataatgactaaccgttgtcagatacaagtgtatcggttgtaagtgcattgatttgatccaggttgaagatctgaggagagggtaaggggaacgggactttgttcaccatgaagtctcgaggagccgccattgcctggaacagattgtgacatatgtgaaattagtattacagtatttcaagaggaaaacaaaaattctttggagtttcttccatggacagtgcacgattcgatcttttaccttggcaattggaaacggaagcttcacataccgaggccattcacgaatcatatcatacatgatctctgcctgcaagacatacttggaaatcaaacccactgagctaggatagtgacacagagaatgaaggattaaaagaatttaccaactcgtgagtggtaaagacatctggaccacccaattcgtatgttttccccatgctggagccatcatcctttagagcagcaacaatcgcagcagcaacatcaaccacataaacaggctggaatctgcagtagagttatcgttagggacggaactaaatctacatttcaagttgctatgaaccagtgaaaagaattgcacaaagaattcaagacgtacttggtggttccaccacctatgagcgggaggaaaccatattttttaacgaacattgaccaggggttcaagattctgtcttctgtaccaatcatggttgcaggtctcatgatggttgcctacaaaacacatatatatcatgaactgactagaagcagcatgctgatgacaaaaagtttatattaaccatcccaggttcacttttgctttcaaaatttataaggttttagaatttaataataacatcatatacggttttcccagttctgcacaaaaaaatctaaaggatctttcttttctctgaaaaagaagcaggaccatgaatattgaataaaatattacgatgataataattacaacagagagagttatgtgtaccgaaagccgggtaagtatacctcaggcagtgcgttcaagacagcttcctcagcagcagcttttgccctcagcattcttgaaggagatgacacagaagctcctaggcaagaaacttgaatatatctcattatcccaccgtgttccttggccacctgaaacaacatatccacaaagtccaatctaatcagaaataaccaaaagagcaaaccatagcagatcgtatcatcccaaaggttaaaaatgtgtagctcattgcagatgtaggcaacattctgaggggtaaaaaaatggaaacctgttcaccggattttttggaaacaattcaaaagatgattcgcattttgtcaggattcaaacacataccaatgcaagtttctcagcaatatgatgattcgcatcttcaaaactgaaatttcttgtctcgtactctcttcctgaggagtagaataaatatcatccaaaatggaaagaacagtgctacttttttaatggttttaagtttaactatacttgctagaaaaaattaagatagacaacaaaatatcaccaattagattgataacgacattagccttggccatgacagccttaatcgagtcttcatctcttggatcaaatttcattggtaccacctggaatatacaggcaacaaacacacatcaaatttgccgatccaatgcatagttttttgtaaagatgtttttttgttgcataccctcgaaagcattatgttaaataaaagaatacattacctgtcctaaatctcccatcaacttgagatgtcgaggagagtcctctgagcctcggaaaggaacaagcacttgtgatcccattttagctagtagaaaagattcactcgagtttagcaagtaacaaaataaaatcaacaaatgtacaaaataaaaaacaagattgatttacccaactggtaataccaatgataaacccaactcacctagctgctgcacaagataacgacccagaaatcctgtggctccaaatactgtagctacaatgccactgccaaagcaaaggagaaattaagattttcatatacttcttttcctcttaacagaaaactctcgaaaaaactacaaattagctgtgctaaagctaccaaaaaccccttaaagatgatacatttctccgcaaaggcaagtaatttacaatatctatcctctaagctcgaaacttaacaaaagatatacagaataagcatgctttaacataacacggcaagaacatttctcattcccatgacaaacggaacagaaagctctcgagaaaagttcactaaactgaagctactgcaaacccattagagacgatacatttctccatgaaggaaagtaattcatgaaagctatctcttaagctcaaaactaaacaaagctatagactaagcctacttaaatcctaacagagaccaatatcgtttctccttcctatatgaattctcaaacattttctaaaggaaacaaaccctaaaaaagagcaatggcataccttacggaagatctcccaccagtacccttgcgagcgaggtgtcccacgcccttagtagcgagggaagacgaatagcgacaattatcagtcccattcactaattaaaatcagaggaaacacacaaaatcattaaaaacacaaatctctcattagcccgagactcataacataagtaacctagaaatcccaattgatataagaaaaaaatcaatggcagaaacttaacggtgattagagactccgtagagcgatctgagagaagaagatgaatagatcgaagctcctccgacgagaggccgttgaactaatctcctggaaactacttgcatccttcgttctcagttacacgatcgagacaacaaatacagatgtgagagagagaaagaggaagaagaggagagaaatggaatacaagaatttgctgcctcgaggatacaagcaaatgggcctgggccttgacaatatctcattggcgacgataagtaacacctttaaaatgaaaccacgtcactttgtgttggtccgtattacgtaagcccatttattagtgaaacggcaccgtatgacaaatattactattggattacctttcttgttaatcaaagtttaaagttatcataaatatcataacaacttgattgatttttatatatgcttacaattgtgtttgcttgtatattatctcatgatatatataatacgtctaactataaaatatagacttttcttgtcattggtcacaataaacccaaaccaaatagattataaaaaaaaaaaaaaacacacacacacacacaattgaaagacaaaaaatgaagtaagatacataaaaacacactcacagtcacgactgaacttgataagtcttgcgttagcaatattttgttttactttattttattaccaaacaaaataacgtttttacttttcaaaaaaattctgatttacttgtgaagcaagtaagatgcctcttcctgcctttctatacgtgctccttctccgttaatttttctcagtcgtcttcttggtagatgcttcctctccgttctttgtgccacgtcttgctgatcttcttccgacaaactcagccgccgcatcgttgtaagccttagccgccatctccgctgttggaaacgttccaagccatctccttactttcaaactcggatcccatatctccgccgcccatttacctgatggtttatgaaagtacatcaactgcatgctaacgtattggaacatagtttacctcatgggctcgtggcttatatatatatgaaaatacatgaactaaaactagctagtactagaaaaactcaaagcttgtattagaatagaacttacctgatggttttttcctcactcctttgtgcttcttctccttcttaattatcgcctcgtgtcgtgggaagacgcaaccgtagcagccggtgacactacaaagaggacaagggccagcgttcaaaggtggaagatcagcttcccatgcattcgagttcgtgtcacctccgacgttggatattacttgttgcaaagcagagaccatgatcacatgttcttgatctctcgtcaaattaggagtgaaattgatgttttgatcgtaagagggaacattttctgaattttccatttccgcggagtcgttgaactgaaaataattcgttgctcacggtcactgagaagtgttgaaagtgttgtgaagatttcaaaagaaactactgacgagtaagcaaaaaaaggtttatatggtactagactactagacatatggtcccatgcaaatctttagatacgcggcaccaattagtgttgtttttttcctttgagaacgatacatctgttcagtagatatttattttctgcaaaagcgattgctatatttattcgatacactacttactaattattattagtcttgacaccgagtaaaccaaatatacttcttagtcaagatattttcaactaccttatttaagtcaaaatacagttggatcctattatataatggtttattttgtaatctggactgcaaatatacacatttttttagtgtttaaaagttgagtttcattcgtaacaattggataggtgtaatttcattgttttaaaaatcattttatattttgcaatactttttcataggttaatacgatggttgtatacttgtatgtatcagtccttggattaattttgcccaatgacattctatctataatactttgttctatcctttttgctcttttttttttctatcttatatatctaatctactcttttgatttagcattacattgtgcaacgctatacaaaatggaaccatatgttttcgagctttttgaaatatttttgggggttatttctgttctgttaagatatatttcatttgcagtgctggttttggtttctgtacaaacagtgagtcaataattaaggaaacaaggtactcatattccagtgctttaagtctttattcatataccaagttgttatgagagtctccctttgaatatccccggtcatcactttcatattttgtattttttttctttgatttaattatatacagttcaagacaaatttagttaactaaaatgagacagttaattgctttcaatttcatgtttcactgatgataacgtaaacagaataatgagtaaaacaaagtaaaaatgcagagaaccgaaacagagtattcctattacgataatttgatataacgttcataaaacgcgatatcaacttctcacctacaagagtctcgacgaaagagcttcggtaaaacgatgagggaaatctagaagtctctagaaataaaatacaaccagattattcgcataagaaagcatgaacataacatgttgctttttatactaaaaggtaaagaaagtaaacgttaataatgatcaccgtcaatgtcaagttgccagctcaaaacacacacgtgcattcctttttgctcttgacttcacatgtgtgatcttgactttctagaatactatatcattgactaaataagaaaccaacacaaaaagagttttcgaagcggaatacacagattggactcggatacgaggatacgacaaaaaacaagaaaccctacaaattactattgatgaggttctttgtatatatagtggttgttgcataccatcatctccttttcgtttctatatatcataaactttctttatgtctcaaataaaagctctgtatggtattggtcttcttgagcaagtcatttatagatgacaaaatattcatgctttgttcttagcgatttctgtatcgatcgcttcaattttacctatgaaattgtttatacaagatttttttttttaaaaaagcaaccaagcggtagtggttttcactgaggagaaattttttgtaggtttaatatatggatcgaatcatttcaaacgtaaaatttactaaattattccagttaatccgtcgaaccccactagaaaacgtggtgaataagtaatttgacggctacattcaccctaaaaaaatgaaacatgcgattaatagtgtaactttaaatcccttaccaaaaaaaaaaaagtgtaacttataagttgatttgtcttttattttatcgcatggtataaaatacgtctaacaataaaatagaacattttattatcattgcttacattaattaaccacaaaataaacccaaaccaaatagataaaatacacacaattggtaaaaaaaaaaaatagaggataaaatacacacaagaaagatcaccttactaaagtgtaccgaaatcaaaccgaagttgataagtcttacttaagcaattttctgttttattattatattatcaaattaaaccaaaccaaaccgaagtgcttcgttttgttggcaaaaaccgttttattcttttactgttttatcatatttacttgtgaagcaagtaagatgcttcttcctgaataatcttccacgcctccttaacgtgcttctcctccgtcaatggcgctcctattgcgcaacgtagtacgattttccccgataaagcctgtttcccacgcaaagccaatacatatatattgatttaacaacattatcccgcagagaagccaagaacaagaacaagaacaagaagcaggaagacaagtcacttacagtgtgcgacatgaagagtttccctgaagagttcactgcgtctaggagttcacggtttcggttattacacttcttttcttcgtctttcacaggcacgaggcggaaacagacaagagcaaagatccgaggtgtgacaatctgcaaacaagaataatcacttatatattcaccctttcttagaagaatcttttatccagaatgatttgagatttttacagttacctcgaagttaggatcttgagagacaagttgttcgaattctttagccagtttgatatggtttcttatatagctcttcaaggtctcagatccatagagccttaaaaccatccatagtttcaatgatctgtcaacaaacaaacacaatactcagatgttatctatgcatatgttcttacaaaacttaaaatttatttttctgggaaagcaaaaaacctgaatcttcgtccgagagggatttgccaatctttgtaatcaacaaccaagtttgcctgagaggcctggccaaacaaaatgtagataagaagactagtaatctaatagatccaaagaagaaagattgtttttttttttctgtaaagaacaaaatctttcttaccttgtttttgagaaactctggatttgttgaaagagctaatgtaagagaatcttgatcctgtttttcacgtgttaatcctctttaaaatacgcgaagagagaaagaaaagagaaaagagattaaaatgggctatatatacctttacccaaagaagggaacaatcgaagttagtgaggaaccatttgtgagcattcatgttaaaagagtctgcagtttctacaccgtcaatgtattgccgatactctggacatatacaggcacttccagcatatgctgcatccacgtgaaaccaaattccattgctctgagaaatgtagcaagataaatatcataagtttctatgccacaaaagtctctgtgaagcttgtttggaaatgtgaaataactaacattagcaatcttccccagtgcagctaatggatcaactgcggttgaagaagtggtcccaacctggaaataacaaataaaaatttcagaggacatgcttcaagagggtaagtaattaacagtgtagttcttacattagcacataagaagaatggaatcaatccagcttcaagatccctagaaacagcttcttgaagcgattctggacgcagagcgtaatttgtagaagagtctgttgtcagcaccctgcaattctctggatggattccagcaatctgtcaacaaaacaaaccagaagaaaattagttacgtattccaatttttctttgactttaagtctgcaatttttacctggcaagccttctgtaaagctgaatgagtctggtcagaggagtagacaacgagcttctcaagcgcgtttttgccaacgcttcttaaaaccttgtcgcgtgcagcaatcagaacaacaagaacagcttcactagctgacccttgtataactccacctccatttcctacaagatacagcttaaccaacacttaggtctcaattaagcaaaaaagattttatgttttaaagtgattacctttggacataaactgctcgggtaggttgagaagtttagcaacccaatcaagaacgatcatttctagctctgtggcagctggagaagtaacccaactaaaaccaacaatgccaagaccagcactcaacatctcacccaagaacccagcaacactgctgttagaaggataataagcaaagaaactcgggctttgccaatgcgttactccaggcaatatctttgctcgaacatctgcaaaacaaactcacatcatgtccatagttcatacttgcgcaaacaggcttatttagtatctatgttcagcagaaatggtcaaaaatttaccatcaagaacttggtccagagtttcagggtggtcaggtgcagaatcaggcaaaagcttatgaagataaccaggctgcatcaaaacaagtaaattcaacattgtgactaaaccagagagatttagagagagaaacaaacttgctactcccaagtacaaagaactagagttgccaatttggttttaacattagcaaaaaaacagcaactttgacagaaattaggtcactgacaacagttcggagctataaattacgaaactttaacaaacccaactctcagaatccaagttataagtaacggattgaaaaacccataaaccataaccaaatcgattgtctcagaaaacagaaaaagacctgaacttggctaagaacagggaaatcttcgatggttttgtagtaatcagcaatgaaatcaaccatcagatgtccgtactctctcaattgctctgagtccatcggcttcaacaccttcccgcttccattttccctgaagagaaaaacacaaaaactcaattgaaaattgaacagaaatgggaattccaaactcttcagtgacttacattttgctttctttgcttgcgtcgatttgaattgatgtttatgtctcagaagctctctctctgattgatttgaggtttcagtgggagtggatatctcttatttatagggccctcaatttttatttttttaaaataaaatatttttagtcaattttttgtatatatatttttaattaatgaaaaagaatctccaggtatttattgtatccacccaattcgtttatcaataactatacaacttattggttctcctgcagattttggtttaaaatcaatcatttaaaaaacgttttatattgtttcaaattactttgagattgttaaggtttattccccgagtaaaaaaaaatcacgtgagcaaaataaaattcatatatatatatatatatatattcatgttaattgtcaaacactttaatctctcaattttaataattatttatgttttactaatcattcaaaacacttgatagtctacggcaagttcgcaaccgtccacttctccatattctcacaattgaactcgttgcgtttaaaccctatgaatcatcaactacggtaataataaataaaaattttgaatcaaatgtaatgagaaatgttttgtgtgagacgtgaaaagtaagattttagagaaagattgtgcatctttttctcatgttttttttttttttttggtctaatctttttctcatgttctaaaatacattattaactatgactcagtcaactatgacattgaagagtttcgcaatgaatccaaaccaatttctgaggtaatttgtcagatagtgctgagggtgatttttcgatggccaattcaaccgtgacacatcgtatccgaattgtccactaaatattcatgcggttataatggttcgacctaatcacaaaaagattgagttttgagaaaatttgattaagggtcaaaaaggtttctacaaggatcgtcacattgttttaagtaattaaacgagagtgagttggaaaaaaatagtttagagaaagatagccactaggaaacatatcaataaaaactgagtcattcacatgtttcatgccaaaaacacacgctttctttcttataaaaatgacatattctcactgtatgttgtttatattatttctcgaacatttgtgttatcttaattggaatggtgaaattaattcggtttatctgatgcagtttaattactatgatctgatgtgatcaaaggaaaaatgatgaagattgaggaatagatagctctagtaatgttttggaagtcattcatcataaaaaatgattttggaagtcgaagagagaggggtccaaaatcaatttctgaagataattaagaaaagagaaatgtcatttcacgtggtccaaatgattatataatgtcatatggtatatggtcattctctacttctcttagtttacatttgttattttctcctagtttctcttctgttttccttttataaagataaaattttattttagaaatatgaactaaactcaacggaaattaaatgatcagtcttttgttaaaagagaactagcaaaattaaactcagtagtggcatatcacatatatgtaattttgttatttcttattccctcattccgcaatctctaattgcaatttgcatggaacaaaaatacgttggttcggtaacatcaaacgataaaaggagacgaaaatgagatatgcatgcatgtgggattgtgtgtctatgtttttctttctttttaagtcaattatgcaccaaaattcatttccttttcaaaaatgcatccatttactattgtacatctagataatatgaattaaatcgagaaacatttcatatctgcatgtaaatgcatcatacaaatatacaaataaataacacttaatccattttaagcgaaaatcaaactaaaaattatatgaagcgtaattttttaaaaagtcttaagaaacgccatactggctcaaaaatcattaggtaatattgacacagttaagttggaagacgtgagaatgtgatgatggttcttaaaatttttgaacgcacgttaaaagacagcaattcaattattttcctttgtctacaaacgtctaaaatatataggaccccataattcacgtgacaaattggtcgtaaacaaatcaaaatatgtattatatgttactgatggaacaaatcatattggagtatcgaatatcgtaggtttaagaagtctgatgattttgtggatccggtagcacttgttgattcacactcaacacacctaataccttgtatctcttgacttttacctttatttttggcaagattacaaacgtttggttaagctattttgtaaaccctcaactttctttaatatgtatatcaaaaaactttcattaatatgatatatattcacatttctattaaagaaaaagagagaagtcaatccaattataaatacatccttaataagaggtacatcccggtacatatatatactttaaacaatcaaaatccaaaaaataaatatcaaatatttaaactaaaattctaaaaaataaagattaaaagacttaatatcaaatatttagaccatcatttacattagttccatcaaaaatcatagaaagcacttgaaaactagtttgtcgagagaaagatgttaaaactcgagtcatacaagtagttaaatcttaatatttccaaacttttaaattattaagttcccaaaataaaataaaaaagatttttcgcatttccaaaacagaaacgtgagtttccatcatatttccaaacatagaattttagaaaacgcgttttcgtaagttttcatctaatttgcgagagttttcgttttcgaaacgtttcagaaatgggaaacgcactgcggaaagagttttcatgcaacatagacttaaacgcaaaatatgacagtttgttttagtttgttaatgataaacataaaagcaaaaaagaaaaaaaaatacaactttaccaatatcttctatttagttgaaatttaaggatctttgtactttttgtctacgtgcataacaatctgttttaaaaattgatgttatgtaaggaacctagctacttagctgttttcaccggatatttgagctaagattctacttagctgatatctcacttgacgcacaatatgattgtttgttttagtttgttaataatgataaacctaaaagcaaaaataaaataagaaaaaacataaataataatatcaactttaccaatatcttctaatattatttgaaatttaaggatctttgtacttgttgtttacgtgcctaaaaatctgttttgaaaattgatgttatgtaaggaaatcgccacaaactccacatagtacaaaccaaaataaccagaatacacttgtaacagcaaaactaaaacataagtaagaggaacatgtgacaccaccagctccaatattggttagattggcagacaaatgatattttaaaatgtataaaatcatattgaatatttctaaacaatatattttttttcgttaagcacttaaacctagctagttagctgttttcaccaaatatttgagctagattctacaaatatgcaaaaccaatgccatgtattatggccttatggttaaagtcatctcaagcatgtatcgattggttagagcatatgacctaagagagaagcctcaactttgatacatttatcgaccagctatttgttatatttattgttttatgtgcgagggacaaaattagatcggtccaaacacataccactcacactaactctgcaaatatctgtctttataaacctatgacccttaagatttgcatttcgacatctcgcggcgacgacaaagtgtatcgctataaatataacacagcattccccttagttgaaagtcgaactgtataaaatgttagcattccctttagttgacagttgaacagtatattctcaaaatcatgacactttgtctcttatttcacccgagagaaatcacaatttgcaccgaaataaatactctcgtaggtgaaaaaaatgaaaaataactcaagcaaagggacataaatgggcctttatgttgaagcccaatttaaaatttaggttttagaagaagaaaactttatttactaaggcagttagggcttatatgtttaggcccaatattgttgtgtcttatggacttaaccgccacaatcttttgtcgccggtaacagcaacgggaattttcatggcggcgaggtcaccggacgttatataatttgtatcccaaatcaaaattctgagaaggaagagaaagcaatggaggacgaattggaaggtctacgagctcattttcctgtttcgttcggtaagacatcgaaggtttcggcgtcaactgaagccattcacagcgcaactcgccgcaccgatgtagccaacgacgccggagtttcgtcggatatcaccacgaagaaacctgattccgataaatctggattcccgtctctatcttcctcatctcaaacctggctccgaagtgttcgcggtccgaatcgtaaccctaacagctccggtgatgtagcaatgggtccgccaccgccaccgtcatctaaacggacgcaagaggaagaggaggaggatgaagaagttatgatgggaccaccgccaccgcctaagggactcgggaacattaatgattctgatgatgagggggatatgatcggtcctccgccgccgcctcctgctgctcgagattcagatgaagattcagatgacgatgatgataatgacaacgaggagaatcgttaccagattccattgagcaacgagattcagcttaagggacatacaaaggtatatactaaactcttgtttgaagtagtttcaatggagattttgaattcgaaattgaacaaaggtttttgtttcctggaatcagattgtttcatctctcgctgttgatagtgctggagctagagttctttcaggaagctatgactacactgtgagaatgtacgatttccaagggatgaattcgagactacagtcttttagacagatagagccatctgagggacaccaagttcgcagcgtgagctggagtcccacttctggtcaatttctatgcgttactggctctgcacaagctaaggtagaacgttcgtgaacaacactaacgttactgactctcttctacgattctttatcatctatgaattgttaacactcgtttctttcttttgaatttcagatttttgatcgagatggtcttactcttggtgagtttatgaaaggagatatgtatattcgtgatctgaagaacactaagggacatatttgtgggttgacctgtggagaatggcatccgaggactaaggaaaccgttctgacttcgtcggaagacgggtctttgcgtatatgggatgttaataacttcctaagccaaacgcaggtacatttcccctgtctacattcccattttagtttttctccaatgaaaatcgtggtttgatttcagcatgcaagtggtatcatttaactgtttattggagcaggttattaagcctaagcttgctagaccagggagggttccagttacaacctgtgcttgggaccgtgacggaaagcgtatcgccggtggtgtaggagatggatctatacaggtaatgattgtagaggcttgctttgatttcctgattacactctgtcaggaaaagtttgtgttttatctagtctaacatgcttagaatatacgatgtacagtaatttggctagattaatggtcttataccttttcttgtttttcgatcaagatttggagtctcaagccgggatggggaagccgaccagatatatacgttgggaaggcccacactgatgatataacctctgtaaagttctctagcgatggcagaattctgttgtcaaggagttttgatggttctctgaaggtaaaccttagataataacctgttttcgaggctcagctatagaaactgagctatttcttgaatcttggatcaggtctgggacttgcggcagatgaaagaagctctaaaagttttcgagggtctacctaattattatcctcaaaccaacgttgcctttagtccagacgaacaaatcatcctgactggaacatccgtcgagaaagacagcacaacaggaggcttgctatgtttctacgatcgcaccaaactagagatagttcaaaaagtcggaatctctccaacttccagcgtggtgcaatgcgcttggcacccgaggttgaatcaggtaaaatatcaacaacaacaatagcagtgttccctttttctaaaatctggttctcaacttcacactaagcgggttctgttgctgtagatatttgcaacatccggagacaaaagccaaggagggactcacattctttacgacccaagtcagagcgagagaggcgcatgcgtctgtgttgcacgtgcaccaaggaagaaatctgtagatgattaccaaccagaaccagtaatacacaatcctcatgcattaccattgttcagagacgcaccaagccgtaaacgagaaagagagaaagcattgaaggatccaatgaaatcccacaagcctgagatacccatgacaggtcctggtcatggtggaagagttgggactactggtagtggcttattaacacaatatcttctcaaggtacagatcctcggtaacttctttggtttttggattcgtggtattagtgatacagtattaaaatcttcttcttgtgtgtgtttgcagcaaggtgggatgataaaagagacgtggatggaagaagatccaagagaagcaatattgaaatacgcagaggttgctgttaaagatccaaagtttattgcacctgcttactctcagacccagcctaagaccatcttcgctaaatctgatgacgaagaagaagaaggtgacactaaaaaataattagagtttttcaaattcaacgaccgtttccttgtattctgtataatgttatcatatcgtggcactttagaatatactgaaagaacacattcatccccgaattgcatttttacattccgccattgtcatcgttaagtttacagaattgcagtttacgtaacaattgtggaacagcaatttttgtcataatatatgcttcgtaagaaaatgcaaattagatactatgcagcatgtctattgaaatcaaagcacttgaattaagtaaaaagggttttcaagtgttctgttcaaactataacaaacaaaagcttctattgagcggtggttaataatttacaagagcaggaaataagttttcaaacaagtatgttaatggtaaaaatggatcagaaagatccagacacgataagcatgtctctgttttcttgttttcttacttttccactgcagtaaaatctgagttaaaacatttgtattccatcacctctctctctctgcgtatatagggtagtaaaagttaccctcttttgcttttcttttccttcttttcatatgatttgactttggtttgtttcttcagttttgtattgtatataagttgatgacaaaatgagcttcagagactcccgttctcaaagctcgatagtcgcgagtctgataaaacactaaacagttgtgtgtctacaaataactgcaaaacccagaataacaaaggatggaacttgtaagcctctggattccagtgagaatatcaaaaactgatgccacgattgggattaggattttgtaccttaatgaagggtcgatctctaccaggaaatgaatcgataaaactgtcctttagaagtagagaaacctgataaagaaagatttagagagttggtgagagatagaaataaagtagttcttgttcagcttcgaggagagtagctatataagtaagtaccctgtcgctattggattgaacacttgttatggtgtgagagtgtaaatctgagcaaagagactccatgtaatctctcattactctcaagaacttagtcgcggcttctgcctgagaaacagtcagtcatatgatcgggttaagcaatttcattttggtagaatttgaggtgcaatgcattggtaaactacttacttgcacttcattgcatttataaaccgggtgtcttctagcgttcgagctctgatgagccaatgttgcatggattggagccaactgagccataagttctctacactgaggcaatgctggcatgttacatatttttacctgaagaaacataattaacgttacatgccttgagaattgtcggttttatcggttttggatacctaacaaaaaaagaaaagaaatacaagactttcatgataaggccaccgaacctgattgttgaggatgttaactagaataagattagacgtcttgaccttccaatcaataggtttactgtgtataccgacctgccaggtggtgcaaacgcagaccgtgtgagcaacaagaaaaatgcattgttcacgattgccgatgcaacatcaactaaaatcgagattttcatggtttattatagactaatgaacattcacctcctcagaataactaattatctagctattaaagacatggcacgagatacttcatacggaatatatacttacaaggaagggaaccggtgcctcgaggaaatcaaacatccttccaggcagaacctgaagacaacagagagaagttacgccaaggaaactacaattttggtaagtcaattgtttttctaatgatgtcatgcttaccggaagcaataaactctgccactgaaatggccgaatcattggtacaagagacagtactattgctgacaaaacaccctgcaatagttgccggtcagttcaagtgaccatttccatttgaatctcctcaagtaattgaagataaataacgatcagaggacatatttaactaaccagatttgggcagattataacaatttgcttctctaataatactccagcaagcagtgacataatctggaagaaagaaaataccttacaacttcagatatttgttatctttgaaaacactaactcaaggcacaaataagagatggattttatataggttgatctaaaaccgacactgaaccatcaaaagaaaaggaaagatgctaagaagagaccgtacagtttcaagtgagagaatacgacaaactgttgccgttgtccacattgagagacccatggcctcctcagcagctgccaaccttgcatttatctttggcagaagaagaaaagtggttgagatgagattataaagtcgagacaagactagactacaaaaggatattatctgatatcaaatatacctctttagaatcagaagagcaaatatattcttctgacaatcctagagctgaaactggaggacgggtatacgagattgattgtaaatgttccagggggtggaaaactacttcacttccacgggaaggaattgccaatgaatggtagccgcaaactaattgtaaggaatcattgttgtggtcctatcaagttgatataccatataacagtatatgagaacaatgaaggagagatgatagagcaactaaaaggtgaagctactagtgatttccttactttagcccattccagtattaaatcatctccaaaatcattttcgctattcgataattcatcaacatcatctgacaacacacttctagctgaactgccatatataaaaatgtaaatctgaattatactgaatcataacattaactgaaaaaagacaaccacattacttttccagagattagagtggttcggtcaatttttgatgaattttacctgaacacagactcacagctttcattacgctctatcggttgggtcctaggatcagaacatgtaacctctggagaagtgtggccattgtcatagctctgggacgttctttcgggggtatccaagtggttctcaaatacttcaggagaattttcatcgtaacaatggaaaacttttcttccgtctctttctatttccttgatctggctaacatctgaagtatcactggtgacaacactatctggagattgaggttctgcaaaattcgcaatgtcactatccgttatcagtcctgcagctgcggcagtgagtgccatgactccatcaacaggtattgcagaagccatccaatcatcagggttgctacgaggtgatgaaacacggctatcaatttgatcattcctcctggatattgatggaagatagcatgcagcagcaagagacatctcactaacaaattcggttattcgttttagacgctcttgtgcaatcatactgcatcaacaagtgaatgaccttcagcatatgttttgcggtctctgtttaatgcaaggaaaaagcactactaagagtaggggcatcttatgtacctgtttaacatctcaaagtgtagttcaaaaaaagggactctggtcaacaagcagtagcatcgaggtgcagaaaccaaaaaacgactgcctcctccagatgaatgcaagggtgacgcagtgcttaatacaccagggggtctctgaacaatctccgagacatgtaagcaaacaccatacaatgtcgcatcatctgctacctgacagataattttgatttgcctcgtgttagattttacatgactagtggatatctgacactaaaaaaaaattaaaggggcataaagaaatggtaagagtaccttgaacgaaaatatgaatgacgaatcatcagtgcctaaatgttcctgcagtaaattcaaaagtatgatatgtcaacctatgttccaagtaacaggaatgaactactgaagctcctacagctatttattcaaaaatattttcagacctgtccatacacaagctcatttagatcactgagagatggggtcctctccaaaagtcgtgcctgttaagaaaaataacgttttaacagtcttagttgctgcatatattacagaatagcctaattaatgatgccatctaaaatgatgcatattattaacagtagtacgaaacaattctagtcttctaggtaacttctctaattaactgaggtggctcataactatgaatctaccaatgcacattgacagtcatttaaaaattaaaaagagacacaccatacatatcataccttgacaccaccaggaaagcagaaagttgctagatcctttggacgcattgctaccttctttccgggagggtatttaaaaagaatctgtgcatggaagaaaagttgataaagagaagaaagaaagcaactcaatctgccatgaagcagaacaggcaagcaagaatgtattcaaatgaaataaaagagtggcaaataaagtatgcacaagaaagaaaaaaaacgatgaataggaaacagaatacgtgtctcacgttacatctctaagcatgctcaaaactatgtaaactcaaagaaaaaaacaaggtagcacaaacctgtggctccaatataggaaattgaggcccacggtgacggagtattctgtaatctgccacttcataccttgacatctccatctcccatttctttcttctacggaaagcctcttccactggcctcaaattcgtttccggatgaagccccacgatgataaaatgttcaaacagtgacgctggctccttcaattttgtttgatcctagagtatttatcaaatggaaaacattagtcagctaatatgccatgcaagaccagaactttcagacagttaacggggaagaagaactacgtagccaaaaacgtagacatcctagagagattgaataccagagcttttgaagagtggagctggtaccactgtcttttttggtttgctaagacctcaggattgaaagtgggccggttatcctcacgcagattgctgacaccacgccaagccttttgcatctgtgttttcaatctctggaaactgtttgtgcgtctgtgtccaggagtccctatctcactttgggtgcgcctatgtccttgtgtaggtgactgcggtaagactggtccattgaagtatacgttttgatatgtctctccagctactttaactgcatccgcagtacatggcgaagagtcttgctctcctataacttctctcatttccatctttctaatacttgtattattaacttgtgtctcgcatcttggactctgcagttcattatcttcactgttcttttccaacaatctgttctcatccctattttcacatctatcacatgctgctgtatcttcttcggttccacctaccttcagatgaccatttaccacttgtgtatccagttctttaatctctttactaagagtaatgtcatccctctctggtgaacctgaagcagattcttcattatcccttgacacaaaatcgagtaccttttcatctctctccaacacaccttgttcatacagcttaaaagactcatgtccattttcatttttccaagatgtaatttgttcatcacctgttttacacttactagttacaggactcctcacaccatctctttccaccataatctgtgcttcactcctcaaggtaccgaattcgtctctacttatcgataccttctcctcgcaagatgtagtcaactcctctgcattcaacaacataccttccttaaccatgtccaacgtattcctcctactcgaagttgtccatccattttcatctccatccctaaaatcttcaacatcggtcttcttcgggtatcctaatatatcatctcgatgaacagccaaaacgtctccctgcatatccgtattaaagctcggcttcatacaccacttcctcctcctccctcacacaacatcagccaaaatcaaacaactaacacaccaacaaaatctctcctaaaacacacacacaaaaaaaaacacatcaacaatctaatcaaaaacaaagcaatattatcaacacaatcctacgatcatcgaatcaccaatcctttatttataacgaaaccctaatttttttagaagagtttgaaatcataagaaaattcaatttttttttggtaagaacgaattcaaggttccagctaaacaccagcctatgcgaatcaaaagaagatgatcacagaatttaagaattagatacctttcaaatcctccagcaaaatcaataatgctcctgagagattttgttttttaatttcaggaaaattcaaacacgaaaaagaggaagaagagagagagagcttgtaacggaagcttggattatggagggaaggaaatgaatgcgcggtgaagaagattagggagagaagaagattacaaaacacaaattggaacaaacaacaacaaaagtggaattgaatcttcttctctgggaggggtgaaaaagacagataaataaagtttgtactaaaaatagaattatacgaaaaaggggaggttatacttgagaccaggagaagaacagctttttatctttttttatttgtctttttaacctctcacgttttttttcctttaactctactaaacgtggtcttcatgttatgagcaaatacaaccaaaattgttgattaatttgacttgttttgtctaatttaaacttcattactttcattcccacacaattaccaaaaaggaatagcaaatctggtattcttatgtagtcatttaaaataatctctcatttattttgccaagattcgttatttaaaaaatagtagaaaatatgaaaagcttattaacaatttcaaaaatggtataataacaacatatgttactattttctccattatgttacttttgcatgttatggtgcatgtctttgaatggacgtattttatatatgcaaaaatatttgaaactataatacctaaatagcaactttaattatgaagagggagcagaaacttcatttatctgattttcgatcatcagatttgtttccaagttctagctctatgcataattatgagtttggtgcactatctgttcttacaaacccttaatcgttgacttcatcgctaagtttaactaaatgaagtttcagttttatctttcaaataatcctttccaaaatcttaccacaaatgttatcaaaattgagtagggatgcaagaaatttgactttaatcgatgtaattcttaaatcgtgaacttctaaggcccttaccaaagatttcatcgctatagtgtaattagcaaaaaaagaattaaaaatatatattgtcttttttagtagctttgaactcataaacatatatattcgtttgacttataactcaaaagaattataaatttcacttccaagctattactctctttatttatttgtctctgtaatttctttgcctatttaatcttcagaaactttttagtagtaattctcaacttcgctctagtcaagtttaaaagtagcaattttgctgagtttagctaaaaactttgttctccttgattcatgatacaacaacatagtgttatgtcccattatgatcattgcattttaacacatatgaccatgctgccacaattttcatcattgcattttaaggtgtgtggttcttcttttctagccatttttctatatgaaaacaaattgtaatatccgctagttcgttaccagcggtgctcacatcttaaggtcctgaaacaaaacaaacatttccttcattacttatatgtaatgttattcacctaatcaaattttaaagaagaaactctaaaactttgacaacattgttatatgtggatttcacaacgtaatatctaaataaagaatcttgattgaataacaactgattgtacatgacattttaagtcactaaaactcttttaaaatcataaaccaataacaccccctaagacctttttttattttattattgacaacattcaatcatatctggattttaaaccaaggattgtgatacatcaacgataatagtaagacaatttattaagctataaatcttggtcaaaattatggtttttagttcactgttattaatgtcaattcaattttttttatcatatatatatatatataaaatctacatatatacgggcaattatctattatctaaatctataatcattatctttgaagaacattagattaaaaaatgacaatataaagaaaatactttattaggtatgaatctactaacatttaatcaaaaaaatattacaaaatcatccatgaaatgtctttttagcttgtttccattactttccaattcaagttttaaaatgttaagccaagctacaaaatatcaaataaattatattttgttcgaatcattatatttatattttgcttaaagttaactagctacttttattcagttttgtaaatgctactacttaaggaaaaaccatccaggaaacaaatatagtggtaagagaattatagcaattatatcacgatgtaccttaaaaatattttgattgcacaatatacacttttagcaatcaataatttgtttaggatcaagtacttacaagatctataagtcaaagatatttaatttacgaaaagaacaggtctagcataatatcggatgactcggattccggaataatttaaatgaatcttatacttgattacctcatagtattaacgaacgttaatgttgattacgagatttgactttgtagaagttatggataaaattaaaagaaattaaaagtctttaaccaatatatgaaaaactaaaagttcaggtcctaaacttgtaagcgttgaaaatttggaattgactttgaatgtggctttaccaaacccaacggttgaatattgttttaaatgtctctctcacgcgctacattcttccttctatctcagccgttcgatttgactcttacgagatctctttgacttgaataaaaaataatcattaatgttaattttgttcttaaatgcaatacattatgtattattcgtccgattgttaacaataatgaaaaagtttagtaaaaaaaatcgttaacaatactaatatagctatacgaaataaaaaatattaatacagaaagttgaaaatatatatcgccagtttttaccaattttggtactggttttatgattgaaataataacacttataccaccactatggtacgaattactaatcaagttgaaacaaatatcaacaaatttatataataataaaaaaaacttatcaacaaattctagggtttgattttcatgaaaatattgttagaacgtgcacataacacgctaaacgttggatattaataaggagatgcggaagctgaggcattgataccgtgaagtgaaggaccccctaggccgcacatgcactttgtgtcttgggaattgtattgcttacataaatatttcatccgtttccttacaacaaattacgagttttcctaaaagttgttttctgaagcaaagaaaatgatttgttttaatattgtttttacataaaaggttgggaagaatttgatcatcaaaccaaacaaatgaacaatcaatgaaaaacatataaatccatcaatttctataatcagcccagattcttttgagttgaggcccattaggcccatattcatcatatacccgttcaaaactcgtcatttcatcgtcaccaccaccagtacaacatccgctttttgattccaaaccaaaccctaatttctcagctcgaagtttccatttcattgcttcttcttacctcgatttttcccgggtattagaattcggtcaatttactgaattatagtgttctcacatgccaactgattctacttcaaaatcgctgcgaatttctgcgatcagttacgaaaattttgtcaatgggttcgggtaatcatgttgatatagtcgatgtgagctcaggcgaagaggatgtcgatacacggggagacgtagaatacaccgattggctaaacggtgttatggaacccgtcgatgatacatctgacagtaccgatatagtcgaggttctttctgaggttagaggtggtgtaaattctcagtatcggaagccaaactcgtcgaatcaagctttggaagatgatgacgactgtgtgattttggactgtgatcccgacaagacgagggagactacttcagttgacgacgacgatgatgatgatgtgcttgtagtgggtcaaaagggtgaggtatgttttcactgaacccttctcatttctaagttctctttcgttttcttcattcgaattggtgtgaaaggcagagtttctcatttcagattatgtatgcgttagtgttgtttagctctgaggaactgttttaggaatggatagttattgaactgttttgtgttattgtaaagtaatcgttgtaacattgatgaactttttttctttggtgatggaactgttttaggaatggatagttattgaactgttttgtgttattgtaatttaatcggtgtaacattgatgaactttttttctttggtgtgttccatctttatacaagtgttgttcacttaagttttcctaatatgaaaaagcattttttttgttttgtagatagcatgtagagatttccctcatccgcgacattcgtgtgctaagtatgcgttcaactcaacatcacatgagaagtactgtgacatggtaagtatctaaatattctctaattctacacggagcgttaatggattcttttcctggctgatccttttcatttggtttctctttcaagtgtcattgttatgtgtgtgacatccgtgctccgtgtccatactggtgtatcgctgtctcctccatagatcattgtcatgctaatgataaagagaagatatggaagaatcaacgtgaatacttcaggacaggatacatgcctaccgcaccatcttcaaaacctactccaagtattttacgggtacccaaaaacactttgcttcggaaaaaccatgttgagatccggccttgttcatcatctacccgtgttgctaatccttcaagtgtcaaagccaggcatagaatcaggcaaccgattccgcacaatcaagggttgcagagtcaaccggcacagtcattaagcactgttcgcgacagcgtgatccaaaaggatagaagttcttataggtttagcctacgatcccgagtagcctcttctgcgggaaatggtatcagcatccgatttaacaatgctcaagtttcacaatccagtcaccatagctcttccacagtggcacctacattaaacccggaaacgtacactcaacaacgcaatgttcgtgatcattgcacagcgctacctggttctcagagcaacgtgttcactcgacatgcagaccagaacatacgtggtagtggaaatcgtcagtttcagacaaatgtggatcggtttgctccgtccaaagctcctcttactgctgaagattcgcatacagctacggtacaacagcaaccagggattaatgaaaacgtcttggagaccaaactatcggaatttgagaaatggctaatggaaaatcctaacccaaccggccctgttagtccgttacctgaaccgggaaatcaagactatgctagtacgttgtcatttgattttgaaacatttttgaatgattgaaagattcataagggtagtttgtatctccgtccctaggttaactctcttcactgattgtattttgtagagggagtgctgtagtttattacaatctcgattgtgtgtatcatttaattagctgctactagtacatcataaaattaagtcctaaaaagtacctgtttgccaattgacataaataatgtttgttgatttgagttttttaaggtcaaaaatcaaacataccatcattatcactgcctgtttaaatgattagggaggggaaaatatccatgtaatgtaaaagaagacaatcaacaatcgaaaagcgatagatatagaaagaggcacacacatatggtcttgattaaatttgatcaaacttctattttgcctaatagacaaatagtccaaatttatcaaaaccggaaaaacattgttatattttggatcaaaattacttctaccatcatttagttagcttttaatattttagaaacaattgaatttttgacccaaaaaaagaaacaatggaaataactgataaagtcttcttaaaagtataggaaattttgccaagtatatagtattaattttggaaacaaacacgaaaatggaatagttttgagagttgatacttgtcatttgtggaattattactattactttttaatgtaaaatatttcgaaaataaacttttaacaaaagtaaaatccgaaaatacttagtttccaagtttatagaaatcaagcccagcccatttggggtttttaatttttttttttttttttttttaaaaaaaaaaaaaaaaaaaaaatcaaacccaaaacgattccgtttagtaggctaaaattcaagtaagtcccggcccaataaggcaactaacgcccaaaaaagaaacggttttgtcgatgtgacggtagcaaacggccaccagttttgtcgtttcgatgtgcgtggccaccacgcgcatacgaaaccgcgtcggtgttcgctaacgccatcatcatcgccttttttttttttttttttttgcctttctccgaaagcagtctcactacggcaacacactaccctacgcccccttcccaccatcagcattaaattctctctctctcttcgcttcttctggtttcgaattcactttactctcttcgcttccaatctctctctaccactctgataccttcgccggagaagaagctctcgttctctctatcgtcggagaagctctcgttctctgcttccctgctctgtacagatctcgagccgcatttcgtggatctgtcaaaatcgcgttaaaacctactcgcttctctctaaccctagggtttttgaatttttttcgggacgagggagaaatcaatgtctgtgaagctttgaggaagctatatggttacacctttggttctggttagtcttcgttttgatcggcggagagtgttcgccgaggcttggtgtctccgttattgactaatggtggtttttgatttgagataagagatgcggaactttgcgatgcttctgctgttaattcttcttcttcactctctcgcctcgtttcctatatgctttggtatgaactagttaacaaatttcttttccccttttcaaatttaggaaacgattttgataggagaaattaacctttagttaagttgctcttactttgacagctcaagattagttggtggtctatctatatttagaattgtttattggatttagatatatttagaagctaattttggttatgtacaaagtaagcaaaagagtttagattatttaagtttggaatctgtgattgtgaagcgtgagagtgaagatcaagtcctcacgttttgtgccttaattggcacacaaccttttaatagctagaatgcacatagatcttactctttcttttctgagtatcttgaggaaatatcgattttgtgtgacattctcttggccaaattttatcctctacagttggcattatacttttaaacccaagagaggaggatggagtatgcatactattagaaacattctattttttcgaaacttttcactgctatgaatattcgacatgtgtagaaagaatctatagatgacttatcagcttgctttatcatttgcagctcggttatttccgatgagtttgccatttacccgatcaaaggcgcatcaaatgcatttctttcatccttatcttaatccatcagttgctcctacaccttcaccaggtcagtaagggaatcctatttgtcacctaaacatagtgtcattatgtttctgtctaggagtattcattgttcattgtctttccctttttagctttttcccccaacccaagtcgcattccaccactaaggcacaagggtcatcaccgtcatcgtcgctggcatttaagacgcaatgccactgcagtgtcaccttcgtcacatggtagttcttttgcttcttgttggttatcctgcgtcctattatagtggcaacgataatgttttatatgaatactttttcttcagacttcagttgataaatcaagcgtagtaactactttttcctgtgtatttccggctttccttttgatagactgtcagcagacatgtgtggagcctctcacttcaactccctttggttcaccttgtggttgtgtcttccccatgaaagttcagcttctactaagtgtcgcacctttttctattttccccgtgaccaacgagttagaaattgaggttgctgctggaacatacttggaacaaagccaagtgaaaataatgggtgccagtgccgacagtgaaaatcaagggaaaacagtggtggatattaaccttgttccacttggggaaaagttcgacaacactacagcaacacttatttatcagagattccggcacaagaaagtacctctaaatgagactgtttttggtgattatgaggttacgcacataagttatccaggtaaactgatttcattcagatgcaagtttctactttttttttgttttatttcaaagtttgaacttcttaaccttgcttcaggaattccttcttcttcgccaaatggagatgttactggagatgctccaggaggccttccaattccgatcaatgcaacaacttttgccaacaaaagccagggaataggttttagaacgattgcaattattgcgttgtcaggttttgtcctcattctggttttggttggagctatttctataatcgtgaaatggaagaaaattgggaagtcatctaatgctgttggtccggctttggctccatcgattaacaaaaggcctggtaattttcaccctctgacttcttaacgcttctatagctttaaaagaacctgtttctgaaaaatttattcgccttgcaggtgctggatctatgttttccagtagcgccagaagctcaggctcagattctttgatgtcttccatggctacatgtgctttatcagttaagaccttcacactctccgagcttgagaaggctactgatagattcagtgccaagagggttttgggcgagggcggatttggtcgtgtttatcaggggagtatggaagatggaactgaggttgcagtgaaactgctaactagggacaatcagaatcgagaccgtgaatttattgccgaagtcgagatgctaagccgtttgcaccaccgcaatcttgtgaaactgattggaatatgcattgaaggtcgtacacgttgcttgatttatgagctcgtccacaatgggagtgttgagtcccacttacacggtgacatattcttttctctgcacttttaataacaatatatcccaattatatccatcacttctcgttgcatcaccacctaaaacctggctttccggttgttgacaaaacagaaggaacgcttgattgggatgcgcggttgaagattgcacttggagcagcgagaggactggcttatctccatgaagattcaaatccccgagtaatccaccgtgatttcaaggctagcaatgttctcctagaagatgactttaccccaaaagtctcagactttggactggcaagagaagcaaccgaaggaagtcaacatatttcaactcgagtcatggggacctttgggtaaaatttctttccaactcaaatatgatgaatacagacactctggacttacagtgactaccctggaaataatttcaggtacgtggctcctgagtatgcaatgacggggcatctccttgttaaaagcgatgtctatagttatggtgtagttctactagagcttctaaccggtagaagaccagtagacatgtctcaaccttcgggagaggaaaaccttgtgacatgggcgagacccttactagccaacagagagggcctggagcaactggtggaccctgcattggctggaacctacaactttgatgacatggcgaaagtggctgcgattgcctccatgtgcgtccaccaagaggtctcacacagaccattcatgggtgaagttgtgcaggcactaaaacttatatacaacgatgcagatgagacctgtggtgattattgcagccaaaaggactcatcagtaccagactctgctgacttcaaaggcgatctggctccttcggatagcagctggtggaatttgacacctcggttaaggtatggtcaagcttcgtcgttcataacaatggattatagctcaggaccactagaggacatggagaaccggcctcactctgcctctagcattccaagagtaggaggtcttattctaccaaacagatcaggtccgttaagacccatgcgtagtagaagaaacttctttagactgagaggaagcatgagcgaacacggtggaccgtcgtcgtctagacatctctggtccggcaatggtgactggctctgagaaaccagaaaatgtacagtgaagaaaagggaaaaggaggctcacaaactcttgagctgcatggttaggttctggttaatccggccaggttcggttcatctgggtaaagatttccggtttgatttcttttaggagctgtttgttgttatgattatcctcaatagagatttaattgtttgtttttgcgaggatgcaaaagcacagggagggttgtattttgaaggacgcctgtatttagttctctccttttctctctcacccacaaaaaaacatttttatatattttattttagtgaagttagtaattacctaattttttttagtttttcaagttcctaagaaatttggcttttggtcatcgttgttaagtttccggttttctgaatttacatccgaaatattttttggttaaataaaattctggcttgagagtaattggctggtgaatggtaacaagtcacttggtcaaagctgttgtaattcttttctaatttctagtatcttctgtagattggacacaatgacatggattgttgatctttaaagtcgtagagtataatttgatatgtttgtctttcttcctccatatcttcttaattcctccttccacttcagccaaaccgaagcttgctttcgagtttctgagtcttcttcattttgttatacaacacagtctaaagaaagaaaatctgtaggcccaataaacacaaaaatcgatttatgggctaagcaaacaacggtcacagtggctgagtaaacggaagagaaaaaaatattttaaaattttgaatttaaaattaataaggtcttattgggcctacattatgaaacctatctaatctctcgagatataacagttgaggacaaaacgctaaaatccgtttgcgtttggtttatattggcaaaagcaaaataatttttaatcgaggaatatgtaggaacgtccgatttaagtatctgactgatcagatcaacgtgaccaaacgaaccatgaaatgaatgctactggaacccaaagtaaagaacaaagaaactagaattgctagttagtattcataatattaatagttagttttttaagaagttaattttttttaattgctaaatatttttaatcaatagttagttttttttcttatattatcaattaaatatttattaaaattttcaaaattaccgtgcaaaatttatactaaaaaattatatactcaattgtttttcatattactttcttatgaaactcatatcgtcatatgtattgagtttaattgtaatgatttattttctaatgaaaataaggagttaatattttccaattgatatgtatatgtgacgtatgagcgaacaaaaaagaagaagaaaatatatttgtggttatatagaaaagaaaaatgttacaaaaaatggattgtaccgaagacaaaacctcatgagtcacttaagtagagagagaaaccaactgagccaacatatcattccgagttttgttttttgtgtctaaaccataatttcatgtttgtgttgtgtgaaagccatggaagccggcgggagcaaaaccaagaaatgagttgcttgctacaagaggtacaattcttatagagaatatgtttttcacatcaagattgcgttccattcgattcatcagccttagtgtggggtttgcttcaaacattgtaaatcattcgaatctgttcgagaacaccttcacggtatggcttgagcttatatgatcttcttgttctctgtttttttgttgggttggtgtttgattgatgattattttgaacaatgtcagttccgaaccatccctctcgaccattcaaagaaaaatgcaaaaccattttcgctgaaaaagggtgtgaactttgtcttcaagtctttgtggaagccactgctagggatgagcatatgaaagagtgtctcatgtcttcaccacctcctatccaaaatgcttctagtgcaagtggcacacgcgtgatgagtctgtgcatatctaattttagaaaaaactattttgactctagtggatacaaagatgtttttaacattatacactgttaaaattgagtttttttcaatgactttatcgaaaacatattgcgttctataatattaatcaaagataaaatcctaataaaacgtaaatatataacaatttctttttttaatgaatagtctataacttttcttaaaatataagactagtatgtatcatgctcataagatggaaataaaaacatgttaaaatattaaagaaattataaactgaattggctttagtggttatttaaatttcaattaaatttatttgatttaaaaaaaaagaaaatcttctaaattaaattggctttaacggttatttaaattttgattgactcaattcatctacaattattttttaagaaattttataatttacaattttttttttttgcctagccgtatcggttagggtcatgttgatctttaaaatataaatttttatttgtacggaccgagatcaaatatatgcgggttttgcagactaacccaattgacatgcatatttgttccaataattatgtttgttctttggatcttctaaacttaatcacttagtataataataaagaccaagcagaaacaaaatttatagcaaaaataaaacaagaatgattgaaaaaaacaatagcaatttaaacaaaccacaaaagttttgttctttcatcccaatacataaaaatctatcaaaaagtgaaactaacaccggctttttcagtttcactattgttttctaatcatatagcagcaaaagatataaatataaaccatgttcaccggcaagtaacatcgacacatggaagtgacaaaaaaaattgtaataattattgcttaagtctcaagtatgtggtgaaggtgtcgcttaatcacttaatttttttgttgtatttgatttatcttcgtattgtttacggaaaaaaaaaagaagcctttgttcaaaaaaaaaaaaaaaaaaatgccaaaaaaatctcacatgtaatttcgattaaataaacaaatgaacacaaagtttacaattcaaaaggacctcaccacagttgttgacttgttgtaatatgtttttctaatttcgtgtacatattattagtataaaacgtggaaggtttatgtaggcaagtggtttaagttaaaccaccaattaaccagacactttggcacctgatgttcaatctctttcaataatcgaatccaaatgtatggcttactaactttctgagtaggtgtagagaaaccatatttataaataaaactattatataagacactatttatgaattttcattttcgaaatcaaaagacaaactttctaaaaagttaaataaatttaaggcacatagtatttttttttttaattagtaaagaaaaatctaactcaatttaatgctaataaagtagaaaattaacaaagcaccttaatactattaatcttaaaattaactattttcactattattaacatatatttttaaataacttgagtgttttagctatcatatactataaatcatgaatagattataatatattcttataaaataaatgatctaatattaactcaatttctttctaacatatattttctaatatttaacatttccattaaatcaagtcacattttatcatttcataggttcactgagattttttactaaaaaattaatgacataaagaaaatttcacttctgaataagcatttagaaatgtctaattagtttaattaaaatgatgtgaatatgacgtttcacataagagtttagagacaataacttgataagttagagtgtataagggaaaagttatcaactttaagtaaaagaagcaaaagatggaaaaaacaaaagaatttgataatttcgtctttgttaaatttggattttcccattttatctctagaaaataacaaaagtgattagaatcagaataggtatttttggaatttactgttaattaatactaaattacccttttaatatttttttggtagtaaattaccctttaattactttactctagaaagactaatttattcacagaagtagaaaaagagaagaaattaaaagaaaacagcaaaaaataggtgaaaactatataagaggaagagaagatttatgatttcttcattagcaatttgttttgttgtcaaagggttttaatttaaaagcttttcacacatacatatatctctcaactctctctataagatacaaatctctttctctgagaatcctattatttgcattcacactctgagtcacattgaacttcgtctctagctcaagcaagtgaatgattctttgttgctacaggaatctatctcttgggtttctgatttgattcatctccggtgaaaatggtacttttaaatttctgggtttatcaaccgttttaattccattgtagcgtttctttcgttttgttttacttaaagttttgatttttgttgttgttgcaaacggcaaatgtgttaacttttgatactttcttccaaattttgtgtgtgtttgcttcttctgggtttcatttaattatgctctgtcgttgatacagagattgaacatggtctttaaggttttctcatttgttgctttcatggttattattaaattctctatattcagatatcaaattttgtggggtcttagttcttggaccataagactctaaactagactattgaatgctgtttctgtcctctcacatagtttgagaagtttttatatttataaaatggtatgtaattgattggtggttgttgttcaggcttgttctacagttaaagttggctcgattgtttgggtgcaagatccagaggaggcatggatagatggtgaagttgttgaggttaatggagaagatataaaggtccaatgtacctcagggaagacggtatgtataaccgaatttagttatactttcccgatgcttaaggatggaatctgtatatgtttaatgagattgtttctcatacttctgttgatttttttttcaggttgttgccaaaggttcaaatacatatccaaaagatatggaagttcctccttctggagtggatgatatgacaacactagcgtatttacatgaaccaggagtcctacaaaatttgaaatcaagatattatatagatgaaatatatgtgagtctccttctgttcgctggtttttcttttttttttttcaatttgctctgtaagattggcctaaaaattgctttctttttgcttactagacatacacaggaaatatattgattgctgtaaacccttttaaacaactaccgaatctttacaatgaccatatgatggcacaatataaaggagccgctttgggagaattgagtccccatccgtttgcagttgcggatgcagcttacaggtgcttgccattcaactttgaagtttttctcttgttccattcatcattggtggatttctgttttgacatttttgttttctgtttgtatagacaaatgattaatgagggaattagtcaatcaatcttagtaagtggtgaaagtggagcagggaagactgagactgctaaaatgcttatgaaatatctagcgaaaatgggaggtcgagctgtttctgacagaaggactgtcgaagatcaagttttggaggtaactaatggcaaatagtttattatagaccttgtggattgtcaaagacaggatttctagagtttagtgaaagattattctttgacatgaatggtttgtgtgcagtccaatcctgttttagaagcatttggaaatgcaaaaaccgtcaagaacaacaattcaaggtgaatgtaacacacacacacgcatacaaactcacaaattttcatcatttcttgtactcaccatccattgaccaaatatttcatcaccttttcatctggacaatcattatcatgttgcagtcgatttggtaaattcgtggagattcagttcgatcaaaggggaaggatatcaggagctgctatcaggacgtatttgctagagagatcacgggtttgccaagtgtcagatcccgagagaaactatcactgtttttacatgctttgtgctgcacccccagaggtacatatggcttttctttcttttctaacatgccagagttgttagagattcttctatctggaagatttgatatatccatcaatcaggattacactatccacgactaactattttgataaatagtaaaaaaatccatttatctttagtctcttgtatcccttgttcccatttactgaaagtttgaaaactgcattgaaatttggcagtgttttctaagcccaaatctctgaaactatgtcctgatgcttctcattttccttttattatttgacaggacaaaagaaaactaaagttgaacgatccaacagaattccgttatctgaatcaatctcattgtattaagttagacggggtggatgattcaaaggagtacactaaaactcgagaagcaatgggaattgttgggataaatttagaggaacaggtagttttcttacccttctcctagtaaaaatggtgatattggtatatgagtgtattttatatcactttcttgtcaggaagcaatatttcgagttgtagcagctattcttcatctaggtaacatagaatttgcaataggagaagaaccagactcctcagttccaactgatgagtctaagaaatacctgaagattgcggctgagcttttcatgtgtgtaactaactgagttgaattttaatgttaaatgcaacctttctgatacttggtttattgaatatgtgataatgtgaaaataactcattcctgattccatgaatttctgcaggtgtgatgagcaggcactggaagattctctttgtaaacgtataatggtgacacctgaagaaacaatttccagatgtctggatccaaattctgcggccctcagtagagatgccttggcaaaatttgtatactcaagattgtttgattggtatgtgtagtatttacgagcacattatttcttgcagctggatgattctttttcttgtttccgaaagttactttcattactctttgctaacttcccttattgctcttgtaggatcgtaaacaagatcaataattcaattgggcaagatcctgactcaaaagacatgattggagtgctggatatatatggatttgagagttttaagacaaacaggtgcgtaatccggtatgccttatgtttggttaatgcaataaaaccggttttgtataatactatggaacaaaggctcacatgaaacatcagacacatgacatgaacctttagttttggaatggggtattctcattgatattactgtatatcaagaaaacgggagacttttaacttttggaattttatttataagacagtgtttgctattcttaagaatatttacattctgatatggaagaatgggaaaacatttcaagtgcatgttgcttttgatgcttactagtgcatgatttttttcagtttcgagcaattttgcatcaatttgacaaatgagaaacttcagcaacattttactcaggtttgtctgaggcctgctccttctgataatgtttttttttaattcagcctttctccattcttatccattactttttctgggcagcacgtcttgaaaatggaacaagaagagtacacgaaagaagaaattgagtggagccaaattactttcccagataatcgatatgttttggaacttattgagaaggtaactagtttcactacgttttatctgcaagctcttagtgtatagcttccattttaagttaaactcgcatgttcatcattgtcttcttacgtttcagaaacgtggtggtattattgcacttctggacgaggcttggtaagcctaagagcttcaattgctattattccgcatattttgtctctccggtgatttgaagttgtatacctgtatcttgcagcatgttcccaagatcaacacataaaacattttctcagaagctgtacgaaacattgaaagataacaagtactttagcaagccaaaattatctcgaactgacttcacaatttgccactatgctggtgatgtgagtaaaaacctgttttagcattctgaatttatgaaatgcaatcatgtcctgaaatactatttgtttatatcctaaaatattgagttatcttttcaggtcacttaccagaccgagcagtttctggaaaagaacaaagattatgttgttgcagagcatcaggctctgctaggtgcttctaggtgcacttttattgcaggtctatttcctcctctagtggaagatgctaacaaacagtcgaagttctcttctatagcttcacaatttaaggtgcagtgaaatgagatagtttttatgtaaaaatcgttcggttccatcacaggattactaaattaactgtcttacttttatgcagcaacaattggcatcattgattgaaggtcttaatactactgagcctcactatattcgttgcgtgaagcccaataatctcctgaagccttctatctttgagaaccaaaatagcctgcaacagctacgttgtggggtgagatttacttactttttttgtttgtctgtgcacatttgcttgttattactctgtgcgagtttaaaaattctgtataagcatatttttagggtgtgatggagacaatcagggtttgccgtgctggatatcctacgcgaaaacattttgatgaattcctggacagatttggtatcctagattctgctactttggataagaggtatgcctctctcaattcagaggttgaaagcttacccaatactgtattgaatttttttttctaaacttacggcttgttcctgctagttctgatgagaaagcagcgtgcaagaaacttttggagacagttggactcaatgggttccaggtactttgtgaacgtcacgttttgaatacttttctggccagacgagcttggtatttgatgtacttgttttcacagattggaaagacaaaggtttttctcaaggctgggcagatggctgagttagatgatcggaggactgaggtattaggaagagcagcctgcattatccagtggaaattccgctcctacctgacccgccaaagctttataatgctccgcaacgctgcaataaatatacaggctgtgtacagaggtatctaaaagctgtaaagaatataagttaacttaaccattcagaagaataaatgtgaatctttcatttattatctgctttgttatccatcattaacaggtcaagttgctcgatatagatttgagaacttgcgcagagaagctgctgctttgaagatccagagagctttgcggatccaccttgataggaagaggtcttacattgaagctgttgttacagttcagtcaggtttgcgcggtatggctgctcgtgtcgtactacgaaggaagaccaaggccacaactgtgattcaggtggagaaatcttattattattgggaaaattaatggaataaaaactgtctcttccttttacttttcatctttgagcttcgcagccttttctcactcgtcaaaatttcttctagactctgatttttaatttttcattgcatataccagagccattgccgtagactccgggccgagttgcactacaagaagctgaaaaaagcagcaattacaacacaaagtgcatggagagcaaggctagcccgtaaagaactgcgaaagcttaagacggtgtgcttttctacctctcacttctgtctgtgtctgtttatttttttatgttacagtctaagcatttcacatggaaactgtaacacctcagataatgtttggtcttttgatgccttcatatctcctgcaggatgcgagggacactgtagtccttcaagctgccaagagtatgcttgcggagaaagtggaagaactcacatggagactggacctagagaaacgcatgagggtcagataaaacacagctctctatctttttcagtttttcaccatcctcaaacgttttcttttctcttgttcctggttcaacacatccttcacctgttttgtggcttttacattgtaggtggacatggaagtaagtaaagcccaagaaaacgcaaaactacaattagcattggaagaaatacaactccagttcgaggaaaccaaggtatcgctcttaaaggaagtggaagctgcaaaaaagactgcagcaattgttcctgtagtaaaggaggttcctgttgttgacaccgtgctaatggagaaactcactagtgaaaacgaaaaactcaaggtagggaatttgctctgttatgtatttgtttttttgcttcttactaaggatttcaaagctgtggaaaacaattaaaatatttaaattcatatctctttcatatgcagtccctggtaacttcgctggagctgaagattgatgaaacagagaaaaagtttgaggagacaaagaaaattagtgaagagaggctgaagaaggctttagacgctgaaaacaaaattgataatttgaagaccgccatgcacaagtattcactattggtcttttggctattgaattttcacagagatattaaggctttcattaccactgacagtcaacatatgtgctttttcttcatttgcagtctcgaagagaaattaaaggaggtgaaacttgagaataactttttgaaggaatctgtcttaaccactcctgttaagacagcatcaggacgattcctttctactccattaaaggtagacatgcccagagaaatatttggatgtctacatctgactctctcaatcatcctaattacaatattgctcgtatttgtttagaacttgcaaaatggcctttttactagcgaagaaagtcaactcagtgtaaattatgtctttccttttctgtctacttttatatgaagttctgctccagttgtttatatatctctaaaagccgtctttgcagggagcggagtttacaacaccaccaaggatacaagaatcaggatctgacactaagtcaaggggatcccatattgatcctcaacatgtatgttgtttcgttaaattactcttttatgtgcttctcatctttaatatatcccctctttggttgaagagagatttgttgggttttttggaaaaggaggatgtcgatgcccttatcaactctgtcacaaagaatgttggattcagccaggggaagcctgtagcggcatttaccatctacaaatgtcttcttcattggaaatcctttgaagctgaaagaaccaatgtctttgatcgcctcgttcaaatgattggttctgctataaaggtactaaaatgggatgctgtcttgtctacgtcagtacaaatctggtttttatcagatttgaatgattagtgattcttatttttaggatgaagataacgacgcaaatttggcatattggttatccaatacgtcaacattattattcatgctccaacaaagtctgaaatctggtggaaccggggccactccacttcgacagtcaccttccttagtccgatggatgaccaaggtatatatactcttctctcttttttttttctttttaatcttgtattgatgagtttctgctccaaaagctaaacaatccttaccttatattttaacagggtttccgttctccagcggctgaagctattcgaccagttgatgccaaggatccagctttgcatttcaagcagcaacttgaagcatatgttgaaaagattttaggaatcatttgggataacctgaaaaaggagttgaacactgtccttgctctctgcatccaggtgacatgatccacaatgcttctctactttcatctttcctttgtatgtatgtgttgtaagctgacatgagagaatctttctaggcaccaaaaacatttaaggggaatgcgctaatatctataaccactgctaactactggcaagacattattgaaggcctcgatgcactgctaagcacactaaaagagagctttgtatgtgaaactcgtttccactcactgctcttatctctctaaatgtcaggaaattcttatggcttattgttgttacaggttcctccggttcttatccaaaagatattctctcaggctttctcactcatcaatgtccaagtatgtaacaggtgagaaattgttattgtctatcaatggaatattaaatatgcatctctatgataagcagactattatcaacctcttctttctgatctgcagccttgtcacgcgtccagataactgttcatttatcaatggagaatatctaaaatctggtttagaaaagttagagaaatggtgctgcgaaacaaaagaagaggtaatcccaagtacagtttcctttctcttctttcgtcatcgtcaattgggttaatacataacacaatatctcttctgatagtatgctggctcatcctgggatgaactcaagcataccagacaagctgttggattcttggtatgttttgaatttaagaaatgttgtctaagcaaatttacttgaatcttagtaagagtttgtatttctcacatatttcccccttgaatttgcgtctgcaacagctcatccataagaaatacaacatctcatacgacgagattgcaaatgatctgtgtccagtaagtctctctatcaaccaactcttttaccgataactggagaactttgacattgtaattatgcttacaccattttaccttcactcagaaccttcaaatacagcagcattttaaactgtgtactctgtacaaggatgaaatctacaacacaaagagtgtttcccaagatgtaagctttctgaggaaatagttctcttctcttgacatatatgaagatcctctgctctagtagtttaatgcttgctcatcgatcaataggtaattgcaagcatgacaggagttatgacagacagcagcgacttcttgttaaaagaggattctaggtaagtgtagctttgcatcatctctatcttttgcttttatgatccaaagtcatgatgacatttatctttctagaaactaacaaaaccgttccttttggccatgcacagcaacatcatatccttgtcgatcgatgacttatgtagttcaatgcaagataaggactttgcccaagtgaaacctgctgaggaacttctggaaaatccatctttcatattcttacattagtaagtaattcagagaaaccaaaactgccacccttcaagaacaccatgcaaaagcatgaagaagaatctcagagaaaattgctgcgaagaaatttttagattcgccgatttgtttatttgtttatcattgtaattctctaatcatcccagagatttcataaagagtatatgttgttttgctgggagtaaacaaaaagagacaaagcttggctaatggattgttcttgttggtgttgtgcagtctttctttcattattttcgtgattgaaataaaaatttatttctttttgtaatttagctcttttttttggttgagtctgagaagttgtctccacccatttatggtttgtacaaaggaatcaagttaatagaaaaaaattgcattattgtattattgcattttctcattattgcattattgtgttaatttaaatcttgattattattaaaacatgattatgattcatttttcctttttttggcagcattttttcattcttctggtttggaaattttataagatgagtgacctaaaactgggccttaaatggactataaatttaggcccatttatattgaggtgagcccaacaatagtaaaagctagtgtttcgtatcagtgtagacaaatggctaataccaggcaaatgttgtacctttgtctcatctctttctcctatctcgatcggtaattttactcattagggtctctctgtttctgggcaaattttcttcatctccgccgttttgcttcaatacagatttctgggattttttttaccgatcaaatttaggttttcgttttcactcagaaccttagaaaccctaattttgatacattagctttagagaaccttccatcggatccgtgtacaataaaaaagtttgcgttttttttttccttaaatcgattgaacgtgtttgaagatgcctccaaagcaacaaccaaaggctgatttggcgaagaagcagaaacaagtggaagacaaaactttcggattgaaaaacaagaacaagagcaagaatgttcagaagtatgttcagagtctcaagcaatctgttcagcctaaacccgatgcaactaaagctgcagctaaggtacacgtctcttgagatgagttttgagttttcttcatgaatttgaagttaggaggctagtggagtagattttttgaatatgtctaatgagttagtgtgagagataagttcttaccaagaaaaatggtttttttgaggacagaaaaagaaagaggaagagaaagcgagagaacaggaattgaatgagttgttcaaggtagctattagtcagcccaaagttcctgtaggtatgtatgttgaatgttgatactgtttctctggtttgttcactttggtttcggtattatttattgaatacggtgtgttgtttttggtgatgtatcttggcaggtgtggatccaaagtctatactctgtgagtttttcaaggccgggcagtgtcaaaagggtttcaagtgcaaattctctcatgatttgaacattcaaaggaagggtgagaagattgatatttacagtgatacgcgtgatgaaggtataaaagtgtggcacaaagtgtcttatatatctatccctttggtcctttggatgatggtcatatttttgccttttttatatggctttagatggagatatggatgagtgggatcaagagacccttgaaaaggttgttgaatcaaagaaaaatgaatataatcagaataagccaacagatatcgtaagttgtttctcttatcttgtgtttctcggactttttattatatgcttgtcgggacatgcttatcagttattagtagcttttctcttgttaatgcactgtgaaaatgtctgaactggtttgtgttcaaatatacagccttttaacgtgtattatgtgaagtgatgcattagttttggttgcacttgctgtgattaacctttagctgatgtgcattcgccttacgatgcgcttcctttagctaatagcacggttcatattaagagccattagggtcttagatgttattatgcctcccgttgttcccttgtgtttttctgcgcacttggttcatgcctgacaagaactcatgcttttggtgatgttagtgctaatcataattttgaaataaatgtttcttaactatatacgtctatgctaaaagaaataatatctctgcgtctcatctcaataatcatctcataaacttatcctaaacacatgagttatttgtctcgctgagttttattgacttgtaattgtttttgtgtttactgaaaaataataggtttgcaagtattttctggatgctgtggaaaagaaacagtatgggtggttctggtcatgccccaatggtggcaaagagtgtcattacagacacgcgcttcctcctggatatgtccttaaatctcaaatgaaagccctcttggaagaggagtcatcgaagaagctggcagttgaggacgaaatcgaaaacgaggtttaaaatactcctcaagtttccctcatagctgctaggacccggtacttgatttgtgagacccatgttttcttgttctatgtttcagcgtgcaaaactgcaaaccgcaacacaaatgactcctgcactatttatggaatggaagaggaagaaaattgctgagagagatgccggtttggctgcttctcaagcggagagagctaagaacgaccgtatgaggtaatccccattcatcattctgttacatatccatctccagtgtgactctatttttgtccttggaagctgattcattgtgtggatttgtaacctcagtggtcgggagctgtttctgtccaatgcaagcttgtttgtggatgatgctgaggcttgtgaagaatacgagagggaaagagagcaggaagagactgaacaaaaggtgagctctctctctctctctctctctctctctctctctctctctctctcactcactcatcatttaaaacaaccaagtcatgttaatggaatcttgagttttttgcttttcaggcaaagaacaaagaagcagaggcagggacaagcaagagtagtggtgatgctgaacagagttcgaaagaagtcaatgaagaagaagaagatgacgatgatgatgatgatgacctagacatggatgagctggatgaattggaagcaagcttgtcgaaaacatcgatccagattcgtgagccaaacgacgaagggtcatcttgaaatgaaaaatggtctaagaggaagaggtggaggagagaaagcacatgttttgtttttgtgtactttcaatagattggattttgcagacacaaaccccattttggggtgttgaataatttctgttactgttttacagtcttaaatggcctcatcaaagaactagtagtatcttttttgtccaatcattttcatctttctttgttgttgttaattttatcatgatgtgtaaataaaaggtcgtaaacttactagagaaaataaaaactacagaaatgtattaaaaacaaagaattttaatcaattcttatgaatatttagttgttttattgatatttataaataaagaacaaaaaatatcggcgatataaaaagaggtaaattaatctgagggcaaaaataagaaaagcatccaatttcgtcggaagaagaaatcgccatggtagccgcaacagtaaacctcgcgaacatgacatggacgtcgttaaattcaaatccagcaatctctttctccatgttaagcggaatcagaaacttgggcatgttacctttcaggagatgtctaaagccgacagttatcggaatcgcgtcgtggccaccactccgttgttcttctgttaaggctatgtcttcatcatcgtcttcgtctggatcgacattggaggagactgttaaaacgactgtggcagagaaccctgtcgttgtttactccaaaacctggtgctcgtaggttcactatactttttggttcaattagaggaatgggttttgttaatttatgatctagtttgtcaatattgatacttttactgggtttgttctttttggtggtgaagatactcgtctcaagtgaagtccttgttcaagagtcttcaagttgagccactggttgttgaattggatcaacttggtatgctcaattctttactttggtttgctatatgggtctgagtagtttgctatattggttttgataatgtgtgtgatattgtttatatcgatcaaggaagagctggttacaagtgccctaatgtttcagcattttgactggatgaaattaatacttgtttccaacttcttcttgtttatcttctggttcatttggctgcttgcttgaattggtttgtatgttttttgattagattttgatggaggattgatgatggttaggggggtttctaatggcctaagatagctttacatttcagagattctgtgtcttgtttatgtgaaaaatttacttccactgtagttttccttggaccaatgacttgttgatgaagaatcaacgggtaggctagtacttctaatggcttaaatttttcaaattgaagattctttcctgcctttgaatcttagacagtatgcttctatttgttagaaactattatgttgctatcttcttagttatcttttctcgtgtcaagatttggtgactttccaaaaccatttgttctttcttgtcttgtttagtttctttgggtaaaacatctctgcctcatgatattggtctgaaacatttacaaaagttttggtggtttttggcgtttccaggttcagaagggtcgcagctgcagaatgtgttggagaaaattactggacaatacactgttcccaatgttttcatcggttagttgtttcatcatttaagccagttactaactatactctgatcatttttcttgattattttgcctgaaaacaaaactatcgataaaatcttagccactacatttgctatgaccatcacttatctaattttgatatcatgtttttgttcatgaccaggaggcaagcacattggtggctgctcaggtacaatctctcttcctttcttacctcaacaccgagatttttctaatatgtaattgagatcgtctttgtgtattttggcaccaagatagatagtactcaagatcttgctcaatgtcttgtgatttttctggtaacttgacctgcatatcattattgttgaacagatacattgcagctgcacaataaaggagagctggaagcaattttagctgaagccaatggaaaaaacggtcagacctagagatttctagagatgaaactggttggtgattcttcatgtttccttattgaagtcgagatgatttgctgtttgaatttactgtctatatagagattttcaataagaatcttgtgtttctttctacgtacaaaaaacagtcaatgagtcatgctgggttctgttactaaaccggagttgctgagtttgatccacactacttggaatttgcaatcatttttgggtggctaaatgcatatttggaaatcgatcttgagattgtaaaagataaaagatgaattgttggttaactttttggtacatacggttttgtttaagattacaaacagacgaaccggtttagagataaaccatgtctctcattttacttcttccacctcgtccaatgcgtagttgttggtcgatatattcgcgtaattcaccttggcgaaccggaccacaaccggatatcgggtcttcgggtcctgacaatttagaccggaatataagatgaaacgatatctaaccgttagatcgttaacttcaaaagtaaatgcattacctgatcaacggccacaactgatccaacgttcttgtaccagtatgattctttccttagaatcttgacctgtaagtcctcaaaattgtttataaatttcacagtagccctataactcttaatatgtatactaaatagacccagaacttattgatgatacccagtttagctcaaatattagtccaatcttctctactagcatctaattaagcttgaattttcttctaccacaagggttagttccttttaatcctgatctagaggtccaaaaacttcatataagtttcacattgaccccatacttacaaaattattctaaatagtccagaaactttattgtaatccaaacttggctatcatcaataaactcaaaattttgaagtataaacatgcatcaaagattatgtatgaataagtaccttggatcctctctttgggccaattggaggaggtttagccttagcggccggaactttcgccggagcagcagcagcggtggtggaagaactatccgacgaggcggttgccggaggtgtatcttccgccgctctgactactagccttgaaccgaagcttctcatcggcaagaaagacacaatggtggtgctctttgaagaaccaccgcctattgccgccgggacgttggccgtgagaataaatccggtagctgctgacgtcatcgccatttgtgtgtgatcgttggaagttgtgtgagtgatccgaaaaggtggacaaagctttagattgtttggggttaaaaggaatcgttttaaaccacttgtgatatgacacgtgtgatcacatatcagtatcgtctggataatgtgatgacgtggcaaccttagaaaatgaaatatataattagagcaaagaatctgtaataagggttgattgattttgccgccaaaattcatttctcatcttctccgatttcaaattcttatgaatcgccatggacgcgtgatgtgaaatctctcattcttcatcgccttcgtgattataacagcgtttgatccacgattctgtagaacgaattcagatactcggtgatgagaagaaggaatcagcgaacgaaagctggcgaaaccctaaataagaccgatccacaaatcggattcaagtttactgatccttcgagcgctcgagcaaattcaggtatcttacaacatatatttcgatttccgtgagtttgtgtgtgtgttttaattttgtttccttctggtggtttagatttgaaacgcaggagaagggtgagtttcgacgatgctgatcatcggagtcccttgaacgaatctcaggccggaggatgtaagtgttcgcgtctacttcacgtgaataagcgtagagtttcttagaatgttgaatttgattgaaaatcgcctggtattggttatttgcagcgattgatgccaagacctctgagtttgcattctttaagaagttaaagtctaattttggtcactgctctgaatcttctgattctaaaccatcaaataaagttcaacaaattcctaaaaccttcgaatccagagccaaaccagacaaaggtttttgagcttttctttgtgatgatgatgatgatagtgtttgcttggctttcccctggattttcatctatactgtttcataaaccaggatgtgcaggaacggactgcgacgataatggtagatccaagagctatagcttctccacacccattcatagtgccagacgtgggtcgtctatgttacatgccaacttgactcaaagggatagaggttgctacttcgatttcttggtgcatgtttgtgccacatgataagatctcgtgtctcttatccggatacttctgtagaatctcttactggtattttggaagtagtgatccataaacattcttctgatttctgttgtttataggaaaatgtaatgggagatcttcttcatcattcagtagagataggtacacagttccaagtggtgacaatctgagatctgaaagtggaggtagatgttggatattctacttcttacatatcaaagaagcaaaagatactagttaacaattaagagatatgattttgtagtttgaattatcaggaatcagtgaagagaaaggagatatattctctgtgaagagaaagaaactgcatcagtgggtcaaagatacatggcttactgaaatccctgagcttacctcaaacgggtacacaatagttgttaatttatcctaatcttaatacttgtttctataatgcactcagaaaataatcatttttcaggcatgatttagtttctgttctcctaactcggctgtcccctggtacggaggagacacaggtaagcttgatagaatccctgagtatttgtcaattgcttatcttgatcaatcctcagcacttttttttccttctcagccttctaggttttccaaggagacgacggccagagtcaaaagaagaacgtttgttgaatctcctggctcaaagtttcttaagaggtcccatgaaagctatgcagaagttgaccacagtctgcatatggaaagggagagattgatatcttggcagggatggctggaaaataacattaccccgaggctgcagtatcctcacgttcagagcagtttcatcccaagagattccgaagagattagctttcccatcttatatcctaaggaatcagtttatcgacctccactgttgaaacagaaggagttcctgtcgtttcctgttgaagaaaatttggagtgttctcccatatctagcctccatttcagaaactacaagcctttttcaatggattatcacagaggagaaattggatacagcacagaggacttatcacacgaacatagagagccttcatctgcattacttctcgagtggaatactgaaaccgcaagcaccagaaagacagatgattttccacttagttatcacacaagactcatcacgtatccaaatgcatcatcctcatctttgacagacaatccatggtgctctgactattcttcatcccatgatttggttacaagggagctgtaccctttacctctgctctctcattccatttcaggcagtttcctcttaccaacaacgaaccaagccagccattttgagcatgatgaactcgagaggtatattattgatgacgaagacgtggttgctgcaaaccaagagctccagacatttcatcacacaaacagctcagattgtttaaccagagattacacatattatcgtaatctttcaaactctctagtggatcattgtccttttaaagtccctggatgtgacatagtatcctttccattttccagcatcagcaattcaaatttgttggaagcgtcaagtcctacaacgagtaatcgttttaagtctcatgattggatcccctttcagtttcagtcacctcaagtttggattgattcatagaatggctatgagcttaaggcagcaaaagaagaactactcgaaccgattggttgccacaggtcagcatcactcttacttactcacactgatttttgaagattgtgtggcatgtcgttgttctgcattcctttaagtaacacatttatgttagaagacataggtatcgatgattttagatcttgtccgaactacattactgatgaattgattgaagaagatagatgaatgatatgattcaaaccgacatagactgattatatggttgagatgttaaaagaatctttataccaaagttattcatggggacattagtaattggtcaccattcttgacgatttctttgtttctgttctctgttttttgatgaacctcttagactcttctcaactaccaaagtagttggaactcatttaaaaaaaaaatcactaaccagattgagaaaggtggaatttaaaaaaaaaatgaataatggaaggaatgtaatatgtaaatgcagatatatatggttggttctttcataattgcttccccctaatcatattaatttgatggtactttatttcacatcaattatcattactttgagtctctccccaataaattttgtaattatgaattcttttgtgtgtatggtcagctgaaaaattgtagtgtttaaagttgtatccggaagtgatttttcgaaaggactaatttatgagacaatatttacttggcttacacaatttgacaaaaattctttagattaagatgatcacaatgcatattcacaaacaagaagcttcggattcctaaaataaaacttctaaagcctctgcaacataaaattctccagtttaatatgtttcttgctgttgcaaaactgatccaagacacttgaaacgatattttaatgtttataattttgtcacaacaatctttaataagagaagaatagttgtgaaaaaaagaaaaaaagaaaaaaagtacagcaagaacagctagtctcccttaacccaacttcgtgtgaatgtaccacactattaccatcttctcttttgctgacatcttcctggcccaaattagttagttagtatttatttcttatagttatatactcttaattttcataaatacaaacatctataaccaaaaactaacatttagtttttcactagagggacacaaaattgggtcaaaaaagttagcttgtacttaatgcaacggaaccgaaattctaagaactggttgaatagttgaaagtttgatggccgtttgggttataaaagccggttcatgatgtgaaagtctaaccagagaaacgagaattgaagcgtggagatgtatccacgttgtctacattgatacaaactaacaattggaaaaagttttcttttcggaatgttttcaccctttaaagtgtttgtagatactagataggatattcattaaaaaaaattgtagatatgacatgacatcgtattttatggcatgcataagcaatattggtatgttaacatgtttaaactactactattattgtgaacctatttgtctgtaagactgtaactagtacactaacccaattactagataagtactaattaaagtacaatagtagaaccacaatgtaattttcttataaaaaaacaaatcaaccatacattctttcttttctaagaaaatcatctttatgaacggaattataattaaatggaatttggacatccaaccaaacatattaaaaacggagtctagcatatcaattatagacaactgagatgtgtttacaaacatattagttataattatatataggtgagacaatttaatgaaaaggataaaattatccaaaatgctcaaaactcactcttgtccttttggaccaaaaaaacttattctttacttaattggttttcctaaattttgatcattgggtgcaaattatcgcatcaacatattatatttattattatttagtttaatttaattatgaatttaaatcatgcattaattactgcttatataataatttgatatgttttaacttattaattaaatagtttcaatgtaattagttacaaagtatatcaaactcatatataaattaacttgtttaaatttggtttaataagttgtataaacataaaatcaatggaatatttattaaatttttgattttttaaagtataaaaaaattaaataatatgatattagaatttatttcatgttttcatatactataatatatataggattagtgacaataaatattagttgaatataagatctattttaagcaaaatataagatattaaatcaacactacttttcgtttacttaaaaatactttaaagttaaaaacatatatttttacgataagtatttgtaaataagtgttaaataatataattaaaacttacaaaaaaaacaaaaatagagtgaatcatttactcgagaattagagaaatacatcaaaataataattagaaaaaaaatcaaaaattgtttatcagttcaatcgatataaattattataactcacaaattatggacgaataaatctgtaggttgtgttggcctagttactctaaaacttgtagaaatgctcggttactaaatgtcaaaacaaacaatttaaaatattgcatctcattatctcaatgtggttagttttttggaaggtttcatttggacaagaaaaaaagacactaagagaataagttagttggtccatttaagatattcctggtcccaattctattgggtatatgaaattacatattagagtagatgatcattattcttttatacttgcttgcatatatatgataaaacatataacatgctattgtattatcgattcttggatcatttattagcaactgtgatatttcatataatgccatataaatctatttttagcttgtaagttgtaacagaaaatcaaatatttgaaactttttccttattttcattgttaatacagtttcaaccaactacacagttttatttatttcccgcaacttaacaataaatattaatggttgatatgttaatcgttaacataatacagtttatctcgtggatttttttttaattattttttttttggtgcagaaaatacagtttattatagacataatttaatcgatttagttaaaaaaaagtggttaaatctattgatagaatggttgagaaaaagagagtaaagaagaattataaatttataattgcagtaatgaaagtggaatacgtaaaaaaaataaggttatgtgatcatatcaaattttggtgaaatgcattcacttcctaaatcctaattccatcttcaagttgagacaaaccatgaaatatggcaacaggaaaagtaatgtacttcaaccatatatgattatatatgatataattttgtccatcattagctcatttacaaactttaatgaaaagaaagattttactaaacattttttttgtgtgatatatataaaaatattagtcatttgcagttttttccctctattaataaaaaagcccttttggtatcagaagacgacgtcatccccttaaaaagctcttcctgttagattcacataaatcttctccggccaaagctatttctccgacgacgtcagagcttgacaatgtttctaaatctagctacctactaacagagtaagttgtctctctctatctcttgctctttctcactgagtaaagtagaaaatgtctgacttatagctccgatctcattttccgatactttttccgttttcctcgttgccggaatctgatctctgttctatttatctccaaataagcttattttttttgtcaatttgcttcgttacatatatttagcaagattcgttacccattcacgagctcattgttcaatttcatggttttcgaaaatgcagaatcagtgagagtggatctgatgctgtagctgaattgagaagaagcttttcattgaggttgttatgcctgatttgaggccaggtgtttttagcaaatcgaaagagacaagtactgaatctatgaaaaagctcattgctcgagaaatgtcgaaagatgttgttgaagatagacagagttctaacaatgtagttgctaaactaatgggtctagagacttctgcaccaaggagcagatccaaaagctcttcacgttgttcgttgacttgtgttggtagtaaggaagctggtaagcatcatagagaagatgaaacctgggatcaaaaggcgagcaacctttcaagtaaagcaagtatgagtgataaacagatggatcttgttcgtcgaaagttcatggaagctaaacacttggtaacagatgataggcttcataggtccagtgagttacaagaagcactccaagttttaagttctaacaaagatttgttcgttaagtttctccaggaatcaaattctttgtttccacagcatctttctgactttcaaccagttcctcctcatccagatgctaagcgcattacggtattgagaccttcaaaggctgttggtgttcagaaatgtttggctgaagatagtaagaaaccagcttctttgaatcaggaaactggatggatcgatgctgtgcagccaactcggatagttgttttgaagcctagtcctggaaagtctctagatataaaggctattgcttcatcacctccttattttgatgaggctggagatgctgagaccagagaagtggcaaaggaaattacacgtcaaatacgtgaaactgtggagggtcattgcaggaacgagaccctttcttcttcttcttcttccgtcttgtccaatggctatatgggtgatgattgttcgttaaacaggtcaaattacgaatatctagtgggaaatattaccaactctgagatcatgtcaccatcctctaggcattcatgggactgtgcaaacaagtttgagagtcctttttcttcgtcttcgttgagccgagtctcgttttctccagactcatctgtctacagagaggcaaagaaacggctttctgagagatgggcaatgatgtcactaaacggagacacacagcaaccaaaaaacttccccaaggtttcaacggccttaggcgaagtacttgcactttcagagacgaaagtacctaccggatccagtgaagagaccaacaaagtgaaacaagaaacgagacgatcaatctcatgcataggcagtggtctagatcaagtagaaagcacaagtgattctctgaatatccttgaaaggtcaagatcagtccctgagattaggctcaatggtggaacttcaaaagcgcaagctccccaagagcttacggagtcaagaagcttaaagtcatcatggaaagtttcaagcttgttcttcttccggaataaaaaatcaaacaaggacaagacatttgcaccgtctcaattggctatacaccgtgatgcattccaagaacaacgtatttttacaagcgaggtaaatcacaatccaaaactagttgtgaatttcagaagatgctcggaaaccgttcttggtttaatctttggccattgatttgtttgcagggtgatgtggaaaatgaaaaccaggaccagccgagtccagtttcggttttacagccggctttcgaagaggaatgttcggggtcagtaaagccaaagaccactcaaggttagttttatctctctggtgttaaacatgctaagagttttaccaattgtaagactttggtactgtcacatcccacaggagaagaaatgtctctgaaatctaatctgattgacaaatcacctcctatcggaacaatcgctcggattctcgcatgggaggatgagtcatacacagacactagtaaacccgcaatgggaatcgaggaagatgaagactggtatggcttcatcaaaacgctcttaacagcgtctggtttcagcggtagtgactcgcttatgacccgttggcactcactggagagcccattagacccatcattgagagacaaatttgccaacaaggaactcatcaaacgcagaaaacagagatcaaaccgcaaactcgtttttgactgtgttaatgccatcataacagagacaacatcaacacttgcgcacaccggcttgaccaagggatttaacatgttggagcatgtttggacagagttacaggaatgggcggttaatgacgaggttgctgggaaaatgtggagttatggtctacaagtcgaaatgaacaatttggggattgaaattgaagtgatattgctgcaagagcttgttgaagaagcagtcttcgatcttatctgatgaaacaacgtatatacgttaatataagcttttgtaataatgaaacatatatagatgatataatctaagaaagagtttaacctacatatacattttacattaatctgtttatgatgtccaattcaatttttagttttgttttcttcattataaattgaatcgaaacgttatagtggaaatgctaacttcaaactgttcacaggattgtttgtacaagcaaacacacaaacgaagatgcttatgccgtttgtgtaaacacaatacagcactgttttgagtaaatgtttatgcacactcgagaagttgcaaagagcaaaacatagagaaagagagcttcacagagaccatatggacacatgcagttttagaaacatgattatttggcttcatcaacctttcgggttcaccggtggactctggttcaaaccatactgcaaaaggaaattttcaaaacgaaacagtttttatcatcagcagattcacaaagcattatccaatccgtaaagtatcaagaaactgaaaaaatgatcagcattaccttttctctgattcgggagctccagttttcaatcttgcttgagccagcaggcgcttggtttccttgcggaccaagaagtgggtcccaagttctactccttgggttctcatcatcttcctcttcgtcaagttcgggtttcggggttgaaaccatcgctctgagaaccatggctagtagcaatgacagtagctgaaagacacaagaaatattcatgtcttctctttaaactctctagagagaatatatatatcatgacaattctcaaattttataaagactgaattgaattacctggactgctaccacagcaatccccacccatttgcatatatcgatgttttcttcaatgaaagccctaagactactaagttctccagttggatcatacggaagatcctacagaacacagatgttaaactgttacaaacaagtcaaggaaacaagaaacaagaaacaagattcgagcataagaaagatctcaccttttcccagtgacggtcaatagcgatgtatgcaacaagtgcagcttcaagtagaatgagcagagttttgagaatagagtactttaaaactgtcaagggaaaaaccgcaacaaacccattccaataactctcatgaaggttaataaactcgatctattaacaaagatagaaaaattggagaaaggtctctgtataaaggatacaaaacacaagcaacagccattgattgcttcagctgctatgaaaccaatgaaggtaacaatgcagaccaatataccaaccgccatgaaagagtagatgaacctgcataaacaagcatgacaaaaaccgaatcaacaaaacagatgagcgttcggttgcaaacatgataaatctagcaaaagtcctttcagctgaattgaaaccagtcatcttcaaacatttaaagcttgcccttttctttagctacttgatgaataatggagaagaagtaagagaccaagcttgaggtgaactatcaaattgaagaactacaagtaatccccccagaaacaaaacccacgtttatcccaagcttgagctccatttatagaaactatgtccagctgaattaaacacgaatctaactaaaactctaaaatttggaaacttgtaagcagaaccctagaattggaaactaagtaagtgaataaagaggaatctctaaaatcggaatctttaccatggagcaggaaggtccaacgagcgtaggttaaacccatgatcaccaccattagacccgagaatgatactcgccacaaaatcaataggattcttcaagggctcagatacactagtagcgatctcggttccggagcttgatgaagctgacggaggcgggtccacgggaaggtgacggctgtattcatggagcatccatatggagtagataatgatcgaaacaccaatgaaagcttggacaaaattaaggatcttgagggttgaagcaaatgaaacatggcagcaattacgccgcatttttgcctcagaattttccaaagagaaaaaagtttgaatttttggggataaggagagaatttgagaagctttttctaaaatggtcgtcttgtcgaatctaaaggtgtcgcctttgtttgttaattattgtttttgttttcttataaaatatttcaccggtagtcgtcgcttagaggacattattgtgtaattcaattttgtaatttgtttcgctcttatctgatgctttttggaactgttttaaaattttatttgtacacttattatgtttttggctgcatgtgtttaatgatttatatgatcctgatatttcttctatttttaattacaaataaatttaccatttatttttggatggcaatgctcacaattagtttttttttatataaaaaaaacatttaaattccattataaaattattgttgattaaaatttccttataattccatttctttttaaaataatttacactactcatgaaaatatgtttttttaaacaaagtttttaaaactttaattgtttttttactggtcacaaaaagatttaattatctatgaataattatgaattgggccatactaagcggcccattatgaaagagacctcataacgaattatttgctcttccctctttggaagaaagaaacagcgagccgagagcagctgcagcgggaagttttggttgcgttgcgattggcactctcttctctttgtttggatgacgaaagctccttctcttgcgtttctctgcatccaatccctcaaaattcagcttctagaaagtaattctaacaaagcttttgttgcgccaatttgattccaaaatatgctgaatttgagtttgggttttgtgtaattccaggcgataatccaattccagatttatacgagcttccatcggagttacttgatggcattgtcgctcacttgcctgctcttgctttgcagaagtttcagaccaacatgtcagtacactctttggtttcatttaagttttgaatacaaattgaaaggtttagttagggttacgaattatatggatgaagatgatacaactcttatttcatttacatttttctattggtataggccgtttcattgcttggatagttatgaatctggagatgattgctgcttgattactgggagaaaacgtgcaaggtttgatgaattcttcttttgatttctgttttgttattcgaattgagaagacagactgagaaagatttaacttaaattcatctgcagaaatgatgtacttggtagctcttggaagttgttgtttaagctgcggtggcctgattttgttgaccgtgtggaatcaccagctgattggcaacagctttactgggaaaagcatctccaaaagtatgccaattctattgaaatgatcgatgatttgttttttattgcttatgtaacttccttttgagttgtatctttatccgagtaacagttgtgttgatgaagcagctgaggtagctctgcgtccgacatttagtggtcggatttgttccattaatgtatctggtatgtgttccaatgaaattcttgggtttgattttttcagttgtgtaataatcattattcagtttttttgttgtatttttctattgcagataacatattgagatacatttgccatgaagagcacatcatgacttgtcaaaattgtgtctgcaaggaactatcttttcatttccaaacttttggaccatatcttaggttgagtaacatttcatgtgtgtctgattattaatcgtttcatagcctcacgttttccttgtatatacggatacactgtactactttcagcttgccttacttttatatcgctcataactggttgtgcgtgagatatctggtttggactgatttaatgctctaacatacttatgcttctttgcgttcattcttacctgttgcaggtgtctgaggcttctgaatgtgctatgcgttacagaaacttctgtaagtaattaaactatgctctgacgttttgatgtgtttctgtgtttgtaaatagagtcatctttgttttatttttgtttcagtatccactgatcgccgtgatatgttgtattgctttcgatgtttatctctctcttagaacttcaaatttgtatctttgttgatgaatcaatcattcaacctctagagggaggacagaaataatctttaggctttgttactgtaggagttattgaggacaagtaaattgcgaagtttggttctacgttggatcagatccgagaagcatgtaagacgctttctctatttagtctcctagatttagttagctggaattttattgctgatgttccatgaactccaggttgagcccttgtgcaagctcttgattcagagccgagaaacattaacttcgcttgaacttattcactgcaagctttctttgagttccatcagtgcaatatgcacttctcttcatgaaaagggtatccacacaactgggatgcaacgtttctgtataaagacatctagcattgagatagatccacttgctgcgccttccgctttcgtttcattcctgatgtcggtgaggtatatatatggactgatgccaaaacgtgtcttgttaaatgtttgctcatttggctatcaaagtctcttcataaatgttgtaatattattattatgtacttctttcttcattttacttttagtgagcatcttttttctttcaggaccttacattccttacattttggcgatagcaacctcgatagatattttgcgaggatggttttctctacacttcttgattcttcttccaacctttcatcccttgacctctctgaaaacaatgtgggtaccaccgtggttcttcctgttcaaattgatgtatggcttgcatttcatggctgacctacacatgctatatagatttcaggatggctttctacttttagctgcaaatctgttgttggttctctgtcatctggaaagtctttacagtccctgtgcaagctcaacttaaggtattttctagtaaagagacaattcttacagtcttaagcctggaaaccttgtgatatggattagaaatgtgtttcaggggaaatgaacttgacagatacgatgcagagaatcttgcacatgctctacttcatatgcctggcttggaatctcttgacctgagcgggaaccccattgaagacagtgggatcaggtgtgtcgtctaagttcctgcttttgtagtcttcgagaaaatcatgaaagttgcatttctcttacatgcttttcttggatggtacagaagcttaatatcttacttcacaaagaatccggattctcgtttagccgatctgaatttggagaactgtgagctatcatgttgtggagttattgagtttcttgataccctgtcgatgctggagaaacctttaaagttcctgtctgttgcagataatgccctcggaaggtattcataaagttacaaactctttatcactttataccgttatgatgtttgtctgttttcttattattcttgttctttagcgaggttgcagaggctgtagtaaactctttcacaatctccatcgagtcgctcaatattatgggtataggactaggtcctctcgggtttcttgcattaggcagaaaacttgaaaaagtgtcgaagaagctgctgagtattaatataaggtccaaagcaaaatccatagcttctatttttgtatacaatgcatcgctttgcctcagtggcctcacgtttgttttgtggtttcacgctatagcaaaaaccgtggaggactagagaccgctagattcctgtcaaagctcatacccttggcaccaaaactcatctcaatcgacgcatcctacaatcttatgccacctgaagccttgctcatgctatgtgattccctgagaactgcaaaaggtaataacattctggaatcggattgatcagcttgattcttgggccatttgctgtttttttgtgtgtaactaaacgcataatgattgtgttcaggtgatctcaaacgtcttgacatgactgggaatagttgcatcagccacgaagctgaccattcttctctactccatgaatttcaacacaacggagaacccatcttcgttttaccttcatcctcggtttcacatgttccttacgatgatgacccgtagatagttcctatataccggtttatccttcagtctggaactgtttactggtgaattcattggttgtgtatgtgcattaggttggttcaacgttcacatgaaatagcatcccaaaacatcttaaaccgtcgcctaaaaaaatagtcagagagcagtggtttaaatcttaaaatagagaatgaggagatgtggtcttatttcatttcttattaaaactcgatgagtagaaattgctaatacataatttggatatttcaacttttaatttcaacatatattgaagaaatgaaaatatttcaaagtagaaatcacaaatgggattcatgaggcaccacaggcggacaatggtagacgcaagtacattctccaccaggactagtactagtactgtagtcgcagaagccattagccctatctccaaacgtagctctgcatgtggcactacagcttttatccttttcgcatggtcccatagtcgctgtgcatcccatattttgctcaactacatccaacaaaaccatttaaactacaacatttgagatgttatacctagacactatatatgtgaaagcttttgaaaattcctaagtgtagaccttaagatgtaaatgtatacgtgagacaaatgttatcgaggaactacggtaagcggggaatatgacaagaatagagagaaatgtatacctaaggcaaacataacaaggaagatgattgagagaacaagtgtagaagatgcctttgccatatttctttgcttccttctcttaatattttactaacagtaaaccttttaacacataaacaaaaatcactaatagtgcttttatttgttagacctataacaatatttataaagaattgtgaggtgaccaatttcagaaagaaatataattatttaccatttgaccacaaatattgtttgactttaatttatcaatataggaagttcactcatatcatgttgaatatgctagtttggtatgttattagagtctaggataaacataaactttaccctctgtcacctatcgattcaaatctaatctgttagtagagtcttaattcttttattttcataaatttgtctttttattgcctaatccaattgtaagtgactttgtaatcagcatcaaagtaaatgattgtattttgggaagtgataagcacatagaagtaaaagaagaaaaaaaggtgggaaagtttttaagcatgattacttgtcaattacgctccgactctttggcccgcaccagctgtttaagatcgccggcgtgacaagtgacaacaattggccacgtgtgtgtgatttattatcttaagtttttgttatttctctgcgaattttaaagaaaattttgaactttgatcaaacttgtatgaattagaggggatgcaaaaataaatacacattatacaaacgagatggtatgaaggataacaaaaaaaaaaaagatggtatgaagaccaaaatatattaagcatttgattaaactccgatcagctgacatattaacatgatcaaaggttaatgtttagacaaaaggcttttattagttgagaatggtcttatctaattaaacaccacattcgtgtttataaataatcaaatctaatgaaccgacgtcgggtattatatcttatcagtggagtgatctaattaaactaatttcacaataactgattgattcgaatttagagttattttataacatatcttatttaagatagtcttttaaaattccaatgactagaaattaaatattcgtaatttggatttattccagctttgttaggttggtgatagacatagttaagattttcttttctttttaatttaatgttatttaatgaaataaacattctcttgattttaatttaaagaaatttatttgtattgtttctctaaagaatttaccaaccagagtggaggcattttttatcctatgttttgtccagatttggtgagatatttactttttctttcggtttgatccaatttctaatcaaaatacgtatgagtagagcaacttttagtttattttagtaaaattcactacatttttgttactatatgatgtggttcgactgcaccaatccgagttatccaaattagacactgatttttttttctcaaacatatgtaggtcgataaaatcaaaaaatttatttgttttactccaaattaataccacattctttaacaaaaaaaaaagaaattttaaatttcaaattaatagctcctcaataaattaataattaagaattttatcttcatatatttcaaaagaacaattgctaaaactcctgtaattcactttattattttgttaataacccaaccggattaaaccaacccctccgaatcggaaccggcggttaagttcagagaccataacataatagtggtatgaaacagtaaatattaagaaaaacaagggcaagtaccaaagacgccagccaaccacatgctctcgtttatcttcttcaaaatgagtttagtctctctactagtctctcgcctttactcttttctttcttagtactaaaaattaaacgacacttctcccctcaaatccctttttctctctctaaacacatttacacacagaacacaacacactctctctctctctctctctctacgattctcgctcactgttcatcgaatccgtcattggatcgattcgaatttggtgtgtgttttctttccaatacctctgattagagatttcagcagatctgaacggaggagcgtcagatcggaatcgtccgtcggtggtttggtaaaaaaaaaaatggaggaagctttagaaatggcgagagccaaggatacaaaagagcgcatggctgctgttgaaaggctgcatcaacttctcgaagcttctaggaagagtttgagtcctgcggaagtgacgtcacttgttgattcttgtttggatctccttaaggatagtaattttagagtctctcaaggtgctcttcaagctcttgcttctgctgctgtcctcgctggtgagcatttgaagcttcatttgaatgctcttgttcctgctgttgtcgagcggcttggtgatagtaagcaacctgttagagatgctgcgaggcgtctgttgacgactctcatggaggtgaataattttacttagttttgaatgtttgttgatggaatttgcattgctcagaatttgttttttgttaggtttcatctccgacgattatagtggagagagctggttcgtatgcttggatgcataagagttggagagttagggaagagtttgcgcgtactgttacatcggcgattggtcttttcgcatctacggaacttcctcttcagcgtgttatacttgctccggtatctatctctctccctttaaaagctatttggatcatgtttttcttgtattggatcgaatttgattgcggttattttgtttgtttatcagatacttcagatgttaaatgaccctaatcaagcagttagggaagctgctattttgtgcattgaggtaaattttgtaccatccttgttctcaactactaaagtgatttagactttaaacatcaaggcagagtctcacacccaattgtatactctcgacttccataattatgactgagatagttagtagtgaactcaatcaattttgagtgcagtttgagcaaagaatttcactttatcagtagggatttgtctgtgtttttagagaattc

SEQ ID NO: 255 - DNA, 52784 bp, Arabidopsis thaliana
cttctaggcatgctgttttcataccctgctgtaatatctaaaacgctttcctttcctatatcagttgatcattgcctgtaaaaagggtggtaccagtattgaagatcttgctgagaagttccctgacatgatcatcaaggttgttactgtttgattcgtatttggtggtctgatctccagtaaatatcattctgagattctttctcatgcgggtttttgacacctcaagtcatggttttgcgtaggtaccaattgatgtatttgcaggaatcactgatgaagatgctgctaaggttgtggatggtctggctcccaaagctgctgacagaaaagattcgattgaacaagtgaagaagctatacgaactcttccgcaagactgactgcacaatgttggaagtgagttctctctcactgtcttttttctacacacttcttcagttataaatatcttttgttgaacctccaaatttctcttgtagatcaatccccttgcggagacatcaactaatcaattggtagctgctgatgccaaattgaacttcgatgataatgctgcgttccgacaaaaagaggttttcgccatgcgtgatccaacacaggaggatccacgagaggtctctgtctatctcttgtatcatcaagaaagccattgttatgttaattcgataggatgttaaaaggaatagtgtgttgtgtctcataggtggctgctgctaaagttgacctgaactacatcggtttagatggagagattggttgcatggtgaatggtgctggattggccatggcaaccatggacatcattaaattacacggtggaacacccgccaatttccttgacgttggtggaaatgcttctgagcaccaggtaaaaggaaccttctttctttcttcacttttgggaatcattggaatgaaaaccaattttaatagaggtttgtgtcaaaaaataaggtggtggaagcgtttaagatactgacatcggacgataaagtgaaagcaatcttggtgaacatatttggtgggataatgaaatgtgatgtgattgctagtggaatcgtgaacgctgcaaaagaggtgagtgagaaacaaccttgttaccataatatttcatatattcatgattgaaaataaatccgagtgtttgtgtggaatggcgaggacaggtcgcattgaaagtgccagtggtggttcgtctagaaggaacgaatgttgagcagggaaagagaatcctcaaggaaagtggaatgaaactcataacagctgatgatttggatgatgcagctgagaaagcggttaaagctttagctcactaatctctctatatataccaaaagccggtttgttaattgttttgtggttgacgcccaatttacactttcttgcggatatcatttcctcaaacagatcaataatgaactggtctcctttttttgtgtgatccatccaaagagattcaaatcagaattctcaatatctttttgtatttaaccaactcatatggttgatactagggtttcaagtttatctcatacgtactgttcctatcatgaataaaaatcgtttttgtgggaagccacactatagctgtcactgaaacaacaaaattaatccctctctctacaaaaggctttcacaaaacagagctgtcctctgtttccaatttaacggtcaaaacgataaacttattttttgatagaatgttaattatattaccaaaaggaaagaagattatttacaaaaacttttgaccaggattgcagctccattgttgtagtgatgcagctctattgctgagggctatgatgaagaggaaaatcacactaacactactcagctcttgtccaagaagtttttattcatatatagggtttctagtaaagtgaaagatgctgttgatttgttctgtaagaatgctcttttatatttatgatcgacgtcaatgatgatctatgttcaagtgatttggatgatagcaccgaaaaatatttgtctaaattctccttgcatagttaataatagtacaagaatgaacaagaaaatctaacaattggtgtgttgtgttcaatgaaaattagccatttggagctagcagcaaagtctctatatatgtcgtctctcctttcaaaaatcatctctattgtcgaattgaggcatagatctcacagaaccagtctcagacatatattccgacatgttatcgacatcagatcttcttgtcgatcttgatgaccctccattaaccgcggtttctttcgtcgacttcttcttcctcctagatttctttggaatttccggtaatccactaggccaagaagacaactcgtcttgttcttcagtggcttcctttggtctcctcgacgatgacgatgtccctttgttagaagagcgacgtttagttttgtctgatgatttgtcttttgtcggagaacctttctcggacgctgctttcctcgtagattttggtaggtttggcaaatctctagaccgaccaccatattccgacatacattttatggaggaatcatcttctccgactccttcagcagattcgaatcccccgccggagttgaactcagtcatctttcaaatcacataacattaaccaaatcaattcgacattttctgaaaacgttttaggtcaaatttttaatatatatgacctcgtagatttgagtcaagtattaatctagagctcacatccatccaaatatgcgtaggataataaaacaatctttcatttgcctattttatcacgattattgtttacgccttttaagaattaccaaagaagtagaaaagagtaaaaacatacccagcttggtgcggtggcattagcggatggtccatcccaaccgatatgggcaacatgttttacgtccgttggatttccgatttgtatttcttcttctttttcactttctatcatcattaaaagaaagaaacaagaaagtataatcaatcatttagattcatcctcaatccatataaacgtacttgcaatgcatgcatgcaaattttctacgtgatttgcatcatagtaattcaaaactgatcatgaagttcgagtttttatataaggaaaaaaggatttatcatatgtataaactcttatgcgaacaaaaatcagaagaaattaaacaagagatctatagggtgaacttaccaaatacttgagaaatgtatcggagccctttcaagaggcttttcatcttggagcttgacattgtgagttgcatagatctctttttaggtttatgatttcttttttaaataagaaaaatgggagtacagaagaacaaaatgataggttttgaaaactcacttttcccagaaaataagaaagtggtggcagtaaatattgaggaaacaaaatgatagataaaaaaaattgtgtatatagtcaagactccaaaatattgttcagagagaaacaagaattcatctcagaaaattgtaggtttatctttctgcagattcttctatatatcaaaaagaacaaattgataatcctaataagaaaagatttaagaatacataaacaaaattcctttgaaatttacctacaaaatcctcagagtactccaagaggaaaaaaaaagcatcaaacgaagaaactaagaatcaaaaatgaaggaaactaagaagatgtttgtttgaatgatgggttgagagcgtatacaggtgatacggcaaaaaaagagtgcaaaaatgtttgtttaaaccaaaattttcgttaatctgatggttacaatttgtttatctattactatcagaaatcaatcaaaaattagaattagtatatagaaattacgttattctgttccatcaaatgaataatcattaacattaattttcttttgtctctctctgtttttttttttcttttccaaatcttagtaaacttcaatgtatgtagagaatgtgttaattaaactcttaaattaatttagaaaatggtacaaaaacatgaattttcttttattctcacacatagatcacataaattaataaatgtgtgaattatatgctgtaacacaattttttttgacgaaaatattctctcaatttttgtatgtctctatgtcatttgctattagcaaataaaaatattaatttactttaattaaaaaataatcattatatacatttaacgatttttcttaagattatacattcatgcaaaacagaaaaatgtgaaaaagaaatatcaccaagagtcaaataatgtaaggagaggttagtggcccgtacgtagttcattcgtataactgaaaaacggcacacattttaccacaaaatacatagaacatcagaaaatgaacaaattaaaaaaaaaaaaaaaaattattcagcagaggattctcatcaatctccttccagaacctttcaagaaaatttctggccggcaatgaacaatcttctgatcaaaaactgtattagtatatgtttgatatataaagtcgtcgagtagaagttttgagcaaatctttattgcttattactattagcctgcaagaaacacacaacaacaccatctgcattagtataactgtatatcatattatatcttccccaagttatagtgatagtgaaagaaacctttttcaggaatttttcatggatcttcaacgcttctttacatgcttttttggcgtcaagattacccgcaatgtctcctagtatctgcataccaactttaactttgaagttccagagtttgatttttccttgtttggctttgagagaaacgagtgaaaagatacagagacagacctgaacaacatcgtctaagcctttggcctccttcaagagacgtttgttctttgtctgtagaacgcttgcgaccacaaaaacagcaagcgtgttgcgatgttgctcgttctgcccactgtttatgtatttcctttcaaacttgccataccgttttagtaacttgggatcggatgctgcgttgtttcggttttctagttcctcgtacgttgcaaacatggttggattgtactccatcgcccacatcagctgcaaccataatccatctcacattattctcattacccaaacagcagataacgcaaaaaagaagaagataataaacacacagcaagatcttacggcttcataaacaatcacggcaagtaaaaccaggaaccaagaaaagaaatgcagaaagtttgtcattacctcccaaaggtacaaagcgtcaaggaaagagaattctctcctgaaaagtaccatcagcatccgaatagcaaatagatactccccaccatcgagatcctctgtcacattaacacgttttagcccaccacaagaagagtttttatgataggaaaacactcttacctagatgttgatggagacgaggatccactgtcttaatgacctgtgagagcacacccagttgagtctggacacccattgatgttgctgttgccctgaaattttctctctgaaattcaaagaaaacaataaaccgtgaatacaatggtctggtaatgacatgaaacatgagaagttatgtcataggctattagttattactagtctccgcattgcccgctcaaagcaccagaaagcgtcgccttcatcatcaaagaggattatcattggggaacatatatcattcattcctacatgaatagacaaagtggatcagttctgtttcttatatagtttcaaaagattaatcgttaacagcaagtacacttaccctgaacataaccaatatcaagattcaaccacgtatatatggcaagaacgtcccatagttttgattgattacgatcattctcataaaaacagagataccgatctgttctagcaacatcaaggcctgaaacaaaatatacaagaatatgtaaaaagaggttataagaagataatcagatagaactaaacttatttatatgtaaaggcataccgatctggtgtagtgagagcatccattgtagcactctctcatctgtaacagtgtttttcacgatccatccttggttttctacagaagattcgtctattgggttcccattttcttgaacgactgccattgtgacgtacttgccactaccaatgacaggaaccattttcttacattcttctttccatgcaccgtactgctcccttagatgatcaataacatttaaagttagccatgacgtgcatctacaaaactagtaaatgatcaaccaattctatagtaccttctgcgattcctcagtatgttcctttcctcaaaagtgctgtctggatcgtagcatcctaacaaaaactcccaaacagcgcctttgatggaaggatgaattccctagcaaagaaaccaagtgaacaacaacaaaaagagcatatagatagaaacaagatcaggaaaagaaagtagactcactccgcgctgtatacgtctaagcactttttccatatccaaatggccatcttcagtaaaggcagcgtgccatcttctagcacttagagtctttccagcctgacaaattacatatcaagatgaatcatttcatcagctacaaacaaacaaacaagaacctaatgtatcatcaattcatcaagacatgaaacaggtgattgagaagaagaatggtacccttgatttaaaacgggtcctgggaacatctggttgacattcaggtctaactggatagaaaccttgcaaatcttctcctccggatttccacataaatccgcagcaaaacattcaaccttccttcttcttgttcaaaccaaacttatagtttcatccatctcccacataaatcattcatggattcatcagaccactgttcaagaaataaaacccaggatcagaatggagaaaaaatgaaaactttacaaatatgtaaacgaaaacacaaggaagatatattctttttgcaacgacgaagctcccattgctcaataatatatataaccttaaaatcagtatcagaacaccatcatcattatcatttggataatccagaaaccgattagacccaacaatttgaaattgtctacagagagaatacgaacaaaagaaaaatacatacagattgagatcctaaacagccggaatcttcagagacatgcccgtcttcttcttccatctttcatctttcatctttctatttctagcagagtactttcctttttaaccgaaccaagccgattttattagctccgatttcaaacattaaaccgatcggtttcggtattcttaaacgacgtcatgtaatctctccacatttaatgggcctttaaaattgttagtgggcttctatatgcttatgtgcctaattcttttatatcaaaaaccctaataatctcttgggcacataaaaatctcttcgccgcacaattgctccaatctgtttcttctagccggccaaaatggtgagcgatgttcttcgcttgattccatgtattttagtgtttctgaaaactttaaagattctgctattgccctagctgcttctctttggaatttgttatctttacagatttatatagtttttaacctcgagaactttgtgtttgattgtgaagggttttaagagattcgtggagattgggagagtggcgctcgttaactacggcgaggattatggaaagctcgtggttatcgtcgatgtagtcgaccaaaacagggtaacttgatatgcaagctctgttttttttttcgatttggtattgtaatcaatgtaactatcttcttattgctcactgaaatatatattgatacaatagttatgatgctaggagtagaatttgtatgcttagtttaatacttgtggttttggctgaagctaggagtctttgaaatggtttatgttttgtctaaagtgtttctgtttatcttgtcctttttaggcacttgtggatgcccctgacatggagagaatccagatgaatttgaagaggttgtctcttactgacatcgtcattgatatcaacagagttcccaagaagaaggttttgattgaggcaatggagaaggctggtgagtttgttgtagcatacttttgattattcgtaggttttattggcctttttttgttgttggttgggttgggtcatcttagctctaaagttatatgcagatgtgaagaacaagtgggagaagagttcatggggtaggaaacttattgtgcagaagagaagagctgccctcaatgattttgacaggttcaagatcatgttggccaaaatcaaggttggtttacttctttgtatccaccaatgttgttttagtcaactctactttgtgcaaatgcagatgagttttcactgcttcatttgccctcactttcggttgtggtttagaaataatactatctaaactttaaactgtatctactactactacattcaccatcttcttgggtttatgatctttggtttgatactggtttgttttggattgtattaagacgcatcttagtgttattgaataacctctaatatatgaatattgttttgcagagggctggtattgtgaggcaggagcttgctaagctaaaaagggagatcgctgcttgatttcttaattatgatccattaccaaatcttatttttgcaactgtttttttagtgcaaattatgacaagttgagttttttttagtgcaaattatgatatcaattttgctgattccgggctactaaatagtgaattttttttgctatcggatattattattttagtttagtttttctttctaaagtcttggtctgattggtctggtcatctttttaaaccacctatgaacttcgatctttagtagatgcagttttttcttcttcgtttagttcgcatatcttcaaaaatcttacaaccaagtagaatcttagctgctgaatatttggacatttgcttactttagaggccaaattgttacgtgatgttgctgttgctatgaggagaacgaaattctctgaattgaagaaaaacgatacatatttatagatattgttgtgttgttgtgtcgccggttaacagacgcatgttttgtcgaagcaaggtcagaaccccaattcagatgagccaacttcttcttttatgggatttgggccagagtttaggtttgttgttactgggactgacgagcttaggaaaatccctaatagatatgggccttattctgatctccttgtttttggactagtgtttatttcccaaggtgtattgggcctgatgagaccaacaaaattcttaatggagatggcccagcttctgctttcctggtttgtgggccagttttagtgaccctgccaattataacatgaaacagatgttataatggaaatttgcatttataacatacaaaaatattacaattaggtaactaaccaaaataaatagtccaatgatattgtgtgtatttcctatattttagacataagtgaccttaagataaaaccaatcaactcgccggtaccgattacaacgtcgtcaccaccacaaagtcaccaccaccatcaccaccaccatcaccgccatcatcatcaccgccatcgtaatcacctttcacgatgaagaaacgatgagagagagtttgttatagaaagggaaagttttattcatcttaataataatgtgtacaattgtttctcttatatacacgtatggtataataactaaaccaagctaaaccgactaattacatagaaccggttatttacacctagctactctattagtccccctcaagatgagaatacaaagatgttttggatactcatcttggacaataaatgagcaaattgataagggaagagtggtttagtaaggatatcagcaacctgatctttagtcttgacatgaagcagcttcaactgaccattatccagcttctcacgaacggtgtgacaatcgatttcgatgtgtttcgttcgttcgtgaaacactgggttagtggctatatacacagcggcggtactgtcagagtataaaataggcacacctgaatgaacacgcaaagccaataacagtgtagacagccacgccatttcacaagaagccaaagccaatgctcgatactctgcctctgcagacgaccgtgagacagtaggctgtttcttggagcgccaggatatcagagaggaaccaacaaacatagtgaaacctgtggttgatcgacgactatctgggcaagtaccccaatccgcatcagtatagccttttaaagtcagatcatcctcagcagaataaaacagaccttgacccactgtacctttaatgtattgtaagactttgtagacagctgcaagatgtgcagtacgaggagcagaagagaactgacataacttgttcaccgcaaatgtgatatcagggcgagttatggtcagatacatcaacttgccaacaagtcttcgatacatttctttgtcctccaagagtagaccatcattcttagataatctaatattcggagtcataggtatggaggatggtttacagtccaacatatctgcagaagtgagcaattctaaagcatacttcctttgagatagggaaataccttcagaagtgcgagcaacctctaaacccaagaaatacttcagtggaccaagttccctcagcttaaagctagcttttaaagcctctgtcaacgactgtgctgcttgttctgtagtactcgcaatcactatgtcatcaacataaactaagaggacaatgaactcagaaccaatacagcgaacaaagagagtatgatcaccatgctgtttttcgaaacccagagccaacagagagttagaaaacttcaaaaaccattgacgagatgcctgtttaagaccataaatggacttcttcaaacgacaaacaacattaggtggcagagaagttcccttaatatctgcataaccatcaggcagcttcatatatatggtttcctctaaatctccattgagaaaagcattagatatatccagctgattcaaataccacttcttagaagctgaaactttcaaaagtaactttactgtggccatcttagcaacaggagagaaagtctcagtgtaatccaaaccttccttctgagtataacccttagcaacaattctggccttgaatctttccaaactgccatctgcgtgaaacttcactgtaaatacccacttacatccaactgccttcttcccaggaggtaaacttgtaatctcccaagtatcagtcctttccattgcaccaatttcctgatcaatagcaccacaccattctttggaatcctttgcctcatgataagattgagggattggaattttggaaatgttattgatgtataacatatgagatggtgagatttgagagtaagaaagagaagatgaaataggatgtgagtcatctttattgacaaaataacagtgatagtcttggagatgagcagggaatttagtaatcctacgtttagaaatttgtgttgatggagaaatttgtggtgatggaagatgagaagtgatggaattacctgaggacaaaggatccattggtgtgaaaacatctgaagctgtagtagcagactgttgagaactcgctaatggaaacaactcctcatgaaactccacattcctcgatatatgaaccacgttgctctctaaatccaacaacttgtagcctttaaaaccaaacggatagcccaagaaaacacacgctcttgaccttggaaggaacttgtgtcgctgtttcgatgaagtagagctgtagcaaaggcaaccaaatgtcttgagctgagagtaatctggtagctttccagtgagaacctcaaaaggagtcttgtttgataacaaagcagaaggtgtcctgttaatcaagaagacagcagttaaaacacagtcaccccaatatggcaaagacatgttagactgaaacatcaaagcccgagccacattaagaatatgctgatgcttcctctcaaccactgaattttgttctggtgtctcaggacaagaatgaaaagaaacgattccctttgctttgtaaaattctgtgaaagccaactctttagcattatcagatctcacagatttaactcttgtatcatactgattctcaactaagtcaatgaaggcaggaaacactgtgaggacgtcactcttagacttaagcaaataaatccacgttgctctagaatgatcatcaactatagttaagaaatatttgtatccttcaactgtctccactgaaaagggtccccaaacatcaatgtgtaacagctcaaatgttgaattacaaatgttgttcgcagaaggaaatgacaacttcttttgtttggctaaatgacaaacatgacaataagctgatttcttattcttatgtctagtagttcccaaaacttcagaaagagaatccagtcttgaaaaagatgggtgtccaagtctcttgtgccacacgctcacatccacaactgcattcaccgagatagcaggagattgtgtgtccaacacatagagattcccaatccttttaccttctccaagcgtcaaccccttggtaagatcctgtatttgacagcaagaaggatcaaagatcactctagtaccaaggtcagtagtcaaagagctgatactgatcaaattcaatctgaattcaggaataaacaaaacattctggagaataatgtctttgtttatcaaaactgttcccactccactgattctgacatttggacctgttggaagattcacaaaactcacaatagaagtatctaaagtctgaaacaattttctgtcatgggacacatgatgtgtagccccagagtcaataacccaagtgtcactggacaaagagttatgtgaaactgccaagatgccaataaagcaatatgtggaaggagagaataagataccagaaggagcaacagactgagaagaacttgcttcatgctgagaagaagcagtctgaggagaaacaatctgtggctgcaactgagaactgaacaaggcaatcaaattctgtatctgatcaggggagaagttaccagcaagagtctcaagttgtcctgtcatcttatccggagaaagagtaacctgagctgccactgcctgaggttttggaggtttatcagaggacttccctttaggagtgaaacctggtggaaaaccatgcttcttatagcatctttcagctatatgaccaactctgttgcagaatgaacacgtaggacgacctttgtttggtccactctgaacatacattatctcaggagaagtgataggagaatgagatacctcagagacttgaaaagctgcaggtggagcaacaacattaaagaatcccttctggctattatcctgatccaagatatgataaacttctgccaaactaggaagtgccttctttgcaatgatctgtctacgaacaatggcataagactcattcaatcctgcaagaaatttcattatcttagctttctctgccttctgatacagacgaacagcttttccacaagtacaaggatcatccaaagcctctgtactgtcaagctgatcccagagagtctttaaaagagtatagtactcagatagagacattgttccttgacgaagatcctgaatctcctgtgtcagattgtaggtacgtggaagattcgtcaggttaaacctgtcaaagagatcacgccaaatatctgtagcatcattcagacgtaagatgctacgatagatctgaggagaaacagagttaagcaaccaggatttcaccatactgttgcatctagaccataaacggaaatttggatccgattctaaaggacgaggtaaagatccgtctacaaatcctagtttgttcttagcatccaacgagatcctcatagccacactccagtcaccataagttgtttcatctaaacgatgagaaatgatgctcaaacctggatgatctgcactatgaaggaagaaaggagactgcgtcggatcatcaaatcccgatgagaaaacacctcgcgaagctccagcggtctgagaacgagccattggaggagaatcggaagcagaatcgagaacaccggtggactttgatgatttccgagcaacagaacccgtcgacaccttcgagcgagctgattttcgagtaacacgaattccaggaaccattggatcgtgaagaaacgaagaaaactagctcaaaagaagaagaaatcgaacaaaatcaagaaaaaattgagctcgatggctctgataccatttcacgatgaagaaacgatgagagagagtttgttatagaaagggaaagttttattcatcttaataataatgtgtacaattgtttctcttatatacacgtatggtataataactaaaccaagctaaaccgactaattacatagaaccggttatttacacctagctactctattatcaccacgtcgtcactactaaaaccaccagaccgttactatttatcacggatatcaccgacaccacggcaccaccatcatcatgcccttagtccctcaccatcaccatcgcaaccaccacggcaccaccatcatccccatgaaatcaccatcatccctatgtcatcaccatcacaaagctaagtcaccaccatcatcacaacgtcagcaccaccaccatcaccaccacaaagtcaccgtcaccaccacaacgtcatcaccgccaccatcgtaaccactacgtcgtcactacctaaaaccaccacacgtccacaccgttactctttatcatggatatcgccgacaccacggcaccaccatcatccccatgtcatcaccatcacaaagtcaccaccaccatcacaacatcatcactgccaccatcgtaaccaccacgttatcactactaaaatgtcgtcaaatttttgacaaaagaggttaaaatcgtcattgataaagtccatacgttattcttttaatttcgcaagttatagtgctatatccttaaatattttatcataaatggttattgccttaattcacccatgttataatcgagaagagtcaagacttagcaacaaaaaaaaaaactattagacagatgttatgattttgcaccttccaagggctgacgaaattactacttctgagtttttgtcttgataactctccaaatcttcaccatcatcattcatattttgtatattagaaataagtgtggtgccactcgaaggtatattaaaaaaatacatatacaaaatgttttcaatatagaaactatcatcatattgtgaaaaagctataataatattaataataataagatttgtttttaaaagcgatttttcaaactcccatccaatatatataaatcgagggtcactataattgattatagccaactttttgaaattgttttttgtaatttgcactaaatcagaccaacaataaatgttgttattttgttagatgacaaacacaaattataatgaaaaatcttataaaccgattatgtggctatgactggtttaacaatacatagacaaacgcttttttatcgaatatgttcagattggtgataaaaataacaaagtaggtaggtacgagtactttaatcttagaatgtgaacagattagttaccccagtattttttaggagagttaaaaataacttaatgatttatatatttttaaaacaatctatgttttcaaaatgagtggaagctaattcatttttcaccattaattatcattgattatcagcttcattcgttgatatgtctatgtcgtcaaaacttttttgcaaaacccatcactatttttcacaacaccgtggactagggcaaaagcagtatcatctaactcgcgtactgtaatcaaaagatataatacatccacaaatgaatttacatcttaaaaaacatttgtacctcgtgttcttattagtgtctagaaatagaagctccaagaccactaagtgtcctctcttcctttggtgcttgtgcttcctcttcccttcttatacgagcgcaatcgatagaatgcttttcataagcctcacctccactggcatcactggtaccacgtaccaccgcactatagattagttccacgtcttcagctggcacatagacacaagtagaaccttagtggagatttatgttagctacttgtggtaagttattgagattaaccctggggagaccataatgtagacgcagtccaaaccattgtatgatccagcaactcaagatattcctctccctttatgaagagaacaaaattctgtgtagtgcaacttgcgagcaagtcttgacctcttctaagcctctcgacttgcctccacactcaaacaccattatctccttctcttcatctccatactctcttttcttctggaaattacatgattctatcattaatcttcaccctttagatgatacaactttgaattttatcagggtattcacggaaaggtgctggaaaatctattctacaagaccctcaggtagaacagaggcaaatatctttaatttatcttcaacacgaatttaattttgggaagcaaattttataatcaagattatattaagagaacatgtatttttcatgtcaaataagaatcaaactgcgtcttgtccaaagataagaggacaagagttaatacatgttctcttataatacatgtattgagggaacatgagttattacatcatccctttgagtcgggtataccagctgatatatatactgtctagactctattgcgtttcctcggttaaccagaactatatgaacgtggatgacttcttgttgcaagaaacaaaccagcagtaattgagttggaggaaccgttgtgcttgcaagcctataaccatgccaaaattttgtaatatatatgttctttttgcttccttttgcattttttttggtcttggttgttgttaattcaaatctatctttttgaaaatctagctaatggtaaagtttatgtactcagctccaaatctatagaagagaatgtttttgatatattgagaagagaagctaagctctctttatatacaagttcgtacaaagtaattagaggaagtcaatattctttacaatcaaggagatagagagattagtgggattgattaacgagagtaatcatagggattgattgacgagagtaatcatagggattgagtgatatgattctctgtaataaaatcttcagtatattaaattattgattgatttattaagcagataccaatacatttgattatatagtttcatcttatataatagagctgtactagtttaggtaggaggaacaggtataacatcaaaacaacaacatttgattccaatacaaatgccgtaatcagctacatttttacaatttttttcgcagggtgctccctgtcccttaggacacccttcatccacgtagcatctccattccggacgaataattgttcgctctattccataacctacatatacaagatcaacaataattaatcagtaaaacccaattatcaaagagttaaatcatcatctaattcataattacaaaagtgaaggtataaataacaataaacaattacccggtttcccaccatgagtcataggaagacaatgaacaaaagatatgatgaagagaacagtccaacaaaatgcgactaaagtttttggggaaaatcccataataatgatattctctctaaccttttttctaatgagtttttctttaccaagaatgattatatgtcaactaagaacacaaatatatgttaaatgtatttttttcctagtcaaagatacaaaatatgaaaataatacatttttaaaatttatttccctatggatatatataaattcctggtcaaagatacaaaatatgaaaataatacattttttaaatttatttccctatggatatatacattgaaaattattttctagccttattacgtttcagggtaaagtaatactattcttttatatataataatattaatagaattgaaatccaacactaatataatattattcaactactaattctaaatctagctttaaaactattttaataaattttaaagtttggttgttttcaactaatatttttaaatacttcattaaaatccagtgttatttaaaactaaaagacttataattttttatatattaattcatttgaatgaaacttctttgtagttttatgagtaaattattagaatcaatatccaagatatactacaaatcttcttaagtctaaggttattagattcataattttataaagtcaaaaagttttgtgttattcattcaactaaagcaaaataatatcttataacaagacgatggttggtagagtgaatatgcaacacatataccaagtgaaattacttttacttttatttttgtcaaccatacattaattaaaacagaagttcatgattgctgattagtagcctaaacaaaaagataaaagttttcatttaaatatttattaagttatatttttatgattgaatattagtttttataaaaattgtagaaaaattatgacttgaaaatcaagctaactttgaattggtaaaattgatgtactcagcttcagataccttctgtataatgaaaatattgatttattatttttagcagataccaatacatttgatgagataattcatcttaattagacccgtactagttactctagttagtttatatagtcaatacagcaacatttctctaaatcaccagtacacaagccactctcgaactttagtcttttacaaaaaagatcacagcttgctaaccctcttgcgggtttacaaaaagaaaagctgaagcatgtgactctccgacgcctctgaggccctatttcataacctacacaagattaaacaataacccaattaaaaaaagagtgaaatcatcatgttcataattacaaaatgatcaggtatacataagaataaataattaccaggacttctagcagttgtaggaagacaatgaatagaagatatgatgaagaggattgtaaaacaaaatgccactaaatttttcctagtgatggccattttaattatattctccaaacttttgcttaatacgtttttatttacctagactgattattctatatatacaattaagaacacaaaaatgtttctattgttttcttttcctggtcaaagatgcacaataatacatcttttaatttatttccctatagaaaattacttttttaccttaatatgtttcaaaacaggtcagacaatattagtatttttcagcatattagttaagttttaaaatattatatataagttctgatggttgtaaatattcaaaattattggtatatattaattaatagtctgtatatataactcacaaaatgtcattaatatttttcagcatatttagatatcatttagtgagttatatttttatttgatatttacgcatccttgagacagttgaatttgcaacatcatttaaggttatagaagaaaattaaacgtagaaatgttttatacaaaactctttagtaatcatttaaaatctttttttttatatggaattgaaatatgtttccaagtaggacatacaaaataaatatgtttttagttttattttcaactcgaattttattattggcaaggaaaattataaacaagatcatctatcaatacacgtacttttcatgtcaaataagaaccaaactgcgtctgtccaaagacaaacaggagtggtcggtttgtatttttgctaccgcctaaaacattgggacgacacaactcaactccaacctttgacaaatcaaaccatctcttctctgttttagcaagcttcagatccttcttgctttggtctcacttcaagttctggtggtagaagtttcagaaagcttccctgaacaaccggaggagcaggaggaggtcgatcacaaggcggtctcgacgttgtttccgatgaatctgaggtctccgatgatccattatctaagggaacagttcaaacacacacaaagccaattaaaaaaaacacattcaagattcacatggaaatagccaaattttggaccagtaaacgaggttgttgggtaccgaagagtgacttgaccattggtcgcgtcgactttttcttcttcttcaactccgctacaaaacatcattaaagttaacattcaaactaattgcaatcaaatacaagaaccagtgatcaagtaagtgtgtacccattccaggaacttggtaatcattaacaatctcaaagttcttgtatgtataccctacgaagtttatgtcttttgacgacaacatctgcacaagtaaaagcggaaaccattataaacataaaggaaggtaagaagaaagcagttttgaatctctgcaagcaattgtgttcagagatagggaatatggttttgccttcctccacgggccagacttggatgatgtctgagtttccgattcagactgcatttccaaatatataataacacaaagaattaatcaatctgcaacttttttgccgtataggtcgatcaaatccaaaagaaatatgatgcgataaaagatttgttacctcgtcaaacttctcaaaattctgagtgtctaaatcgtcattgacctctggaacaaaagctgcatccatatcgaatattgtatcccaatcaacagtttcaaaccatgtatgagcctgcaaatgcagataacaattcatgcaatttgatctcatagactttggataaatatatatagaatgaactctggtatctataatcgaactacattcaaagacacagtcgcttagttgtgaatatgataaactatcaatgcatccaaacaaaaaaaaaagcttttaaagaaataagtacaaggacacctttaattcatcagcacctttggaaccaagcctacgtctgacactgcacaacagactgttaataagatcctttgcttcccttgacaatattgcttcctctggaaacttcaaatgacttttccagtttactatctgcaaccaaaagcaggaacaagagtttgatgtcatgtcagtgtcactggaaggttaacaaatttcaattcattcttgcgaaaattacctttctacaggttgacataggatcatctgaataaaacggcggatatcctactagcatttcgtacattatagcaccaagagaccacctacatagcatttcattgagaaaactgcattagcgtcctattcaaagcacaaatgcagacagtgtcaccaaataatgcttcaagatggtccctttgactaagtaatgcatcataagagtagtagctaaaacacatcaagatgtaattcaaatgtgagtatgttcctcaggccagtggtagctaagagagataataagcaaggattgattaatatttcctaacaagattcagttcagtatcaccaaaccaacacattcttgactgcgtctgagtctgaaaaattatgcaaaaggtgcacaacaccgcaatgtactaactttcttcttttgaaattggctaaacacaaaaatatatgatggagtatgtatgctcatagcctgtgatactgtcacaaacaaaaaagagtctcaagtgcttaccagtcacactccatcccatagcctttcttcaacagaacttctggagctatgtaatctggtgtgccaactgtggaataagcctgtcgtgacatgtgttaatcagacacacacagagggagaaactctattgaaaatctcaaaggtgaatatgaagccttactagcgttctcctgttcctctgccaatgttcaagttgttcctgctgtgtgcgttttggagcagttgatccagcctcttgctccgtagatccattggaattgtttgaaaaatcgttttctccaatggcactgcagtccaaaggtttacacaatccaaaatctgaaagtcttagatgcccatatctgtcaagcagcaagttgtctggcttgatatccctacaaaagcaaaaaagaagaagataagctcacccaaaatgcaagagaacaattaattaattttgtttgattttactctcacagaacctgtggatgtaattgtgcctgtggatggactcgatagcgagaactgtctcagcgacatagaacttggcctcctcttctgtcaaagtatctttgcgcataagaagagtcatcatatctccaccaggcaaatactccatcacaaggtaaagatggtcatcgtcttgaaatgaacagtagagcttcactatgtagttactgtccacttccgcaagtaagttcctctctgctctcacatgttcaaccttgaaaaaaaacgagttatgaagtcaaaagatgattgattcacagaaaagaccatcaagtagcaatagatagggaagtctcacctggcctctgcgaagcatctcagccttcttgagctttttcattgcataaacttgacctgtcgtcttttctctacaaactctaacctagagaaacaataacaacaagaacatatccttttaacaactgaaagatttgtaatccttctaacacagatgaactcaggaaatcatacctccccaaatgcacctttcccaatcattgtaagcaaatcaaaatcagcaacacctaacttatggcgttgaaggcgcatgtactctgtctccttcttctctaaaaacttgagaagattattttgatcttcttcagacacgtcagcatctgccagtttctgctctaacatgcttcgcctgtttaagcaaaaaaacactaaatcacgctccatttgcaaagaagagatgtacatttggtagagaaataagataatacctttctttcctctcttgtagaatcttcatctgctctttgtaatgattctcaatgtactgtttagctgctgcaactttctgtttggtagtgtttgaaacagcttcttcatcagtttcgacgttgtgctcatcggcagagccattacttccacctccaccagcaccacctgaagcacctttatatctggatcctccacgcatctgccgcttctgaaaccaaccctttgcagaatccataactctttaacaatacacacaaatttcactgatgattgatcatcttctcatcaccgaatcgttctgcatagcaaacaataatttcgaaatcaacacacatcatcactacaatcaaaacataaccttacgaattggaatcaaaaaatacattacgatctttgaaaatctcagtcaaaataacaaagctagattaatctgcgattgtaacaaccttaacgtgacagattcaaagcaaagcagggaaaaaaaaaacaaaaatcaggaaaggagaaagagaagaaaagaggaattgaatgagcgtgaaactctctagagcatagcacctatttcgcatgaattgtatggtattaccattaatcagataagcatgtgtgtatatatgaagattggtgcatttacatgttgatgaagaaaggatcaatatctgccttcgttctcagcgtaattttctctgatgcttacatgcagactttttctctctctctttttgttggttatatattttatagaaaaatcaagtttaatatgtgttgattttttatctatgaaaaaaaaaaccttaataactagttttgttcaacaataaacaaatcaaatttacaatatttgttactatatcgcaagaatttatttatacaaatgattcaaaagtctacaaaatcaataatattttgtttaagaaacgaaatattccccatttccaattagtaagaccactataaccctgagtcgttgcaacaaccatttaaccgaccccacgtgattctcacgtgatgaatacaaaactctcaattaaatcaaaaggttgcaacacttctctgttcatcaagctgaagaatcaatgggccaacaacaacagcatcaaaagattcaaaagtcctcaaaactataaaacaaacaaacatatgaaaacatagacgacaaagctaaagaaactttacccttcaaagccatttacgtcactaaatgttgcgtgcatatacatgtgatgagtaatgcattagactcctattgaaattcactctgttgcagccaggcacaaagatgctctactactaaatcactcgtctgctcttaaagctgtgtctttattaatcaacatgggattgtaatttaagcttatcaagcatacaaaaaaatccccattggtttttacaagcaacaacaagctcaaaatgtaaaacaaatcagataaaaaaccttgttaatccaggtagctacgattcagatggtctgatcattgggaaagaaggcaatctcagcacagcttcttctgtctccattggatccgatctcagaatctaataaaaataaatgttacaaactgcattaagatccactaaatcattcaagataacatgtattgagaagataaaccctaaccagaaccattggaatccagagtcagtatattcttggaagaatggtacaactagatattacatcaacacgtcaaacaattggcacaaaacagttttgacccgcacacgaaagaagtcagaatttcattatggaaaaacattgatccaccggtgaaatagttcctctttgtaactagaatgtattcaaatggaaattgctaatggctactaaatgaagtgaactttcaccatttggctttaaaattcttatctatacttaaaaaaagtttttgtttgatctgaagctctagttctatggctttctagaagaacaaatgattcttcatgatctctcaattaactttcacatttcagacctaaacataagaaaattgacaaaatggagatacatcgattcatatgacatggaaaacgaaattagtgatctttagctcaaatgacatcgttaaggacatcgaaacacacacaatgtacggaaaatagagagagagagagagagagatccttacagggtcctgaagaacaggtttggtgtcatcaacggcaggtctgaaaggaggtttctgagttttaacagttgcgttcggtctcgccggagtctctgtagatttcttcatcgttttctctttctttttcgccggcgaatcgaaatatcggaaatttcacttttaggggatttagtggcgattttcacacgtgacggaaccactcacgtgcattagttgggctctgaatatagtaggcccattgattggggttacaattttttatatcaaaaaagcccattttgttttctcttctagaactttatatacacattgacgagggtcgccgtaaaacctctgctacttctgctccagaaaaaccctaatcagcttctcgtctccataaattcagaaccaagaaacatctctgaggtaccatcttggtttgccaatttcttaatcagctttgttactttttttttctcttgtcgtcagctctaacttgaattatctccacagagactaaacgaagatgtatcttcagtgctatatcaacgagaagggtgagaaggtttacacaactaaggtaccttcacactgttcatatcttcttcttcttcttcagtattcttaattcgtattttataacttcgttcatgtgtttctgtgattcggaaataaatctctgtttttgttcttgaggagagttaccgactttgttataggtagtttcatatacattcaattcaatagttcttgaaggttaaatttcgtagatacactgaagctttgttatgtttgcttaatcttaaaatttgctgtttgatatatcttaagctaaggaagatagaagttctttcggacacattgagtttggttttgcttgtttaatcttcattttagcagatataagttccgtttcatatacattgcgcttggttttgacaccttactattaaatttccatgtttcatctcttgtagaagttaaaaagaataagactatatgcttgcttgttgatactttttctgtgaatttggttttgcttgtggactctcaaaagtcactgtttccgttaaaaaaactgtgttgttattttatattcttactcatgaattaaactctattgtgtagaaggaatcaccgctagggctagccactgaatctgcccatccaggttagtctacccttttgagttgttttagttatgattcgtgaaagtaacaaaacctttaaaccaaatgttttgtgttgtttgcagcccggttctcccctgacgataaatactcaaagcagagagtattgttgaagaagcgatttggtctcttaccgacccaaaacgcacctctccagtactgatgaagaagcaaaccacttgcctgtgttggtttttgatgttcctttttaatttgctatgttgtctcttaatgaaatgttgacttgaaccgtctttgtaatgtcttcaaatagtgtgagttaagagcaatttttacctatcgtcgtcaagcctgccacttaaagattaatttacattaagaatttgtgagtgcccatttatgttgctttgtttcttgtcaactagaaacttcattaatggctcaagtaagaaaccataaacagagtatcatatcaaaggtaagtaaaccagagagaagatcatcaacaaaataaaaatttacacctgtaaaacctcaaattctcgaattgaaacaaattaaagttatgtttgggcccttttgttccaggcccatgaaaattgtccgtgccgacaaagtcagttttttttggttcttcgagaaagaaaagaaaaacaaaatgaagaaaagaacaaatccggaatcgtccacctctgaagcaaagaaacgccggcgagaggaagatgacgataaagttggttgtagtcactctgcaattgaagatggagcagtatctgaggatcaatgtcttcctcttggtgagttttgaatctattgagttggattttgtaattcggatagataaatagctctaattccaacattggttgttgctctgtttttgacagaggatgatctcacctttagcgatacttctgttgcccttcgaatgatgcgagctcagtttcctcgtattgaccaggttcgattatttgatcaaattggcatattctcttgaaatcggaccctcttatactctgaaagttgaaacgctgtgaagattattagttaaaagtctctccttttcttgtacttgtagttttgtcaatttctttgtacattgttgtattcttacagctgtttcgtctcctgcctctggctcatctgtttcaggcttcgatcccacccttcatattacagtcgcaattgtacagtagtgtcaatgatagaacccaagtcgatagagaattagaggtaatgctttctgtttctgcacttcctttatacagtagtgtggttttggtttgaaaaatgaaatgtaatttgaacaaataaaaataataacctctgtgttgtatctgtaaggtgtctcctggtaagtttagaactgtaccatttgtgtttttgtatcgtaatgggtgggtctactttggttctattgatgttggaatatttgtactttggattctatctaatttcccatttttatcatctctattggacttcctagagttctttggattgatcaatcaatttgaatttggtgcagtgtttacgaagggagaaagttgttcgtgttttcaaactcaacactggacaagatgatcatgccatcatctttttggatgactatcttaaccaggttggtatttgctccatttcaagagtctttcgtcttgttcatgtgttagctttagtattttggaacgttctcatgaatagacttggtttcttattattggtattctaaaggtggtctttccaatttttagctaatcaatatatgtggacaatatcttattataatccgtatgttaggtagatcgaatagtgaagaggatggaagagaagaaacagagtgatcttgaaattttcaagttgttcaaaatgcatgtccttgattcaaaacttgaacctagtatcgggcatcatgagctagtaagttttttttaatcattatgctctttacttatcactttctatcaacatgagtttctaactaacacaagctgtcgatactgaactgcagctttcgctgttgtcattgggaggaaaggtgaaagatgcacacatcactctcttaataaacgcaggccttctcgtaagtaaagagttatacttctacttatctgttactccatgtaaatcgttccctcttataactagaaatagttttatctcagacacgccaacttatcgatccagacatgtactggtttgcaattccgagtaccggtaaattgtggaagggtctatcgcaggtacctctatttaattttttatcaatttcttcccaagtgattgcctcaagcaccttttcttactcttaatctaaaaattagggaaggaacgaactcctctcattgataaagcgcaagcgacataaagagatgttcttggctgagcttgaaaagaaacggctccggttctctcctctggatgtgagatttcacgtacgtgatctcattggctccggtcacctgaaaactgttcagacaacttctggactgatcgttcggattttaaaggactaaaatgcaggtgcaggtttctcatcaaacgggtaatttcatattcaagagacctttttcacaaagtcacatgcttttctcattagttcagcttgctactatgtgcaatatattgttcgaggaatatatacgatttacaagaatgattacagacttgagccaaaagccaaagacaataattttgtacagaatagttggtgttggtttacttatacacagaagaattactacttatcaagtcttgatattattgtgttgatgatgggtactacaagttgcgtgaagcgagaatctctgctttgactctagtgatgaactcttcagctctttcgtctattcccttctccggaaacaattcttccttcggtttccattgctttgctggaatccaattggacacagctacaggctccctgaagagcttatccacatatacaacatctttgcgtttcttcttgaacaaacaacctctcttcaggcggatgaaaaaaacacgggaatctctgtctcgaacattctctctggatcggtggcttgaacgaaggaaatgtttgtccgaagttgatgctttgtacttggtgtggtgtttggttttggatccccggagtttatggaagctggcggtgaagcttttccaagctcttttggcaggtaaaagcctaattctaaggcaagacatgactcttaagattgttgagattgagagagtgaagagagatgagaaaaaaaattggtggataaagcaaaggcagataagcagaggattatatagaagtttgtttcagcttaattcggacgcaagacaagacagaagcggccaataatattccacttcttgcttaatctctacgctgcttcctaaatccaaatctctctttattttataatgattttgctttaagaaattttttatgttttcatatatataaatagtacattgcagaggagattagagaggcttagcttttattataaggttaaaagatttaaatgagagcttgaacaccatttctacacatctctctgagcctccaaatgggataaatagcatcttcccctaattctgttgtctccacttgttgcattgcccattcatggtacaccgtgtgtatcgtgtcctgaatccaacaacaacaacaaattctttaaggactctggcattgcacatatgttttggggtttgatttatgattttgattcacagtttcctttttacctgcccaccttcttggatttctccattctcgtcacgaacgcagtagatttcttgcgtttggaactaacatcaaagatgacaaaccccatcagatccaatttttacctaaagaataacctctgaagaaaagataaagatcacattcattaccttagcgatgattattggggaatctcccatcatctttgtcacagaaactgagacttcagatatatgcagaagctgagaacatcaaaatgaagcaacttactcagggatttacatgacttgatcccttgggagaaccaagaacgaaaaccttaccttgttatcgaaaaggacaccatgagtttggtaagctgtgcgctctgccgtgcaccgttcaatcacttccttgctgcaatacttcttcaaggtctcaacatctccctgcaaagagttagttagaagcagcataaacgagaatgggaggagatgatctatttcaaaacctaagattcacctcactgtatgcattcaagactggtttgatgacttcctcaatttctgcagcaaagtctggcaaggagaacgatctaaccatgaaagacataagaatattattaccaagatgcacatcttcaaaaccaatactaagcatctatacaacttacgggtctcggctgcgtatctctttgtaagttgatgcagaatctgtttccttcaagaacttctcattcatgctgccaaaacaaaagaatgcacatgttaggaagcagaagtaaagttaaatttaagggaagatagtaagagagaagttagagcatactcctgaatcttgtgaacaattggattatcactggtttcccatatttccctcacatcttctgcaatctgcataaagaagtatcagcaaaaagagtaatgcaaggtaagatgattgaacaaaatgagtaaagagaaggtgttcgttacctcttggctcttgttgacaacaggctcactcattccgcttagacgtttaaatacaggagaaccttgcatctataccgaaaaatactcaacaaaggactttaaaacatggcataagtggaagagacagagagggctacttaccttttctctaaaggattcccacttttgttgcaacttagactgttttgtttgcgtaaccaccatctctgttctcatacttctctcaccggtgaatggcgggggaggtgtatgttccaggaacttttttctagatgggttcccacgtaactcatccttcacaatgtcaagtgcttgctttactatatcaaagggtttggcttccttcagcctgtaaaacacctcggatacctttggtgaagaaagacttgacttgaattttgcaaaaaatgtatgtagttcctccgtagaacctgattgctgtttttctccttgagaggctcttgtgcctgatgaactcgctgactctgcattctcctccttcccgagcttgaatgactccttgacctcttcactggctgctgagagcttgtctttcacacttgaagagacctgcaccgtcaaagctgttttgtaagggacgattgttagccttttacaatgtacaattttggctactcatacacataaacactgacttctaattcactaaagcaatttcatcagtaaactattttgttaccaaaactaaaagagaagaaagcatattcttaacataggaagcatcaaatctacgaaacaagcgaagacagatagcgtgccaattcgaggctcgtgaacaagaaccatacctttttggccgcagattcagcctcagtccacacaccatcagcttgcttgtaaagcttttcagtcgtttgtttcgttctgcaatagccaattcattcataagcttccattgacatacaagtgtataactcttaagtaaattcaaattacaaatgtttaacttacctcactttcaggtcctctgttacacctttaaactcttctgttctttccttgagctcctttactgttctttcaaattcaggattgctgcaacatcaaccatgttaacaaaaattgaactaagaacatcaaccactgattacaaatttcatatgcctcacatacataacaaatacacattacctatgagcttctcctctaatattcttcgagaactcggtgaaaacgctgaaccggcgatgactcgtatacccaatagcaggaagaaactctgatcttgcgtttgctctctaaatcaaacacagagttactaaatcaatcatcctaatcacaaaaactagttagaagaaaaagaacaaaatattcaccagaactcgttggtggaatagttgacgtaaaagaggctgctttgtgatcagtaaatctcgaattatctttctaatcgccattagaacaaccttcttcgtagtgaattgtacaaacaagatttgaagaaacagagcagcaaaagccctaagaatcggtcctcgagaatgattaagatacaaaaacatatttctggttatattgtttggaagaaaatggaaagttcaaaaaaattacttgacaaacaaacaaaagaagaggggattagattcgaatctgtaccatattttaaagatttgtttggaaagtcggatatacatatcctgagtcgggttaataagtaaatagagagtatataagaagagtcgttcccaaacactacaaagcgctcaaggtctgtgtttaatttgggcctttcggaggcccataatctagtagcaaactgatcggaatcaaactttggttacacgacaaaaagcttaaattcaaaacctaaagacgacaaaagtaactgtctcagtgtttttagtcacaagcaacgttagcgacggcgaaatgttcggcttgccggcgagccgccgactccgaaaccatggcttggatcagcatcgtcttcacttcccatggtgcataagagaaactttttctcgcgtaagagttgatcagagctgcgatcccctgtttcagcaatgcaccgtacgcgttcccttcttcgtcattcctagccgttgattccactagcgttagatcagatctccaccgttcttttgctaccatcactccgaatattttctccacggttgatctctcaggtaccatcctcggccatgcttccctctggctgctccaatacctgctcaaaaacaccaccaacgagttgagatatgactcagctaaagatttttgtaaagaaaatgaaattcaagattgattgatttactgcggcgtgcatcgtcctctgtgtctggtgtagatgaaaccaggcctcgtcgccgatgaatctccggcaaagaagcagaggaggaagaaggtgaccagaacgagtcgactcggagaacaaagtgtgtccatgatatgcatatggttaaaacagcattaattaatcagcccttggtcttgggactcttgggtcttcattaaatcgctatcaagaatctgagtttgcttgagttatcggtctcctctagttgcctattgctattacctcggaaaaagagacatactttgacgcttttacccttagaattcaaattaacgtgatctttttgtcaaagtggatagagtgaatataattattagggggatataaacgtcatttttgaaacgcacatgagtttgtctgaatctgctgctaaatacgtattctttttattatttttgctgcatgtcatcgtcagtcctcacgtgagctacgcacggcgcaccatgtgcccacaaggccacaagaggtccgaacgattttaatcctaaaccagtacaacgctattttgtattaagaaagtcacataattttaacagattagtttcgtcagtcgattatgattccaactttgttaatttttcatgtttttaatgggccttttcttatagtcatgccctacgaggatttttccagttccagcccaaattttgcccatgccaatgtcatgtagagcagtttcgttgttataatatatatgacccccacgttgcctatcaatgccagactatattcgactatatacacgtatccacatcattttaaatacagaaaaatgtaaagatattcatgaaccatgaccagctaacattttcaagttgtttttgttgttgtgtaatctaactggtgaaccatgagtttgtatactatatacgatatatattgccctacaaatctcttatgatcttatcggatgtgggatacaattctatatatatatatacattttgtcaaccttcttatagtattgttttgcatttcttaattataaacattatcgtaaaatgtagactaagttgttaaaaacaatggatcaacttcttttgcaagtcacgcatacatgtcgtcttaaatctctccttaaaatctttctatataatacctaaagggttagctctagcacaagcacacacagagagatagagaaaaatataacaaattttaagccatgtcctcgtcactattctcttatgttgtcctcttaatcttccttttcaccatcccatacattcaaagccagcccactgctccagctccaaccactgaaaaaagtcccatcaatctcacagcgattcttgaagctggtcaccaatttaccacattaatacaactcctcaacacaactcaagtcgggtttcaggtaagtgtacaactcaatagctctgaccaagggatgactatatttgccccaacagataacgcattcaacaagcttaaacccggaaccctaaacagtctgacatatcaacaacaaatccagctcatgctctaccatatcattccaaaatactactctctaagcgatcttctcttagcaagtaatcccgttagaactcaggctacgggacaagacggaggtgtttttgggttaaatttcacaggacaagcacaaagcaaccaagtgaatgtttccaccggtgttgttgagactcggatcaataatgcattaaggcaacagtttcctctagcagtttacgtggtggacagtgtgttgttgccggaggagttattcggaacaaagaccactcccaccggagctcctgccccgaaatcctcaacttcatcgtctgatgccgattctccagctgctgatgatgagcacaaatctgccggatcaagcgtgaagaggacaagtctagggattgttgttagctttgcattgttttgttgctcggttatatatattgcttgaacctttaactaaaagcgagggaaacgttcccgaaaaacaaacatttatttgcatgattgatttgattcatctatgccttgatatttcttttttgaaatttcctttataaaaatacatgtattatttttttgaatttaaatacatgtattattaaatgatgaccaattttgaaccaaagtaagttatcaacaaaataaccacatcatctatatctcactttatataagttaagaaatttcatttaggtttagtagtaaatcatcaagaagtttagagcctttgcagtttgcaacaaaatatgggtttgaaagttacatttttgaaaagtgataataattaatctactatctattaatcaaaatgagaattatttcttttgtatagaaagtaaggaaatgtcaaatatggccgtttatatattaagaaaaataaataaaaatcgtttactaaaaaaaaaatatattaagaaaaataaataaattagtgaattcactaatgggcctgaatacaaattttgggcccaaagatctctagtaacagaaaatgcgtgatcgaccaaagcgtcaacaaaatcctgatttctgagctttaaaccctaacccctctcttctctcttctccacgccatttccagaattttcaggtacttcctctcgccattttcattatagatcgaattcttagtttaagcgagtaaagcttcagattcttcggcttcaattttgtgatctaagtttttgtttcgtttcagctaatttgcagattatctttgtctctttttcgttgatccaagttttccttgggtctaatctacaaacgcatttcgtttctctatttatctgtttctgccttggattttgattgggttccaaatttgcaggtgttcgtgaaaagatgaattttaagaatgtcaaagttcccaaaggtcctggtggtggtgttatagctgcggtggttattggggggctcagtctttacggtgctacgcacactctctacaatgtcgatggaggtcatcgagccattgtctttaaccggcttgttggtatcaaagacaaggttagtccctgcaaaaattggtttcttctgaatctgtatattgacaatgaatcttgtggttgtgacatctagctgaagttaggttaggcttagcattactagtgaatcttatgtttgcggcatatagctcacgttaggttaggcttaccgttagtagtgaatcttgtgtttgccgcatctagcttaagtaaacaaggttgatttcttagtctagttttgatagtcgtttacaaaagtcatcttgatgcgccattaatagtatatctttgcttgcttgattatgtaggtctaccctgagggtactcaccttatgattccatggttcgaaaggccaatcatctatgacgttcgtgcaaagccttatctagttgagagcacatctgggagccgtgatctccagatggtattccgcttcatttcatcacttctaatactaatgggtataatcaggtcgtgtggttttgtcgtgtgaactacatgataagcttatgttgtgtggtatttaaacattcaggttaagattgggcttcgggttctcacccgtcctatggctgaccaattaccagaggtataccggtcccttggtgagaattaccgcgagagagtcttgccttctatcatccacgagaccttgaaagctgtggttgctcagtacaacgcaagccaacttattactcagagagaggttagccaactggctgtaaatacattttattgattcctcttcaatggtaaattgatgtcccttttaatggatatatgtttttttggtgtttttcaagtcggtgagtagagaaatcaggaaaatcctaactctaagagccgcaaacttccacattgcactggatgatgtgtccatcacaggcttgacattcggaaaggagttcacggcagccatagaaggaaagcaggtcgctgctcaagaggccgaacgggctaagttcattgtcgagaaagctgaacaggacaagagaagtgctgttatccgcgccgaggtgtgaaaagtgtttctctcttttctagcattttaaaaaccggagattgtgttaaagcttgcttttttttttcttttttgttgtgaactattttaaagcttgctaactgatgtttctgcatgggtttatgtagggagaagccaagagtgctcagctcattggtcaagcaatcgcaaacaaccaagcgttcttaacactgaggaagatcgaagcagctagagagatcgcacagaccatctctaggtcggcgaacaaggtttacttgagctctaacgatctgttgcttaacctacaggctatggaccttgatgtgaagccgaagaagtagagaatgatatgattaaaccacaccagagctcttcttccataatcgtattttcaattcacggattcttagaccaaaagctatgagttctatcttgtgaatttcagacactatcgtgcgtttgtagtctttcttttgtgagatcaagaagaaaagaaaagatttatgtttttacaagttgtttacatttggtaataatgatgttcacaaagctggaaaataggctgtgaaaaagatcaaacaaatgggcctgaaaatgagaattgggcttttggcctaagtttggtgaaccccgagagacacacatctgggtttaacgacgttaggtcggagccaatttgattccaccaccacgagcttcctaatctagctttaatggcgtttcatggaatcagagaagttgaaaactattttataccttttctacagcgagtcaaaagccgcaatgaatggaagaagatcaatgcctccatcatcatacatggattatcacaaagcagcttcatggtcactaaaatggtggatttttgtgataagattgaagatatggattatgcaactcgtctttttaaccaagtatcgaatcctaatgtcttcttatacaattctataattcgtgcttatactcacaattcattgtactgcgatgtgatcagaatctacaagcaactgctcaggaagagctttgagttaccagatcggttcactttcccgtttatgtttaaatcttgtgcgagtcttggatcatgttatttagggaagcaagttcatggtcatctctgcaaattcgggcctaggttccatgttgtgactgagaatgcattgattgatatgtacatgaagtttgatgatcttgttgatgcacataaagtgtttgatgaaatgtatgagagagatgttatatcttggaatagtttgctttctggatatgcaaggcttgggcagatgaagaaagcaaaaggcttgtttcatttgatgctagataaaactattgtatcttggactgcgatgatctctgggtatactgggattggttgttatgtagaggctatggatttcttccgtgaaatgcagttagctggtattgagcctgatgagatcagtctcatttctgttttaccgtcgtgtgcgcagctcggatctctagagcttgggaaatggatccatctatatgcagagagaagagggtttctgaaacaaactggtgtttgcaatgctcttattgaaatgtactcgaaatgtggtgtgattagtcaagctatccaattgtttggccaaatggaagggaaagatgttatatcatggagtacgatgatctctgggtatgcatatcacgggaacgctcacggagcaatcgaaacattcaatgaaatgcagagagcgaaggtgaagcctaacgggatcacatttcttggtcttttatcagcttgttcacatgttggtatgtggcaagaagggttgaggtattttgatatgatgagacaagattatcaaatagaacctaagatcgaacactatggctgtttgattgatgttttggcaagagcaggaaaactagaacgagctgttgaaataacaaagacaatgccgatgaaacccgactcgaagatatggggttcattgttgagctcttgcagaacaccaggcaatcttgatgttgctctggttgcaatggatcatcttgtggagctagagccggaggatatgggaaattatgttttgcttgccaatatttacgcagatttgggaaaatgggaggatgtttcgagattgagaaagatgataaggaacgaaaatatgaagaaaacgccaggtggtagtttgatagaagtgaacaacattgttcaggaattcgtttcaggagataacagtaaacctttttggactgagatatctatagtgctgcagttgtttacttcacatcaagatcaggatgtgattacaaacaacaatgctcttgcatttataggcatagtttagaagcgtttggattatagaagaagtagcaaacttattaggcgtcttcaatcatacatatgttacaaatcgatcagaaatatacaacagtatttaattatacatacgttacaaatcgatcataaaggtcacaacagtactcattcatacatatgctacaaatcgatcagaaaggccacaacagtatttaatcacaatatataggagctttgatacttcctctcgtattctacattgttttgtctggactgggctgattttaactggactgggctgattttaactccattcatccgagaagtttcttcaatcctgtcttctgctctgaggttaacgttgtagggaacttgatgttaaatttgatcctcaagttgcctttcttagcctggtctttctgcaacggcattccttcatttggaaccacttccacatactcgggatggatcacagtgttgactgggatggtcagtctccgaccatcaagtgtagtcaggttgacggtgtagccggtaaaggcctcgagaactgagatcttctgtgtgactacgaggtcattaccctctcgagtgaaaaccggatgaggcttctcatctatgatgaagactaaatccgctggtatcacaccgggttgctcatttcctttctccgagaatgtgatctttgtgcctgtcttccaccccggtttcacatcaacagtcaaaatctcttgtacctgcgtcgtcttgctgcaagtttttttcaaaagaaaacacataaactggtcagcatatgcgatttttgccactcaacaaggttatcaagtatgatcaatgttctgctttcattatgtattgccaaacgaacaccctaactaacgctttcttaagatgagtggctaacctaaagagttccacttggtgttcacaaataagaaatggaatggtcatgacttacccaaagacaccagcaatctctctagagatcttcatcttcttggtggttcctttgtaaagatcttcaaggctacaaggcaactttttttcaacaggagctgccttcctagctccaccgtgatgcattgtgccaccaccaccacctcctccttctctgcctccactgctgccactgccagaagggctagggaccccaaagtactcagcagatatatcatccttatctctcggaccagaagggttagagacctcaaagaactcagaaaatatatcatccttatttcttggaccagaagggctagagaccccaaagaactcagaatatatatcatccgcatttctgggaccagaaggaccagaaggtctagagaccccaaagaactcagaaaatatatcatctgcatttctcgggtgactcatgtttcttctcagagtgtggaatgaatgttccagaaatcgttctgaaaccgggaaaataatgagattagtacaatccgttccagagactcaccgtgagctgaggaaaggagaaaagtgatttgtgcagagaataatcaccggattgtgggagtaggacgatgatgatgaccaaggatgaactgtaccgagagtaaagtaggggagagaaagcataatgtttatgtactacataaagagtgctcgaagtattgaaccaacttcattattgaccggcgcaaaccggacttggtttaattaaagagagatgaatgaagacacgtacatgtagaacgatttggtgtttgtagaggccagggattttttctggcaaatgcaattaactagtatcagtctcatttctagtctcactgatttattttgttttccggtcgtgtgagcatcttggatctctagagcttggcaaatggatccatatgtatgttgtgtgcagagagaataagattctaaaacaaattggtgtttgcaatgatcttattgaaaagtactcgaaatgtggtatgatcagtcgagctatccactgttttgatcatatgagggttgaagtattttgttaatgatgagacaagattttcaaataatacccaatttgaacactacggttgttgtttgattgatgttttagcaagagcgggaaaactagaacgagctgttcaaataacagacaatgccggtgaaacccgactcaaagatatggggttcattgttgagctattgcagaagaaagggcaatcttgatgtttctctggttgcaatggatcatcttgtggagctagagccagaggatatgggagttgtgttttgctttgcaatatttacgcagattgaaatgaagaaacttcaggtatcagtttgaacaatgttgttcaggaatttgtagcaggtgacaaaaagtaaacctttttggactgagatctctctcgtgttgcagtatcttacttcatatcagaatgtgactagaaacagcaacgctcttgcatttataggtatggatttagaagcgttttgattatagagaaagtaacaaatttattaggaggtatccaatcgtacatatgttacaaatcgatcaaaaaggtcacaacagtatttaatcacaatccctgtggtctgcaacatgattttcttgttcctcttctgttcaacattgttttgtctgaaatgtgctgactataactcatttcatccgagaagtttcttcactcctgtcttctgctctgaggttaaccttgtagggaacttgatgttaaatttgatcctcaagttacctctcttagtctggtctttttgcaatggcatcccttccttcggtaccacttcctcgtactcgggatggaccacgttggtgactggaattgtcagtctccgaccatcaagagtagtcaggttcactgtgtaaccagtcaaggcctcaacaagtgagatcttctgtgtgactatgaggtcgttaccctctcgagtgaaaaccgggtgaggcttctcgtcgattatgaagactaaatccgctggaatcacaccgggttgctcattgcctttctctgggaacgtgatctttgtgcctttcttccatcctggtttcacatcaatggtcaaaatctcttccacctgcatcgtcttgctgcaagaaaacacacataaaatggtcagcctccccactaaacaaggttacgaactaggatcaacattctgctttcactatgaattaccaaagaaacacccaaaccaacggtttcttaactgaatagccaagctaacgtatagggttccattaggtttgatgatcacttacccactgacatcagcaatctccctagaaatcctcatctttttggtggttcctttgtaaagatcttcaaggctacaaggcaacttgttttcgataggagcagccttcctagctccaccgtgatgcatcgagccaccaccaccgcctcctccttcgccgaaagaagcaaacatattatcaccaaacatgctgctagagaatcttgtaccacctcttccgccgccaaatgggctagagaagccaaagaactcagcaaatatatcatccgcatttctcgggttgaacctgaaggacgttggaccatccccggtagagaagtaagtagctccacctgcatccggaggtggcacgttccctttcaaaccttcctcaccatattgatcatacacagctttcttctgaggatcacttagtacctgtaagcatccagagaatcagtaaacaggaacaaagactcaaaatcacaaatacgtgtacccaatagagacaagtaatcctaacaatcaatccacaacttcgaagatattttatgaaaatacagaggacgcagctaccatatgcaacagcacgaaataactaaagactataacagaatctacttaagacaataagttgaatttctcaaaagccctctagcaacaagattcataaagatgaatcttttgttggaattcagacatatatctatatgtacctcgtaagcttcggatatttgtttgaacatagcttcggcatcctttttgttgttgggatttttgtcgggatgccatttcatggcaagtttacgataagctttcttgagatcatcgtcgcttgcgctgcgatcgacttggaggactttgtagtaatccactcccatccgatcttcttctctctttcgcttcttcacttttcctgattctgattaatatgtatatatttgttctgagagaatgaaatttgctctgtttcttcttttgatagtcttttgttgaagattagatgagttttggtcttaaaaacgacggattcatgatgtttcttctcagagttgtggagaattctgtggaacgttcgagaaatctctgaaaacctctgattgtttgggtgacgcgtgtttgcatcacaggcttttcttcgttaccgtaactctctagcccgttaagctgtggagtttaaaatgctaaagcccattttacaacattggactcaaagtgagctttttattattctacccaaatccgtagtatatggctttttagattcaatttaattatggatttgtgaacgaatcggttgtcttatatcatataagcccttctttcaaagaaaaaaaaaaattggattacaaaagaaaattacatgaaaacgagaaggaataaaacaaataattagtgataaattaagaaagaaatacaacaagtggttttgttaacaaggaatggagtgggtaaaccaacggaggactttgataggaagtttgatgagatcaacggcgaagttagccagcgcagcgaaacagaagcaacatgggcacaaacaactcaataccgtcctgcaaaagttttattcatttttatcaatgttttattattccttctccattgtaatgtaagaagaaaatttataaactatatttacgcaatgcaacaatatattcaaccgaaatttccttaaataacacatgaaccgaaattggagattgaaaatgaagataactggatctaaaaaacagacataatacccaatgatagtatgaattttgtatatacgtattaaagaaaaaagaaacggacacgtacccaatgatccagataacagcaccaacgagggcgagaacgagagcaacaagagcaaatggtagtcctattaagaaacctagaggtctacaatctcccattttgtgaagacaaaagactaagtttttagttgggtttttttttttttggttcggtttcttagaaagaggaagagagaattaaaaggagaaaagtgagtttttttcaaatgaatgaatgaagttgagagagtcgtaaccgtcgaacccacgcggcgggtttttctgaaatacgagaatacccttccggtttctatttgtttagcatctattaactgaagtcaacggggttattttggggaaactacaagacttttgagttgtcttggaaccttcctttttcaaagttgtcaacaaatgaatgctcctcttgtggcttgtggaagagttctaagaccgaatttattcaaagagaagaatacaacttttaaaagggaagatgcaactgcaagttgtgcaaccacatgggtgtaacattagagaatattatagaataaaactctttgtcatatgaaatatgaaaaactatttacaagcaccaaaaggaatcaaaatgtgatgggaacatacatacgtaccccacgatttaacatagctagtttaaaatacagtagaagataaaattattaaaatcattgtaattaactttgtcttcaaaatgttctgttttggattccacatttatttcatgctgggagaagggattaattaacacctcaccaactagtaataaaaaaggttgcattgtataatgatattagcgagagctttgtaatccactgcttcttgttagccatagccatagccataggtactttcgttaagccatagcaataccaggagctacacaacaaaccacacgaaattcatgataagtttgacttttaaaatcaataatcaaagaatcaatcataaaaatttatgcagcagatgcagatccaaaaacattaccaaatcagttatgatttcccttgatgtaaaataaaaataaaaacaaattctgatctcctttggttttcggtttcgttcggttcatggggttcgatttggatgaaccgaacggttaaccaaatcagaaagaggaagattttcgttttacataaaaccggttaacgacgttggaaccgtttcactttgaggccatagttattcacgagatctaaaatgtttattttgggcagatcatagtctatctctctagtctcttcatcatcaaacatttggtcttttactatttctggcccaaaattttagaagcttcattattcttgggttattttaagttatgaggcttactatttctgacccaagtttttttctttacaagtgccccattgagtcgatgaaaacggcaagcacttgattgttggagtatcatcaattatcccacgagaaactcggacattatttattaccgttaagaaaatcaaatgaagagatgtttttcagtaatagaaaggaacagcaaatgaattcaaactgtagctttcagttcatggtcccaactagtagttgaaaacaaagacaaaagtttgctcaccacaagctcatccacaacaaaatagatttttcattttaaccaaaataataacgaaaataaactccaccagttgaatcaaaatattggtttaattgtttgtgataacagtgacaatttttttcatgaaattttacaaagcaagaattattgaagtttactcacgcggttgcgtttgtggtctcttgccagttgccaccgcaacaaagcattggtcttcttcgtttttttctttacgtttttgtaattgtgtttgtgctttaactttatgttataacataaacatgcaaacgtaaacacacacacacacacaaaaacggttatggtgaagctccaacaccagctccaaagttaatgactgcgtaatggaatgttttgttagaactaattggaaatcgattgcttttcgtgtctttgtaattgaaatctattaccattatttttgtaacaaataaaagttttggccttttaatttggggatactgaattttatagcctattttcacaagaatttgatttgttgtttctattggcgattttcgaaattagtagaccgttttccctagctatttccaagttaacaggagaatcgttccaagtacatatatacatatgatatgctatttacagcgaaaaagatgatgagtgttggaatcataattaatgaccagtagtccttttacgaaagttgcacttcatttttaattacaaacacacatgatatcatttccattctagtcgctatcaagtcacatgtgggtgtggtggcccttcacgtccactgattgtcaaacctctaatatcagtttcaaaattaatgtacatatatagcttttcatctccatctctatatagagattcaatactcaattcaatataacatttgtatattactcgagctcatagatttattttattgacctatatattaaacttattggctagctagctttttctgttatttttgaaatttaaacttagctagtttttaatattccaatagtagaagaaaactatgaaaactcactgtaactccatgctgggagaagggatccaacatctcaccaaccagagtgtcgggccgtagactgaactagctgactgtgagatcttagatcattccaaaatcaacaactccaataattatttattttcggtttctaaatgaaacaatctttatccttttctttatcttaaaccaaatcagttatatagaagattaagtcattattaaaaagtatcatcagatcatctcataaatggtagcaacaaaaccactcaaatattcaactataaattactccatcatttatagaaaggagcctacgcatatatctagcaaatatttggaactctagtacttgactttgagaaaaccctcattcaatatatatagagttgtgttagcctataagggcctgaaagtatgtggaatttcttacaattttcttccttcacgatgtatatatatatatgccgtacgaatattgtgaacgtgaattcgattcaaaaaatgtgatgtggaaacgagcaacaacaattattgtagctcttgaggacccataggacgtgcatgtccacttatacctaatgagacaattctgtccttttttataagagcatcttccacagcttaatttgcgagcctcattcacgtcaatatataaggggtatgtgatacggtagatggattgattatttacatccatctacatgtaagttgaccagcatagaccttttacatagtgacatagaaccgttgaaatgccatccgattgatcaataatgttgggacagaccaaaaccaagataccaaaacggtaaagggacaaatgcgacaatcagatattgaactttaaagttgtggctctgatccagtttggcaacaacttcacttaaatttttgtgttaccaacaaaacagggaaaaagattcgctaaaagagttgcctaaatatatgtttgagcttgttgtcgatattttatgtttatctaaacagtaaaaaaaaaaaaatttatgttttatttaccacatttagaactaggcatatatatatatatatatcttattatataaagtatggtttttaaagttgctaactcataagattgtgtcacgtgtcaagtcaaacgatcagatgtttacatgtatcattcaaaatttaacttttttattctctaaaattaaatagaaaatcttaaaaagtaaacaaatttacatatactaatttatatgtctatatatttataaacaattaacatttattcaacaaaaggaaaattaacaaatttgtctttaactcatgtaatcataagtgaaaatagaacattttgagaaaaatagcttatcttataggatttaacttttcaattattttcatttattaattttaactcatttaatattaatttgcatgatgtaaaattaacttacgagattacggcatatatagaaaatatattttcaacaatgtttggtttctaaatattttgtggatttcttttttttattaattattagccctaggcgtttgggtattcgggtcgggtattttgggttcgggttttcgggtttagaagtttaggacccgttcgggtaatttaagatttcgggtcgggttcggtttgggtgggtttgagtttatttatatattgaaatatcaaattttgtgtgcaaatctattaaattacttgaaaatttcaaaaattcccaaaacaacacgagtagttttgcttgaatatatctaaaaatacacaaaataattaaaatatccaaaaaatcctaatattttctatatataagtataaatataactaatatatatttatatttgaaatatgtttggatacgtattcgggttcaggttcgagttttttgggttttgaagtttagatctgttcgagtatttgaaaatttcgggtacacccgcctcaataggcgggccttatctagtatatatatatatatatatttttgtgatggatttctttctgtctctctctatatatagcatataaatgaaaatgaattatatttgcctttaagggagaagaaagagacttactttggatatcaaaacatgtcttgctctctattctaattaagtctagcctatctacaacatacataaacctctatctacgattatatttggatctacaagtgaagattgatcgatgttagctctgtctccggcgacaagagatggttgcgacggagcgtcagagtttcttgatacgtcgtgtggattcacgattataaacccggaggaggaggaggagtttccggatttcgctgaccacggtgatcttcttgacatcattgacttcgacgatatattcggtgtggccggagatgtgcttcctgacttggagatcgaccctgagatcttatccggggatttctccaatcacatgaacgcttcttcaacgattactacgacgtcggataagactgatagtcaaggggagactactaagggtagttcggggaaaggtgaagaagtcgtaagcaaaagagacgatgttgcggcggagacggtgacttatgacggtgacagtgaccggaaaaggaagtattcctcttcagcttcttccaagaacaatcggatcagtaacaacgaagggaagagaaaggtgaaggtaatgattttaatcatatcatctatatataaaacattagtcttatatgaataaaaaccctagctagactcgattaaatgaacaggtctataatggattcgtattttttttaaaagtggattattcgtttagaattcattttcttgctaaatcttctaaatttttcatatttcagtcatgtttacaagactcgtgtaaagacatcacgtgcatctctataagactttttttctttcaaattatgtaaaatagtcagctgctaattgtgaattttatatagtatgtgaaaaagtattgaaaaaataatgaagatggtggttatatatatgttgggatgtgtgtgaaggtggattggacaccagagctacacaggagattcgtggaggcagtggaacagttaggagtggacaaagctgttccttctcgaattctggagcttatgggagtccattgtctcactcgtcacaacgttgctagtcacctccaagttagtatatttcttttcaatttcattctctaatattaaccatccaaattaacatgttgctgttatttggtatactagaaatataggtctcatcggaaacatttgctagctcgtgaggccgaagcggctaattggacacgcaaaaggcatatctatggagtagacaccggtgctaatcttaatggtcggactaaaaatggatggcttgcaccggcacccactctcgggtttccaccaccaccacccgtggctgttgcaccgccacctgtccaccaccatcattttaggcccctgcatgtgtggggacatcccacggttgatcagtccattatgccgcatgtgtggcccaaacacttacctccgccttctaccgccatgcctaatccgccgttttgggtctccgattctccctattggcatccagtaagttcccacatttatgaaacctttactttagctctttatcatatttgttttcatcatagtatttaacattatgaaagctgaatgacaccgagtatttttatcatatgcttgtctttctaaccagcatttttgcatgtagatgcataacgggacgactccgtatttaccgaccgtagctacggtaatgaaccaacatttataagattgtttccgtatgtatacccctttttgtttctatatatatgttttaaatcgtatttttgattggtaattgtatagagatttagagcaccgccagttgccggaatcccgcatgctctgccgccgcatcacacgatgtacaaaccaaatcttggatttggtggtgctcgtcctccggtagacttacatccggtaagaatctaatataatgaattgattgttgtcgagttttgacttttcgcatttgattatgtaattatgtatttttgactttttgtgtatatatattataaatggaacagtcaaaagagagcgtggatgcagccataggagatgtattgacgaggccatggctgccacttccgttgggattaaatccgccggctgttgacggtgttatgacagagcttcaccgtcacggtgtctctgaggttcctccgaccgcgtcttgtgcctgaaacgcacaagatccgtaggcaagcgagaaccaaacaaaaattcgacgacatgtctttcaattattgtacttttatttttccaagggttgtttttgttttgacccttgttgtgttaagagttactctttacttaatcgtcccatgtgactaataaggagacccttttcatatgtatctagggtgctaagtacactctagctctattaacgcaaataaattacctatattttctctaaccattggtgatttagaacttgattgcttatataaagtttttttataaaacataacacaacaaatttccatatcaaatgatcatatggaaattggaagcgttcaaagcaaagtcgcaaacgacgaccaattgattataaagaggacaacctcacgagtatatatacacttataatttataaacataacttatacttaaaaataccagccggttatatatggtgaaaaatgagtaatgaaattgtgtgtttaccatgcatatattaccgtataaaaacgtattgttgggattgagagaacaatggcataaaataataatgaggagagagggagaggaccacgagataagaggagaaggaagtgcatggaggcaacgtaaaatccaacgtaacgacctcttctttctccaattgtgaccactctctctctctctctctcgtctccttcaaatttgaatggtccctctctcttcataattgataattcatatacatgcggatactattactagcatctcattttccactcacacttgtacacatatgctttttataagtacgtatttataggcaaaagtaaatatattcaaaccctacatgcatggtattaaaatccaatataaccaaaatgaatactcggttcaaattcaaaaatttaaaggactttggtcgaagataatgaagacaaatcatttttttttgttctaaccggacattccaaatcgaaatgcacactagtttttggtgcctacatctacattggctaacttttactaaaatcatagtgaaaataacaaaaaaccatggtctctataaactctttggtgaagatttcaactactaaattaccatgagatagatggtcaaaaattgtcaatattgaatttacaaggatcatgagatatttcaacaattttactaatgaccagatccaatgcagtgaattagacgaaactatgacttcactaggttgtgaaagaaaagcttgtcttgcagttttgtctgcgaccggtcgaaaagagaatgaaaatatgtcgaaatcctcttcaaacgtgaaataaattaactgtcataaggataaattatgtttgttcaaccatacagaaatatgatgaataaataattttagacatgtgggcccatgtaagaagaactcactaaatgagcccaatacggttaatgggctgtgacattgaaaaagaggttgtaatgggctgattgattctatagtgtagaaatcttgatcgaggggttatcttctccgattccaatatttagattcttcttcatatattattgtgctttgattagagagttgcagaagagttttttttgttttaattcctgcaatcagagagttttcgatagcacaagcacaagcttctcgattcgtttgagtgttcaaatttcaagctttttacaaggggttccttagattgatctgttactgtagagatggctccaactcaggatcccaacagtgtcggaggcggtgcgaagaaagatgaagctaccttgaaggttccgtctaaggatcccaagaagaaggacgagaaaaaggatgaggat

SEQ ID NO: 256 - DNA, 61384 bp, Arabidopsis thaliana
gtaaggaaaaaaaaaatacattaggattattatgattatggcattcggcccaaaatctcttagtattcaaaaaaaaaaaaaaaaaatttaaaackaataaatagctaaatagttacatgtagtrgkactactacttggtttgcataatctgaatcaaagttttacaccaaaaaaaagaaaaaaatctggattaaagtaaaccccaattaattaatcatgcgtgggattgactcattttgacatcatagtatgtgtttagaaacgttttttttagcaaatttctagtcatcaagagtaagtaacattagatggagcgtaaggaaaaaaaaaatacattaggattattatgattatggcattcggcccaaaatctcttagtattcaaaaaaaaaaaaaaaaaaatttaaaacgaataaatagctaaatagttacatgtagtagtactactacttggtttgcataatctgaatcaaagttttacaccaaaaaaaagaaaaacatctggattaaagtaaaccccaattaattaatcatgcgtgggattgactcattttgacatcatagtatgtgtttagaaacgttttttagcaaatttctaatcatcaagagtaagtaacattagatggagcgtaaggaaaaaaaaatacattaggattattatgattatggcattcggcccaaaatctcttagtattcaaaaaaaaaaaaaaaaaatttaaaacgaataaatagctaaatagttacatgtagtagtactactacttggtttgcataatctgaatcaaagttttacaccaaaaaaaaaaaaaacatctggattaaagtaaaccccaattaattaatcatgcgtgggattgactcattttgacatcatagtatgtgtttagaaacgttttttttagcaaatttctagtcatcaagagtaagtaacattagatggagcataaagaaaaaaaaaatacattaggattattatgattatggcattcggcccaaaatctcttagtattcaaaaaaaaaaaaaaaaattttaaacgaataaatggctaaatagttacatgtagtagtactactacttggtttgcataatctgaatcaaagttttacaccaaaaaaaaaaaaaacatctggattaaagtaaaccccaattaattaatcatgcgtgggattgactcattttgacatcatagtatgtatttagaaactttttttttaacaaatttctagtcataagagtaaggaacattagatgagcataaggaaaaaaaaaatacattaggacaaatgttaatttggaatctcttaaatttagatttttttaaaaatgtctatctgtttttcttctagataaaagtgtttcatattatccatatatattacttttaaagaaatctttttataaatagaatagtatttttgtagagtatatccggatatgttctgcgaaagaagaagaagctcacgagattagtcatgctgacatgggaactagctgtcttgagcaatcattcatctctcagatcttacacgtcctccaatcacagtttcacacgtcaccattcgcggcgccatgtatctgcttctctgatttctgataggtcccattttattctctcccacctactatataaactcccatttttcctttgtttttcttcaacccaaacaaaaaaacattttttctctataaatcctttattattgttataaaaactccgatggatcggcaaaattccgatgacatcatgagatttctcgatggaatggctagctccgacgacgttcttttcggttttcttgacgaaggaaaccagtcaccggaagatttctccgtaaacctcaacgccggcgaagatgacggtgacgaagacgacaataataacaattctgaagataacaaagctttttggcaggaacacgaacaacttcttcaggtaattttttctcaaatataaactctattatcaaaacaaaattatatagttatttgtcatttttagccaaataatttggtgtctaaatttgttatattattttgaattgtgtaggggacactgtataggacaagttccattgagacaaagattagacaagctacaaaagaagcgttgaaacaagttaaatctaagggtctttattgtgtttgccggcgaccagtggacggcggttgccggagttgcttacgtggcgaaatctctagacacctaagagatgtcgccggctacgattgcgtcatctctaaatctaaatggagaagttgtcaagacatccctgcaggtacaaactaactacctcatatatttttatattcattattattaaaagactggttctgaaatattcagccatcgttatcatttctcaaatggaagataattatttttaaattggacaaatattattatgtccacaagaacacgaaagacttttttagacccattcttttatttgttacttgtggatcaagcaaatatcagattttgtcatcacattaagtcatatgattttatctagtatatctatatgatctctctatctatatatatgaatgtttggactaactcatattttattttaatataaaacaggggaacacgaatttatagagattgtggaccgatcgggttcaaagaaaagcgagatgcgagtggtgattgagttatcatttagggcagagtttgagattgcaaaaggcagtgaagagtacaaaagacttatcagtcgattgcctgaggtttacgtcgggaaaaccgagaggcttcgatctctgataaagatattgtgcatagcgggaaagaaatgcttgagagacaagaaaatgcatatggctccttggagaaaacacaagtacatgcaagccaagtggcttggcacatgtgatcgatctagctccttggaagcttcggtttccgaggccatggagccagaaaattgggtgccggtggcgaagcctagggtttctatgttgaactatgatggtctcttaggtggtttctctgccggtccggccactgtagcggtcgtgtgatatttttgtactatgtttttttgatgacttgtaattattaagtgattagggtgagtcatgagtgttaattatggtttctgatttgaacttagcaagaaatggtctcagcggctgtgattcgagcctctacattgtgtagtaagggacgaagatgctgttttgtgtcattggtgctggaagaaattagacatttgtgatttttttttatattgactgtatacgagtgattaacattaaaatttaacagaaataatatacattttgagtttcgagttatctgaaagttttatatttaactaaagtaaaaaaaaaaaaattgatttgtaagaaaaaaaaaaaacaataagagcaatacgaaaaacggtagaagtatatgataatcgttttgttttttgtatcactagctagtttttttaaaaatatggtaaattttatattcttgccctcccagttaccaccaatcaaaaaccaagaaatatcaaatatcgccatatatactaattaacaaaaatactaaaccgtattaaactggatttgagttcgggagatataggttaagaagtaattttgcggggacattggaacgtggtcatatattgagctatatattgagttctatctgatgtgatgttatagtttatgggctttctaagcccattccaactctcatttagtatgatattatcttctttgagcttatatgttcaagcccgcaaggatttgttattgggttccttcccaaaagacctcatactagttagagttggacttggcttatatattagaaacccttttttctaaacttccgatgtgggacctttggtttgtacccaacaatctccccttcaaaccaaagaccacgaacttgggcctctcttttgaggcaccttcttatcgtgtcatgtttgagagattttcccacaccgatcatagcccaagtcctaggtccactttttcaaactaggctctaataccatttaatgggctttctaagcccatttcaactcctatttagtgtgatattgtcctctttgagcttatatgttcaagcccgcaaggatttgttattgggttccttcccaaaatgtctcatactagttggagttggacttgacttatatattagaaactctttttctaaacttccgatgtgggaactttgatttgtacccaacaatagttttcgagaaaaaatatatcgttttctcatcttattttttgcttatatatatatatatatatatatatatatatattgatgaaattttaaatttatagatcaagagatgaagcgtttatgtacaatggagagaaaccaatttgaaaaggaaaactaaagcaaaacaaaaattaatggattccccaagcttgaaaccatctctggagaagtaatgtcaatcatgggacgtcttgatatctaagtgatatcacacgttgtcaaattgttttctctgttacgtgagtcaaccaaccaaccgtgcgatgagaagtaccatgttttcgttcgtttctatccctctccacacaatataaattgatgtttagaatgccaaaatgaagcaagatatgattgagcttgtcccgaggtttgtttagcagctgaagagtagttacccgagcaaagatacttttatatttcttttgtataagcatgtgaatattattctgaaattttgtattggtatttaacatgtttcatattagtatttattcacggaaatatttaatatatacactttaaagtacatccaataaactatggcgttacattttaccaagaaaaaaatcgaaattctttcaaaaatattacactatttcatagcaataactcatatcattactatttatttaatttaaatttatttgttttgaactgccatctgcctaattaactctaaaattaatagcgagtcaaactctaattcaatatttttaatcctttattaaattcaaaatggaactgatcacattaaaaaaaaaacgtcaatctatttgtgaaaatgatgacaatctttaaacataatgagattgattcaaagaaaactaaatagaattttttttatgaatttgaaccccaaatgagagagtatcatttcgaaggcttaaatctttgaaaacgaacttccacaatttaatgaaacttttaaaacacataacaagtttcttataatggtgcaatgtagctaatgtggccactacgaccgctattgtatcaccattttatttggattttggacatgatgatatgagtcgtaaaaagataatgaaattaaaaattataatttgatcggaagatacaaaaaataaatagaaaacaaaacacaccaaatcatcaaaacagagaaaataaacggaaacattaagaagaaaaaaaagaagagggttcatatctaattcgtaaaccggtaacaatgtgaatggacatcacaacttcgtcggtatgggttatcccgttgatccggttcaccacgtcggttatctggtaagtttttcttcaatgcttcgtagcttatatatctcgatgcttgtagaatcctacggctgctcacatccaaacctaatctcatgttcatgatctctttttcttcaccgttgatgcattttccactcaactggtcacattttatcgttcgagatgagaccaacactgggaataaaaccactgagataataacggcgaagattaagagcttcatataaattttcattgagagagtcaagtggacagtgaatgatttgattaattagagccttaggtttgtaattaagcacgtcgttaatactctacagttttatagtggtgtttttttttgtggtctccaggttcactttctatggcaacgtattcatatctgataacttgtaactccttggttcatcaaatatttatatctaacgtattaatcttgattctttagtcaattcacataattaatcggtcaaaacttaataatgacttcaacatatgacataacattgatgttcgagcgaaagttactaaaattgaatacccattaaaataaagttactaaaagggtatggaagtaatgctatcaaatcataagtgggaagttactaaaatagaatacccattaacaatttgttaaaaactaaacgtgtgtatttaacaaaattgagggggcaacacaatttgtagttattttggatttggatttagtataattctaacaaatattaattggtgatttaacaaaattttatttgaacatagtgtatgtataaaattttgaaagataaaactactttgagattaatagtaagaaactaggtgttaaacatctttcttaaatattaaacaaaaaggatctgattaataacacaacatagtattaagttttttagctagtaaaaagatagattagcagtacataaatagttaaaagtgatacaaaataacacattaaaaaaatattgaaaacatatttttatataatttttgtgattaattacaatgaaaggtgtagattccgtatacttcagcggtgcaaaattatattttgaaatgtgatatgcagctgtagatgatgctaatgttagtgtttacttccaactccaagtatgattgaaacttgatggagatatataatcctttatattctgaccaataagtcttaaaatggaatagtgagttattttttctttatttttgttattctttgtcataatatatgatgtttttatcacacaaaatgtagaaaattatgatgagaaaacatgtaaaaatacgtttctatcaaatattaaatatttaaattgtcaacatttgcatatgcataaaatctcagtctatttaaattgttttattttgtttaaaatcattttaaaaaaattcttcaatttaatgtttttgcccacaagaaaaagggaaataagaaagattacgtaacaaaagaagatttaatctcagagacagagagagctcaaactcaagagagatcgtcttcgagattgaaactttagagcatttttatcagtagtctctcaatgatacccaataaaaaaaatataataaaaaaagaaaaagtaaaagagaaggaagaaaaagtaggagaaaaagagaattaagtttctcccaggaaaaaatttgagaaactattctcattcaatttggacagatattatcctactataagtttaactattaaactagattttaacccgcggtataccgcggggacaacttattttttaaattagtatatataaaagtttgcaaattaaatctatttatttttattttatagtttacaattgttattaagtaacgtcctaccaaacccgtctcgccaaatccgtcccgtaaaaaaaacccgcggtacaccgctaatttaaatatataattaaaataaatattttacggaattgcaattgtattttggtttgtcaaacaaatatttgtttaaaatagttaccaaaatctagttcaaattttggagaaaaaagatttattggatagataaagaatgtatctaggtgggttttgctcattttaagggattgcaattatatttttgtttgtcaaacattttttgttttaaatagttgctgaatatatttagaatatttttagtttgttaatcaatttatcgctggaaaaaaatcaataattaatagttaatggcaaccattgtaaataactcccaactctaggatttattttacaaaatgactgcaaaaatgtatatatagataacaattaatatatctgtcttaattaaaatattaatattttttttttttgagaaactttactcacttatactgatgatggagatggtcttacaaaaagtaaaactccgacattccaagtttccacctttgttctctccaaacatatattatactaatagattagagaagaactctataaagtttttaactttctccccaaacgaggaatctcaaagtcaattgctgttctgtgattccagagtgtttgtttctctgtcataatctcttctagttgcggtttgttgggctctcactttctctttcagccgatttgatctttcgtttcttgtggtttgacttcacttgaagcaagctcttttattgatcttattgtctcctttatgttctgatgattccgcattgtgaaatcactagagattttggggttgtgatatgaataatctggggaattttggggtttggggattcgggttcttctccttatctatttggtttgcggttctgcaacaagctaatggactcagacccataagggagactgctcggtcctggggcgatgaggtttgtgttgttttgatatgatcgtttcaaattgttttcaatgttccttgattttgtgtatcagctaagtctttgattagtttgctgttcatgtgttcgttgacttgattaagttgcaatagtagaatttctgatagctcagaatctaggatgggaattagattatgcagttttcgtctctctatttgccgccgagttttcgatagaatgggaaggctgagactgttttgtgatcttgcagtggctctttggcaaaaaagaaaaaggtggagcaggaccgttttctgcgtggaatataacaggaacatatagaggtttcgtggcattgtattgttgattttctttctgcttcaatatcataaccttgaagctcatttccgtgatgtatttatgttacaggcacatggaagtttctagatactgtaaatagctcttcaaagtttccagatttcagaaaagaaagtggtaactctgtcattgagttagtgacaagtccaacaaaaattactggtgtgcattatgttcaggtgaatagtcgctcttcatagtcttttgcatcatggagatcgtgctttttgatcttagtaaaaactttgcaaaatcagaacttgtgttaactttgaatgtgaacagggtgcagttgttttccatgacgtatttgacaatgaacacaatgtgggtggtgcccaaattaaagttgaaggtgtatatatttggccctttagacagctccgtcttgttgctaacaggtataactacatttttttttaaaatctatttaactgctttcaagatccagtattggtagtgttctctaatgtctgtacgtttaatgattgatcagcggaaagaagagtgattcaggactagaagacgattatcttctctccaacccctatcatctggtaatgcctgatgtgatccactttgccacaagatgatggatcatatttctgattcttcgttatctttatttgatgcgttaaaatgtttggagagctgataagtgtcaacttttctgctgttggacagctcggtattttttcctcccaagtatttcaagaatctccaagagacagaatattgaaacagaaaacttgtgagtaggatctggatttgtttccatatgttttactcttctgctacatctgaccttcatttatgttgcattccagctccaatatatgagatggagaagcactgcaatatcgaaatagctgcccaaatatcccaaagcacttctagtgaaaacagtatgtatgccttctaacacttggcgttgaaatgatgatgctggctcagttcttgccttcttagctaattttagtctgactttgagaacgagttttacttattttggtagatggggacaaagatcgttatcaaattgaaggattgatggaaagtcctgcagtagatgatgaagtagattgtttttcgccattgtcgctgaatgcaacctccataaacgtcgaagtctactataacaaggctgtgaactatacattgatggtcacttttgtatcctttgttccaatctcttttccattccatcagaaaatgacaaacacatggcagttttagcggattccttaacttgttattgtacctaggtctcgttcctccaggttcttttattgatccggcaaatggagcacagtaacacacaatccgtaagattctcattgtttgtttatctgatctttctaagagaagagactggatgctaacttttggatgactcttcttgtatacaagggtgccgcaaaggtctctatagtaatgatcgggcaacaagccatcatggattcttatttatgccttttacatctcacagctgggattttagttggtatgtattttaaatataatctcgctattcttcacaatgtgccctctttgttttgataattatcttcatagcttttcatactctgtctaagaacatttctcaatgattgtgatggaaattctcataactgtctatttcttaccatgtcatgcttttctcaatcattctattttattctcatgcagaatccctgtttaacgcttttgcaacagctgcgttcttcaaatttgtagtgttttcgatatttgagatgagatatcttctgtccatatggaaagcgaccaggccttcaaccagcggtgagggctgggaaacaatgaggcgtgagctctcctttttgtacagccgtttctgtgagtacttgatttcttttgtgtttgttcatcatcaagtaaatgcttagaaattctcacagatgtttaaagtttctctcattgtaatgattttcaacagatggaatccttcttggaggcatattattaatgtacgagttccacaactacatgcggccgatcctcctactcatgtactcattttggattccccagatagttgcaaacgttgttcgtgattctcgaaagcctctgcacccatattatatactagggatgactgttacacgacttgctataccgttgtatgtttttggttgcccgaagaacttcatgcgtgtagagcccagcaaggcctggtgtgtaagcctgtgtgcattcatggggtttcaagctggtgttcttcttcttcagcattatttcgggtctcgttgctttgtccctcgaaaggttcgttggtctgatgactttgtagattgatagtaaattgcttagttgtctttagttcatgtgtttgcttctgatttggcagttgctacctgagaaatacagctactacagaagactcgatcataatgtaaaccgaagcagggactgcgtaatctgcatgaccacgattgatctcagacaccgtattaatgattgcatggtaacgccgtgtgagcatatattccactcgggatgcttacagagatggatggatataaagatggagtgcccaacatgtcgtcgcccacttcctccagcttaacctttggttccttaggaatcgtctattaactgcactcacattttattgtaggtaacagcttcttgaatcatgctctaggttctggctattaaactgatctttacactgaaacatctttgggttcttctttggtttcaggtcttggaaagatattagatgaaaacagagcatagatagaatttgtcggaggagtagacattagattaactgtgtaataagtcaatctctttactgcatattcattgcccattctttcaataaaatcctccaacatataaacaatcatttacatacactaaaattacttttgggtcaaaccttttaacaataccaaacctacacatatttttgttccttcgtccttgatgatatgagagattgctctcttatacttaccatgtgatacgaaatacaaagtaggaaccagagatgtgttagatacattcaataataaatcatcgtagaccacaaattacgcgttacttgagaggcaatcattgtctcccaagtgtctctttcttttttcctcacaaacactatacagagactttttaattactgcgtgaagattacgaagagcataacgagatgcgttgtttggcgagtaactcgttaagcttcttcatgagcttaggatcagagcatatatactcttccattgactttctcagattcctcagtgtctctgtgtcatcttcacacgtttctctgttgagcagcttcgtgaacagttctttccacagatccaccttccagtatctgagcaaataacttagtgattcaatatccaaacaataatttttttttgtttgagagacaaaacaagcaaatgaagttgaattattcttttgagaccttttaaatgaagttctcggcatattaatgtagccaccgtccagagattgcttcttctcgatctccatgtagacgttgtgcagcatcatgtggacgattacacatagtccataagtgtccacctatatataacacatgttacaatggactcgaatggttaaaagtctaatcatgcaaagaaaaattcttgctgaagcagtgtgattttaaagacttgcctgaaacttccaaggtttatcctccttcatctccacgcaacggaagcctgaggtacgacaatctcctgtaaactcggtggttctaggaaacaagctcaagtctattcctctaccccagtcaacaagacagagaccctgaggtagaaatgaaaagttgcatcagattgtggacacacacaaatcagagtactagtagttgtataagggatttaccttcttgctccaagaacctgttttctcatgaaagcctgtctcagttaggttttctctgcaagtaatccgtgaggtatgtcagtctctgccacgatcgttaacatacaagtacatggcttcatgaccaaaaagtctttatctacaatctaatcagcaatattggagcggaataaacttacggagggtatcggatcagcagattgtctggcttgaaatcaccatgaatgattccaacactgtgcaaagtctccagcatgttcagcatttctattgtgtaatacatgcacaaaacttcttccatggactttccaacaacgacatacgagtttatgacgtccttaaatcacaaaaagaaggcaaatgaagcaaagaactatgtttgcattttgtatattcagtccgtgagagtcctaagataccacctacctggagtgtcccgtgtgataaataatcgcagacaagtatactgtagtctgaatacacgtgcactctctgagccaatccaaaacttgatctctaacatagcatgagagtaattagtacggtgtgaaacacctgtgaactggtaatattaatggaaaagggcatacttggctatctgggatcctgcaatcaagttggcgatacatgtggaattcccaaggaaaaggtggtttttgtacctgtgaagagatttgtatatgcaatatgagcatttagcatcatactgtatttgaaaaaactttaagggtctatctacctttagagcaactacttcatcaggattgctgtcaatgaatgctttgaacacttgagcaaaaccaccttggccagcacagcccttcatctggtactttcttccacctagcaaatagacagagccaatggatccaggtcactttttttattttagtctcagagaagacatattgtcccaggtgagaacaaagcgggaatcaatttcttttacacaaatgaatacatgcccagccacttttaatttgaaaaatgcatcttataataaaaagaaggattctttatcctgtagcggtgacagactagattggtatgaaaaaagtatacctatctcaatgatcttatttctggaataattctgcaaagatgacaggttggcctttccagggaaaactttgttgcttacatggtacccctgatgcaaacataaagaaagaaactcagtggacaagcctccctatataagttaaatcatgtaaaatatcatgattttccatcagccttacatcatatttcacaagctgtggttttatcttgtgaattaagccgttcacagtggatgtttcccatggattcacaaaacccgtctccaagtcagtggcctgagcatcatcaccaacctgccagaaagaaaacgttcaatcctcaactaaagctatcaaagtgcattagaataaccatatgctactcattaaaattaaaaaataaaccttttcaagggaagatgctttggtcctcttagagattctttgtaagaacaatgagtgagcctcttttaacctgtcaaatggttcagctttcctacaattctccaatgagaaacaaataagaaatgaaaccacaaactagaggaaaaagataaggaaggagccacagaacaaggagaaagataagagaccttgaaagaccagtctgataaacagaatttgctcttcgccacaatcctttgacctcaagaaaaatagcataccattcatagagcaacgaatgccctttacatatctcagtctcttcaatttctctataaaccctctcaaaatcttccctgccttcaagctaagaagagattcaacaatttaacccccaaactgtaacatctacatcagttgattcgcaatataacaatcccaaaccctaagaatgctaatcaaacaaacaatcgaggaaagaaaagcacaatttaagctcaaacaagttgggagagagggttttagtaaagttacatagagaaaccagatcttgaggaatctgaggtcatttcggtaccgagaatctttcttataagttgagatacaatcaaatagaagcttatcgagatcgtatccggaatttttaccagcgtatagatcctccatcgaatttttaatctccctgtgaaaaccccaaaatacaacatcggaaaattagaatccattttgacacatatagcacaattagttagatgagaaggaaggataaagcatgagttacataagccacgggaagagcgggtctccggcggcgtctctgtaaccgattgtcattttcgcagccgtaggaagagagagagagagagagagagtgggaagtgaagcttttcaaaaaaaattaactttcgaaattcaaaatttgttggaccagagcaaatattctatataacccaaaagtgtaaatgggcctattttgttaattatgtggcccattgtttcagttaagacaaatgaaaatcccggcccacgcgcttcaggtccacggattctagtcttacgcgctaaacgcgcctttgttgcgtgtggtttgtcttttacacgcgtatttctttttgtcgacgtcattttgttcgaatttgtttgaaaatatttttaagataaagtttcctttctttgttgcacatgttgtcatgacagagtaactagaaaaactgataaaataatgtcttgttattttaagtaataacaaaaaaatatttttccgatcaataatgtaatgaatgagatgatgtgcacgaaataacagttttttattttaaaagtaatgttttattttgtcggcaatgtgaaagaatgtagcaaataataatagagagaatttgtttagggaatacttttgccttgagaaaaatataaagaagaaaagtcgtcggcggaggaagtcagtagccaataatgataagaatcaccggctgttcacatgtggattgattacctcacattcatatttattacataaactcatctctctgtttttctttcttagaatcattcatatttcagacacaaaggcagagaaacaaattcttgtaacaatggcaggcagagagattctccataagatgaaggtatgcttagctcaacgctagtctttttcttttttctttagtagcgtttcaagggctctaaagaatcttgattttgtgatctgatccttgtatgtcttgttctgtttctcattaagctatatttgtttctttgtgataacttgtacgtagagccgttttaaggaagttagcatctcgcatgttaaacgatgatattgattcttctagagcttgtgttactgaatttgtttcagtaatttgtgcattttctatattctctttttggttagagatttggtgataatgaaatgtatgtatgttgctcttgatgaagaaattacagaacttggattaatgtgattgtgttttggtgtgaattggtaaaggttggattatgtagatcttttttgtttgttttgttctgcaagctgaattttattcatgaaattgagtctttacaaagggttatgtggatctaataatcatttgtttttctttaaatgtctaaactttgaatttctttttgtttatcaaaccaaacttgattttataatttatctttctcatttattttcatatttgcttttttttttcttcttatattttgctgttatttgtcaacttatgtttttagcttaagaataaaatgattataatgtattgagtagtaaaaaagttttttttaaaaatgaaactaatagtataatttcttgttgtttgggtgtgaatatttgaaggttggattatgcggatctgacacaggcagaggtaaaaccaaggtgtggaagaacatcgcacacggttatgactttgtgaaaggcaaagcgggccatccgatggaggactatgttgtgtctgagttcaagaaagtagacggccatgatttgggtttgtttgctatctttgatggtcacttagggcatgatgtagccaagtacttgcaaaccaatctctttgataacatactcaaagaggtaactcatgtttaaagcatgcatgaatctgtttttatggatttctataatgtctctgataagacttaaaatgtttttgttgtttcacttatttcagaaggatttttggactgatacgaaaaacgctataaggaatgcatacatatcaaccgatgctgtgatattagagcagtcacttaaacttggcaaaggtggatcaacggctgtaacaggcattctgatagatgggaaaacgctagtgattgctaacgttggagactcacgtgcagtgatgtcaaagaacggtgttgcttctcaactctctgttgatcatgaaccaagcaaggaacaaaaggaaatagaaagccgtggtggctttgtatcaaatattccaggtaagttttgtagatggagacacttacttgctcatcacatataaaacatgagaagaggaatttatagacgattcttgaatggtttcaggggatgttccaagagttgatggacaactagcggttgctagggcgtttggagataagagcttaaagatacatctgagctcagatccagacataagagacgagaatatcgatcatgagactgagtttatccttttcgcaagtgatggagtttggaaggtatttgagatctcgtcccatgttatcatcagagtgatgaaatctttaacaatgtcttgacgagtgttgcattaattatcaggtgatgtcgaaccaagaagcggtggatttgatcaaaagcataaaagatccacaagcggcagccaaggagttgatagaagaagcagtctctaagcaaagcacagacgacatttcttgtatagttgtaaggttccagtgatagataaacttttgttgtctataaactttaccattccggtgtgtgtgagagggagaaacaaaagacgtataaaacgcctaagctgtgtgatcaaagtcatgtcttgcttaaacaattccattgacaataaatgttctggccacaatgtaaaatccatggttgttgatccaatactctaaatggtttcttttatctacaaagctagaatagagagagatttcctcagacagacgacaagtcaaaagacataagttggctcacttgggcctataggcctatcaacactgcaacactgcagaacttgaatctctgttgtttactgtgttggtctgatatatatattctctagccagttatgaatgtatgacatcaactcagctgattctagttgactgggttaagttattaagtttcattcattttcgtttgtttgattgatgcagccgtgcttcttgcgacgagaggctctctcagaaaggtattgtagatgatttggatgatgaagctgattctgttgacaaagacgtgtcagtgccaatggtagagaaacagacacaaactcaaaatggaagttcaaaagcaaaaaaaaaggcgtaaagagaaagatatggttgttgaagcttatgtaaagcagactgaagctcttgagaagaagaatagaatagtggaactgatgttggagcgggagcatgcatctagcgttaagagtgtactagagacgcttaatggattgcctggagttaggatgtggtctccatttcacaagacatcaattgaccatcttatagctgatgaagcgagtcggcagggttttatagcgtttcctagggctgaacataagagtagatttttggagtttatgactagaaggaaccttgatgattgtagtgttgcttgatgatatttccactactttgtagtgttgcacttgatgaaccgtatattgttctgtctttccttagcacttgatgaaatgtgaaacatattttcaacacttcggatcttaaaacaaacttcccactgtttagtttacaaggaacaaggaaccgtatatggttctgttttgaatatatggttttgaattagtatattagtgttgaactgttgggtatatatctcgattctttggaattacgaccaatccattcagaaatgttataggaactggagaagaagatttgatatgggatccaaatgctgttgatgacttttgtagaggtgatatgcataagtggcttgagggtgatgcattaataggaaccaacagttctatgaggtgaatttttagttttaacagattttcagtacacggttctgttttcagaaatgccaaactattgttattacaattgcgcaggtgaaggaatcgggtttgcgagacaaagaatggctttatttatatatgctctccaagtgggactttgacctggtgaggataatttgaatagtatagctagagatgcgttgtgtttgggctatcaactaattggattgtattttgcagagagcttatttaccatttgagatgaagaaagtagtagtgcaaacaagggaagatatagagtcgagtatgaaactgaaggccagcaatgcaatcttctacatgaatttcaaggcatatggaggtccacaatgcagaggaatagtaaggaaacaagtgattgaagactaggacatatgtgatcgatcgatagatagagagctgatggtttttgtgtctggataatactttttgcatgtaaaaaaccattgagacaagtcaatcttttacattgtaattgatttaacacaatatacttactacatcttaattagtattaatgagagttttagtactagatataagtcgaccaaattaaaggaagccaaatgttggcgttagaagcatattgtggtttaaaagaaaaaataaaaaataaaaaagaaaaaagaaacttgtgagtcaagtaaagaaaaacaaaaccccaatttcagatttatgtttggttccgatttaaaagggtcttttttttttcttactttgaatattttacaacattgacaaggttactctctctcccgtacgccactactctgaattgtgtttgttttggtactttgaatttgtccgtccgtatgatgaatattattctctcctttctatgcagggaagctgtggatccggtcgacaaggaaatgaggaaattggtctattctatttacggagaggtaaaaccgaaaagtagaaaaaaatagaaagggaaaaaaatgtagagttgcgattacaaaacttttaaaatatatagaaagtagataaaattaaagattttaaattattacattagagagttttgtatattttgatttataatttttccaaaatgataacatatctccaaaatattgtgtaatatattcccctcttctataaaaatcatctctaccaaagtgaaaatcacacgtataaacacaataattatggtatttgtgaagtaagctatgaacatggaaccatccatgaaaaacttgaagtttggttggatatttacttttcatgtgttggattaatgctttgttttaaaaattgtttgtgtggtgaattttcacagaaattagaaattatagagaagcaaagagtataatttgtgaagaaaaaaatataaaatcataatccaataacatctaattatactaaatcagcagtcacttttccaataactgatgcattcagtgattgacacatcaccttagtactatttttttattctttcattttcacgcaggatttttatgtgtcgtttttatttaactttgtttctttctcaaacgattttctctttcatccccacgatctccacatctccactttctctcttccaaaaactccatgactactgtgtaaaatctcaaagatgggtttctcaacatcattaatcgattactcagaaatcaggtactttgttcatctcaatgaaccaatttaccattttctatttctgtttgtaattttgttttatatatatagaattctccatagatccgaaaatcatatatccttcttctagatttctatggctttttttttttttttttttttgctttgtttctgctttatttgactgaattcgatttctctttttccataggattattctttaatacaatcaatgcatatgattctcctgtctcacaaacactcaaggaacagcgacaaattttggcttctcatcggaacagttgccttaaaacaagggtgaatttaatatcttaatggaagctcaagtgtttttttaatggtaaattaattctcatactttttactaatcttctttcatctcttattttactctgcaatttcgtttttgtattatctcatgctacaaaacaaaacaatgtcttctgtagcaatatctcactcgcttgctttctctttatctcagtttggtcttcttttgaaacttctgtagagaacgtaacatccaagcatgggacgaccattagttgacaagttctttgtaagtttcttttcagcatcctctttctccaggtgtatttactgtcaagtttgttacattcatgtttgatactttgatgcataagtcatcataattatagagaaaacgtaatgtctttaatttacagattggattacaattgggcaattcacttacttcaaaagctaaatgcaattcacaactaaattattattttgtatgttgagcaaacttagaatttcttagttagaaacttgcattcaatgacgtaatggtttaatggtttaattggtctgtttgacaagattttaggacaaaattgcattttttttttgtattcatctatggtcattatcttttgacatgcaaacgtttcaaaggcagcgtgtacgtcatgtagttacttacttacttgtgcacattttacattttttctgagacttccaagctttgggtgtcaacgaatgtttgtaaactgaattactgatgatgagaagaagaacacattacaattggttggagctaatgatgaaataagcggacatgtatatacccagcataattttcgtacctatactctcttatatttctaaactcttgatttgttagttactgtctatcccaattgattcattgggtagaaaagttgtaccttttttatatctttttcttaatctttgtatattcttcggtcaatgataataaatttgttgtatatttatgttgtctgctttattttaaaaatcttagttaagagttatagcagatataatttaaaacaatgttgtccctgcatagcaggggccaaatgctagtaatattttaattgactaacaataatggaaagtgttgtttattttgaataacacaaaaattttaatgactttattaaagtatgaatctaataactccagatttataaacactttaaattactttttataaatcaaaatttaataataccaaagttttataaacctttaattaaataacaaaaaaatttcataacatttcaagtaattaaaaattcatataaatcacaaattaataacacccctataagttaagtagccagcgtcgaaagtttgtttggtgcgaaatcagaaagatggtgctcgaaactccggtctgttctcccatagacaaagaatcctcctccgacgatgtgcagctcaacaaaccgccgaagaaaaagcggaagcttgacgtcgtctatccacccagagacaatacatcctcctcctccgatgtgaaacccaaagtccccgtaattctctattctcttcgtaatcactttcataaccctaacttgattgattgattctatctgaacttttttgtagggatattgtggggtaaaagccattggatgtaatcgctctgacgaactccttgcagaggtggcactccattcctacaattctcaaacggtaactcttatctatattgctcttattctagcaagccctcacctttacttcttcttcttcttcggattttaactgttacatctccacttacggttattatcattgtaggggacaaatttagagttgatgactgtaacccaagtcatgctgcaatcggttgcacatatcaattatcatatgatattggatgcctttgatccagccaacaattccctttccagtattgaaatatgcctttgggatgctgccgtaaagaataatgagaaattgagattagtcaccactttttgcagccttgaaggtataactaacatacatacatggtttatatattttgtctgtttttggtgtttctggcggctatgctagtttccatccatcatccaccaattactattagtttgttgtagggtctggagataaaggttcccaatgggatcctaatggtgtagacgtgctctatactggtgtgatgcctaagtggctagatgatggtgccctttcaggaagcgagaagctacactactatgaggtgtgtggtgtttgctatatctaaacacacagacacagatcacgccttgttcccctaatgttaaaaaatgtttcaaatgtaggttaatgattccgatttgcaagagaataaatggcttcatctatatgctcaagttggagcatactctaagtgggatcttggcatggtgagcctagctatcagtatactcatttgttttggggtcttcatgcactcttctctcatacacaagcttttgttttgcaggttaaacatttcccattggagataaagaaagtagtggtacaaacaatggaagacgacatagagtcaaatttgaagttgaagtcgagcaatgctatcttctatataaccttcacgactagtggaggtgtcgagtgcgcatgcataataaggcaaacgaggaatggaagaccacaacacatgtgccttgaaattaataatgttgagatggacaagtagacaaatatatgttgcgacttttactgactaaaagagttgcttagtgtgtgtttagtagtttaatttgtgttatgtttacctctaaatgctatgttttttttggttctgcttaattatgtcttcagacttttaatgatatttgtaatttatatctttgattccaactgtatattctcttgtttcaatccatgaactagaattgctaaatcatgatttttccacaaaacaaaaatcacgatttcacgatacaataaaagatttgagaattattattcggtgccaaaattcttgaaatgaactacaaaatatatagtaaatatttagtagacatgataaacaaatctacaataaaatgtagggtatatcattttctgcttccgcgaacttccacatagtccatcccatgtgagcttcttctgtggacatatcataaaattagaacaataattaagttagttaatttatatatttatataaaaactgtagaaaataacttagttaataaatatttaaagaaagggatagataaattatatattaccgtgatgaactatggggagggtttgggccaccgcatttgattttacatttttcaaaacaatcaccgtcgtgtttcttacaattctttgaacacttgcgaaaacattgaataaaatctttttcactccattttgcttctactgccaacgcagcaatcaccaccatcagtatcactaatatcgcactccattttgccatctttgatcgtcttagaattttacaaaagcaaactttgttttcttttctgttcttaatcttatgacttatattatgtttcaagaaatcaacctctatttataatacattttgtttaaattttgagtagattttttacttagtgtttgttgtagttttaactggttgaatctattaatttccttcatatttatgttcaaaaatcttgtatgtttttgcagtattaaattttataaaatgaatagatgtatattaactattaagtgaatgtggatccatccgtcggagagtaaatctgccaataagaaagagacaccaaactttagaggacattaattgatagactttgtatgattgttttattatttggttaaagactaatagatttcacaagaaaatattaatcttcacttaatacaaatgttgtgtaaagaaaacaagttatttaaccctttccattattcttgtttttttcctttataaagatagatttatcacttcatttattctatttaatcattttaattaaataaatcattttaatacaatttaatagtatttagttttaaaaaacatttttaattgatttttatttattggtaaaaaatattaacagacttaagtgaaaatgttatgcttggtcacaatttgtgactcacaaatatttttgaggaatgttttgctcaatgttttttttttttcacttctctttacagtataagatttgatagtacaactaattgcatttgtcgtttttattttgataatataattactttgacacttttgtaaatttttaatttaattatttgtcaaatacttaaatttgtgatgtgatcgctattgctgcaaagacaattggtcaattcactacaaaaaagattgtttgccaattgcaagcaatgtatgtatatcatgaggtttggtaaaagaccattcaacaccactcttcgttttttccataaacttattcttcaaatgccaattttatttcttagatatcttactataaacttaaaactaatggaattcttcacatattcatagaataaattttatctctctagaaatactcttcctaaaatctattaaagattaaaacaacacaacctcatcttcctcacaccacactctctcaaacatcaccttttttttactaagcatgccttaggcaacgtctgcttgtattatgtagcctcttgtagtatgatatattcagcctctgcttgtacgatgtagcatttggctcatattatgtaacgtcttgtactgtgcttatataaatctatttcttcctcaataaagacaatgattacaattacagcgatttattgaaagatttgtcttgatggcaaggcgttagccatgccactattttatgacctcgagttggtctaacatctatgaaaaataatttctatttgtttttttggctctacccttagcatgtttaatatgtgaaaactaaacaacaagaattagcctctgatacaaaaatgaacaagtatatacataatgacatatatatctcagatttatgcagatctcatacattcatatttataacattcgtaacatttactataatcctaatgtgtaaagaataacataaggcaagctaaaagtttgtcgaccaatcgtttcccataaaacttgaacaattttagctaaaatcattctgaagtccttaaaaccaattgtttcctaataattattagttttgtattataatatagtgatcaaacatcttatttcttttttgtaactctatcgaatgttttaaaatcttttgggacttatatagtctgtaaatatagataactttttatcaatattttattagatttttaacatgaacgtaaaacttaaaaaaaaggtagtcatgatcacaaatcttctacggaaatttaattatatcatagtcttcttccgaaaacttccctagatgtcgtctcatgcgagattctatccatacacatatcataaaattagaaaaatacgtataagttatataattatagaatgtagtaaagaaaatagtaccttgaggaactatgtggagggccagaagagccatgaggcgggtttgggccaccgcatttgattttgcaacgtacaaagcaattaccatcgtggtcgccacaaggctttgaacacttgcgaaaacagcgaatccaatctttttgagtcccttttgcttctactgccaccagaacaatcaccatcatcattatcacgactattgcactccatttcttcatcttttggtcgtttaagaatcatacaaaagcaaactttgtattatctatttttctttgtctgatgacagtttgaatttttttcccaagaaatcaacctctctttatataattatattacatttggtttaattctagtagatttttcttttctttttttaaacttttcgtagattttttaccaacatttatgtttggtttggtcttaattggtttttatcctttaaagtccttcgtatttctgttcaaaattggatatgtttttacggtagtaaatttcataaaactgaatagatttatattcttggtccatccgtttaaattttgtatgtttggttttatttcttggtccatagttttacttccacttgtagacagctatatatcttccagatttggttacaaagacacttgcaaaagttttgtatgctcttgcaccatcacttactgtatcttgtgaatgtcatatttaaattcaatgaagcatcagctattctcttgtattcatgttattatgcttcaaacttcaactgaataaaaataaaccctataatgttggcaaccaactcgtctatttcaaatgattgacaagcttccttctttgtcttcctctccggtagcagagtaacaatgaagagctgtgagcatgaactactcaaaacaagaagaggaaagtcccgcgaggttagttcacgttttctctcctctccgtctgcatcttcttctcctaaccgcagaaactccacttctagttcatctaccaagagagatgatcagaacaacaacggtctgaaagttcatcttggcctgaaaaagcatgataggatgtcagatggaacacgggtttgtttcgggttaccaaaccaaagtagcttagaatttgacacaagaaaatcccaagtaaaggtaatgattttgtcatcacttcttctcatgcttttcacataaccgtgagatctttgctttcttcatcctttgaggcatggaattaaataaaagctaacaacctttccagaaccaaatactctgtgcatgggatagtcttaccaaatgaaaacagttggttctgcaagagaaaatcaaactgcagaagaaaaacctggagatgaagatcaattatgtgcttctttctcaagtaagtattaggtccaaacccatttactaattccaagccatggaggatataaatcggattgatacgaaatatatctgaaacaggttaaagcatcttgggaggacatggaaatacaacaactatcatctctgtccatggccagagattccctgcattctgttctttccatgcttcccctcaaagaaggtgcaaaggtaaatcaaatcatgcttctccgttaagattttttcttgtctcttttctttttaacaactcctgaggttttcaggtgaacatggaatcagctatcactttattcaagaatgcagaagcagtcactgatgctatcaattgaactgtgaatatcccacggtaggttttgagaacaaacgtgacatgatcatcgtgtatcaaactagtgtaaaaacctatcatgttccattagcagatggagggtattgttccacttgcttccctactagcggaagtggctgcacaagagaagctgatgcaacctcatgactttttgagaatgatctccgagttagaggtacaaagattgtgtgtgcattaacatagaaagacctggtcttatatgtttctgttttctgatcatattttgggatgtacacagatgcaggagaggagcttgaagtgctgcttcttgattcaacacaaacagactttcgatacaaatcttctttaacactaggactgtgtcaaagcatacgactctgttttttaaaagcaaaaaatagtattttgagagcttaataaaggtatctactttgcaactctcgcaagagtctaagacccttagatggtacacataagcacagttgcagtagcaaaaggaccaaagccctttacctatttcagtttcgataagcgacaaggcctaattgtgccgtcagctggctttgattgcaataagcctcatggacttgttaaagctcaatcatgtcacattgcaagataagttcttcttccactctagaaacaaacattattgatgccgtggacttggattacgagaaaagagaataatgcacaatttcaaaagagagagactacataaacattgaagacatgaaaaacactagtttcaaagctgatgatattattactcggccaaagcgtgtcccagttattttgaacgatttacgaaacagtaatttcatttattaagaataagcgtttactaagaaagagattattagaggaataaatgaggaatccaaacgtcatgagggaaaaagatgaaaatattagaaaacgctttgttctatatatattaaggaacgtaaagaagtgttaatgcaaagcaaaatcttattttcaacttctaaagtcactttataaaccttagatcgttccatgtctcataaacgtttcaatccgctgacggcttcttcaagtgacgaagatgaattggagactccaatcagagaagttgaagactcttcatcggatgaagaaactgattccgattccgactccgaactcgggaagaaggatgaggttgtaaccgaagtttctgccttaaacaatcaagaatccaaaagtgtgaaaatttctgagaaatcagtggcaaagcgttctcgtgaaacacatgaagcacaagcgtctgcggatgtgaagaaggccaagaaggtgaagaagaggggaggaggaggaggagaagaagctgagacaaagaaagcttatttccaacgagtttggacagatgacgatgagattgtagttttagaaggttttatcgattacaaaaacgatagtgggtaagttcttatgacgatactaatagggtttatcagttggtgaaaaaaactattagctttgatactaagttttttcatgaatagaaccttagagacattaaagctaatagttttattcaccaactgataagccctattaatatcatcataagaacttaccctattatcgtttttgtaatcgataagaccttctcaaactacaatctcgtcttctctgtccaaactctttgaaaataggctttcttcgtcagctgtgtaggttcctctttaaaagtttttaacctataagagtatatatataatatatatatatatatattatgtcaaaaaaattcaaagacaatttattgaagttagtgtttcttatgaaaaataagaacaatttcttttatcttataaaacaattttacaaaaactcaaagttgttatcattgaatagcgagatgtcaaaaccaaattttatttacaattaaaatataataaattataaacattgctatgtaaatatcatgcaataacacaaccttttaatctataaataaacttacaaattcgattttaatagtttatattatacaaataaagttatatttagtcattcataagttaatgcttatagatttgtggtttcaattgaaatttttataatatatgaaagaattgttggtgttgaaatgcataaactatatagttatattgtttaattttacaatagaaaaacacaatgaatttaacattaattaaaaaaattatagaagctttcttatttaataatttctgatattcaattttggtaagtttagttaatataagtagtatatggaaataaaaggggagatttgcaaaactacccttgttttactactcttttgcaacaatacccttttatgttgtccatttttaaaaatactccttcccttgaacaaaatgaccaaattaccgtcatctaatagaaacatgtaattggagactgaacttttcccgccaattttttggcgccaaaattttttttcccgccaaaaaaaatttcccaccaaacatttttccgccaaaaaaaaaaatttcccgcccaaaaaaaaatttcccgccaaatttttttttcgtaacaaatttttcctcagccaaaacaatgattttacaaatccttgtaaatattatttagcggcaaataaatttacaagggattttaaaagatttacaagagattttaaaaaggttttaagagatttacaagagattttaaaagagttttaaaagatttacaagcgattttaaaatagttttaaaaaatttacaagtaattttaaaatgttttcaaatcccttgtaaatctttcaaaacacttttaaacccttttaaaatctttacaaatcctttgtaaatcttttggaacccttgaaaatctcttgtaaatattgtaaaacccttttaaaatctttaaaagacctttgtaaatcttttaaatccctttaaaatctcttgtaaatctttaaaaacccttttaaaatcccttgtaaatcttttaaaaccttttaaaattccttgtaaatcagcctcttaaaatctcttgtaaatcttataaaacccttttaaaatcccttgtaaatcttttaaaactcttttaaaatcccttgtaaatctatttcccgccaaaaaaaaatttggcgggaaaaatatttttagaaacaaaatttggcggtaaattttttttcgaaacgttttggcgggaaagtttttttcgaaaatttttggcgggaaaattttggcgggaaatttattttggaatattttaagcgaaaaaatattaatatttcattttgttaacttaaaacaatttccaaataagggtaaaatggtcataaaaatttaaagagggtagaaataaaaaatggattaaacaaaaaggtagagttgaaaaggggtatcatgaaaagggcattagaaagaatttttcaaataaaagtgtttagttagaaggatactaaaattaaataaataaaaaatacaaaagtttagaaaaattgtgggcttcacacatcatcacaaaaactctcttttaatatatagatgatttatgggcttccaactcaaaaccaattgacaataagtagcgagatttatgaatattatataatgttgtagaaatatctcaacttacaatgtgagacattctatattttaataggtctctttatgaaaagaaaatggcccaatgggaacgacccaaacccaacatcccaaaattaccacaacaagacgagtcattatacaggctaggtagaaaattggttttgtggaaaagcgtctagtgggtcaactatgtgctctaatacgatattaggaatcataggtttccaactcaaaaccaattgataatatgtttgcatcaaacgattagtgatgttagagttcaaaggaactgaggtctagttgcgaggaagtaaaaaaatcataaagttgggtttacaacaaaaaaaagctatcatgtaatcaactatcatatgacgtcgacttctctatacatgcctctgtatattacatgatattgcatataatcatcttcttcaacaagatattcattcctttttaattattcattcaaaatgctctaggaactatataatcaatcttaccacaattagtttgatctctcaaagttcccatgatgtttctccaatccacaattttcataaatttatgacattcacctaattgttgaaaaaaaatcacatcgagaagtaaaagaaaaaaaaatcaaaacacaagacttacttaaaattttatccaagaagcaaatgctaatgattttagctgctcactgactttggataaacactcatagattgcattcttagaagatattagatcattaaaaactctttgcaaaacagtaagaacatgttgttgaacatcacttttttaaccgatttgataagatcttgtatatctttcactcgctaaagtgtttgttctataactttttcatggtttgacattgtaaaacctaaaacattcaaaacactgagttttcagagtgagatgtagataattaatgattagtcattcataattataagctttagattacatagaattatatagtaaaagaattttctatctataatggatagaaatatataaataataaatataaaatattcttaacaaaatctttcaagatatttcttgtcaaaatctatcaagatttataaataataaatatagattacatggaattatataattaatgattttccaagatctttctttatttttattttttaataacttctagcaaaatcttgactcttaaatgaccaaggaaatttgttatataaaaaaaaaagttaccaatgaactttactttttacacaaagcttgcacctctcacacaaacttccacctttctcaatgtcaaacacaagataagatctaacttgatagaatgcttagaagatgcaaataattatgcaagagatgaatgaaagagaaagctaaaatgtaatccttgatgtacacatatctccatgtcttttaagaacttcaaacatttcctccatcaaaggcatgatgaaataatctttgatgtacacacatctcgatggatcacgataagggttaggcgcatcacgagaacaccctatgaacggcctatcttctttaagttgtagttcactatccatgacatatattgcattgctactttgtggtttagaccatatcagtaatggtcttccttatcaagagtgtttctcttatctagacttgcaaaatcaatcaaatcttgaggagaacagagtgtatcatcacgtccatcaagaagccttataactcgtatgagttcactcacaacaatggccaccacacatcttacaaaacacacataagaaaaaacaaaaggagttaaaaaagtgaagaaaatatttcaatatcatatcttatctatattacaattagagtagttgtattgtaaacttttcaatattgttttaaagattctcatatgtacttcatatatatgtctctttatattgcagcatataataatcttttctctacaaaatattcattcatatgtccattcctttttctcttgcaacttaactgtgttctttctgatctcttaaagctttcattattatccttcaatcagctttcagtaaatctgggattttgaaataaaactacaagaacaataataaattgttagaccaaacttgtttcatagagaaaaaaaaaagaatctgatacacttacctaacatgttgaccaagatgcaaatgtagattatttaatcgtcctcccagctctcaaaaaaaaacccatatctttagcaatttctttcaaaacatggagaatattttttcgagcatcacttataccaaccagtgattcaagaagctggtgtagttcaaaaagtatagccctcactcgtcgacgaactttaaatgaaagtaatgaaaatctggtattaacttgaaactttcacacttctcttccacttttatcctttcacactagaaaattacaatgtgcacaattatagccgtttcacacttctcttctacaattttttttttcacatcaaaaaattatttcaggtttttgacacatattcccaacaatttatttttcttaataattaatataatttttaaaatatatcaatgtacaaaacataggctccaaatggatgacaaataattgaatatttgggtgcaaatggttgcacaatttaaaaggttgaagaggttaaaaacattattcaattaatcttcagcattttagttgaaaaagttgaaaaaattattcaattcattcaacttaaaaagttgaaaaatgaacaaattataaaggaaaagtgttcaacttcttgatccacatttttggagatgatcattcaaccccaattttgttcaacctaataatttcaactcattcaattttgaaaaaccatttgtacaagttgaagatctttcaacttattcctctacaaaaaggttaaacaatttttctttataacttttttggttgaatggatgaaattagttcttagttatttatctcaaatagtaaaaacataagatgaatgatcatttaactttttataacctcttattttcaaacaacatttgcacccatagtctaaaaatagaaatttgttgaccaagaagaatttggtatcaaatgaatattttttgtggctcaaacttttattctctctttaagtagctgaaaaattaacgttggaaagtggggtctacagacctttacgcccatttatttacgctacaatggttttctaatcacatccttaatcttacaatttgtttgataataaatctactaattaaatttgacgtcacaaatcacaatgcactgacgcccattagcatgttagtgacaatgtaaccaaactgattcatcacatttcaaactgaactcattccggttgactaatcggttgggttttaactcgccaactattcttatcaggccaggcccaaacattccttcacaaagccctgccaatttgattaatttttgtggcacgtgattttagttttgtgttaggtctcaccaagattattgatcacgttccataattcaaaactttgcattatataccaaaaatccaatccgtattgaaacttcatttgtaaagtttttttttttcccaaatagtactttttttttgtttggccttcttatagaaagaagaactcaaagcacagagagaagatgagcgaagaacaaccacacgccaatctagcggttcccgcgtttaaaactgagaaagagcccataacgcaaacacgaaatggtcaaagtagcgtttggcgtttcggtggaagtgataaggcagcgaaagcatccaccgtaacgcttagaggtgtcatctacatgctcttcgacaactgcggcaaagacgtcaataagaccattttacccctcggccacggtgacccttccgtctacccttgcttccgtacctgtatcgaagctgaagacgccgtcgtcgacgtccttcgctccggcaaaggcaattcttacggtcccggagctgggattctccccgcaagacggtaactttctcactcaattctcgatcttccactctaatcgaacgattctcgatctgggttcttcgaatttcatcgtaatcggagtcgtttttgagtcaacggcgaatcaattttgacaaagatttcaactttaagcacactcgagtataatcttacaattgccttttagaccctatagttttagtattcttataaattgaccccataacttttgaatagatctacattttgttgatgtttgctctgttgtgaacagagccgttgctgattatatgaaccgagatcttccgcacaagttaacgcctgaagatatttttctgaccgctggatgcaaccaagggatagagatcgtgttcgaatcgttggctcgaccaaacgcaaacatcttgctcccacgtcctggcttccctcactacgacgctcgtgctgcttacagtggtctcgaggttcgcaagtttgatcttcttcccgagaaagaatgggagattgatcttgaaggtatcgaagccattgcagacgagaacactgtggctatggttgtaattaaccccaacaatccctgtggaaatgtctactctcacgaccatctcaaaaaggtttgtgtttttgtatcattacacaaaaatgctcatctttttgactcataactgaggcaaagcttgaacctttgaggcatttttgattcgtagctcgctaaagattgcgtttttggttaattttaggttgcagagacggctaggaagctcgggataatggtgatctcagacgaagtatatgaccgaactatattcggagacaatccatttgtttcaatggggaagtttgcttcgatagtccctgtattgacactagcaggcatatctaagggatgggttgttcctggatggaaaattggctggatcgccttgaatgatcccgagggcgttttcgagaccaccaaggtttgtttactgctacttcttttgtatcctctcttgctgttttgtaacaagtaatctcactgtatgtttactctctgtttctgacaggtgttacaatccatcaaacagaatcttgacgtaactcctgaccctgccacaataattcaggtttgtgtgttttagatatgttttagaatctttgcaaaactagtctatggattcatgacactactgtatgttcctttgataggctgcacttccagcgatcctggagaaagcggacaaaaacttctttgcaaagaagaacaagatactcaaacataatgttgatttggtgtgtgataggctcaaggacatcccctgtgtcgtctgtcccaagaaacctgagtcttgcacttacttattggtataacttctgtaacgacacacatccacaaatgtagttatgatcggttttctttagactggtgcttcttgatcaatttcagaccattactagtctttcaatctgatgaatagttttcactcactgcagacaaagttggagctgtcattgatggataatatcaaggacgatatagatttttgcgtaaaactggccagagaggagaatctcgtgtttctaccaggtaaaataatgaaactaagcagcatgagtcttgatttgagttttgatactaaaatggggtttgtggggaatgttttgcaggggatgctctgggtttgaagaactggatgaggataaccatcggagtcgaagctcatatgcttgaggatgcacttgagagactgaagggtttctgtacacgtcatgccaagaagacagagacagaaactgagtcacttcaagctttgaaactgagtgataataatctcgaaatgtaaaacagaagaggatgtgtgtgcccaaaagaatattcttatgatagataattttgattcttgcttttccatttgatttcccaaagtatttgattatctacattaataaaaactatggttatttgtcaaatagcaatattgggaacataaatgaaggatctagcatccatgaaagagaatttctttgtttttgattaccttgttctaacatttatgctattggtttgtgcatataagtaagttcacacgtttgtgttttcttttgcaagcaagttcatatgttaaatttggtatttggatacaaactcattctcataagattattttttttattttttttatttttttttggtatacaaactcatccatgaagttggattgagaaattgcatccaaactcttttagaaatcaaaatattttgttaacgttattttctaaaagatatatcacatgtcattttcttttttataattattaaatttccaaaaatatatatatatatatatatatatatatatatatatatatcacgatttaacaatgaaatgaaagatttcagaattattatttggtgctaaaatatttgaaatgattttatttttttaatctcaaaaattacaaaatatataataaaattttagtggtggcatactggcattgcgatttgatgatcttgacctcatatattgtgaaactacaatttctttaaaaagaaaaattgatcataggaaaattattgacaaacaaattttgcgtcattttgaaatagatccgatattcatctagtttacaagctaaaaagaacttaatatctatacatccatatgcaaaaactaactttataaacgaacaatagggataattagcactctgatacaaaaaaatgaacaagtaaatatatgcatgttgacaatatatgtcaaactttttgtagatctcatacattcatataattcattatacttttaacgtgtaatataacgtagactaaaaatttgttgatcaataatttccaataatatcattcttaagtcgttaaaaccaattgttatattggtactagttttgtataaatatcatgtattaatctcttatcttatatgtaactttcaggattttttttgggttaatctttcgtacttaaacagtcagcaaagatatatttttttttctattttgttatttctttaatattatttattatatttttaacataaatataaaacttaaaaagtggtagacatgatcaacaaatctacgacgaaactgtatatgagtatatctatcattttctccttccgccaacttccactgattccatcccatgtgggattcttctatccatgcatatatatcataaaatttgaacaattcgtaagttaagttatatatttgtaaacacaaaaacaaaaacaaaaattagttaataaaaatatttatagaaaggggtagagaaataatatagtaccgtgatgaactatggggagggtttgggccaccgcatttgattttgcagcgttcaaagcaattaccgtcgttgtcagcacaagactttgaacacttgcgataacatttgatccaactatttttagtcccacttgcttctactgccaccacaacaatcaccatcattatcactaatattgcactccattttgccatcgttgatcgtcttagaatcctacaaaagcaaactttgtttcttttttgtttttaatcttatgactcttattttatgtttcaagaatcaacctctacttataatacattttgtttaaatttagagtagattttttactttgttttttctttggtttaattaatctactaattttcttcagatttatgttcaaaaattaatatgtctctgcagtattaaaatttgtaaatatgaatacttgtatattgttgtgaatgtaaatctcttgccaataagaaagggcattaattgatagatatactatgatgtgctttattaaagacactaatagattttacaagaaaatattaatcttcaattaataaaatcctacaaatacaaactttgttttagaaaaaaaaacaattatgattcttatattatgtttacacaaatcaacctctatttatagtacaaattgttttataacttttgagaagattatttacttagtgtttgctgtagttttaatttgtttaatctatcaatttccttcatattttatgttcaaaattttgtatatttttgcagtaataaattttataaatatgaatagatgatattgttgtggatgtagattcatcccttggaaagtaaatctcatgccaataagaaagagacaccacactttagaggacattaattgataggtttcctatgatgaattttattcattggttaaagacattaatagattttacaagaatttattaatcttcatttaataaaaacattgtgaaatgaattgtgtaattcacaatctttttcctttttctttataaaaatactagataaaaccgtctaaataggcgagtataaaaaataaatgtaaattttgtcgatatttgaattcaaaatagtattttacaaatttaataattttaaatcttatatattctataactatctatttcatcataataaatagcattttaattttatacattccatcttattaatggtatttgaattttaattcttatattttagaatatataaagtattactccgacgaagaaggtgatcttaccttaaagcacgctttcggttaattcttcatataaaattatattcaaaacatcttcttcacttcagattcaatgaaaagggtttcgacattgatgatataaagatatgggtttcaccaatacttcaatcgatcatacccgcctcagatctattaccctaactcattattgggtcattccacccacaaccataaaaacttggtttcacccacatctctttcgcctcagatttgctcacactagtcaaagctcttaattcgaagatccatttggaggaacttcacgagattctccacgatatcctctctatcgctactaatttctcttattgctctttcaatttcatttctagagattgtaatcgtcaagctgactctttagcaaaggcagctcttctcctctcttgtaccgatatctaattcaatataagagaatatttgttgttcaaacaaaaaagaatatcattatcgatcaaagaatttagaaagccatcagccattaacttcaacgcgagcctttggagatgtctacatggaacgagattcagaaaatggtattcatcatttcagcaatcatgggcattagctataaccaagaaagatgttattttcggttgttggaaatgttttgataggaagcgatgtaacagatggatcataaccaatataatgatcattttaaagtttattggagtttcgtcagaaaagtgatagctaaacgagacgatcatgtcggattaaggaagaagacgaataagaaagactatagatttgataatctattagcgtgtaagacttacgaaagaaagtggtgtttaattcatttcttcgattgtattttcttcttaaattttaatcatttttttggttttgtgtgtatgtataaaaaataatcatgtcatatctgttttagttttaataaagtaaagaaaaatattttttttaaatgttagtataattatagggttttgtgcaagccaatatcgcgaacctaaaagtaacccgctaaataacccttgtgtatatgactgtgtaataaactgtgtattttttaagagaatctaaaacatcgtagttttggagaaattgcatccaaactcttttcgagatcaaaacatactgttaaaattattttctacaaaatattatatatatatatatatgtcattttcttttttagaattgctaaatcatgattttgcgactttttccatcattatttggtgcaaattttgccattaaattgcaatggcaacactaaaagtttactaagtattttgtagtcttgaaataatgttcttttttaatctcaaaactacaaaatacttagtaaacttttagtgttgccatcgcaattcgatggcaaaatttgatgagattgacgtgattaattgtgaaaactacaatttctttaaaaggaataattgatcatatgaaaattattgacaaacaagttttgcgtcatttaaaatagatcctaaattcatctagtttacaagcttaaaacaacttaatatacatccatatgcaaaaactaattttataaacgaacaacaagaacaattagcattctcatacaaaatgaacaagtactatgcatgtaacaatatatctcaattttttttgtagatctcaaacactctaacgtgtaaaacaaaaaaaaaatataaggtaaggctaaaagtttgttgaccaataatttccaataaaatcattcttaagtcgttaacaccaattattctatatttctagtggtactagttttgtatatattatgtattaattttatttcttgtatttaactttcaagatttttttggttaatctttcgtacttaaacagtcggtaaacatagatttttttattttttttgttatttcttcaatattatttattatatttttaacataaatataaaacttaaaaagtggtagacatgatcaacaaatctacgacgaaaatgtatatatatctatcattttctccttccgccaacttccactgattccatcccatgtgggattcttctatccatgcatatatatcataaaattagaacaattcgtaagttaagttatatatttgtaaacacaaaaaccaaaattagttaattaagaaattaaatatttatagaaattgggtagagaaagtatatagtaccgtgatgaactatggtgagcggtaattgggcacatcgctctgcacatttcaaagcaatcgccgtcgtcgtgtttcctgcaagactttatacactcgcgataacattggtcgtcatcactagaatctttttcactccattttgcttctactgccaacgcagcaatcaccaccatcagtatcactaatattgcactccattttgccatctttgatcgtcttagaatcctacaaaagaaaactttgttttataaaaaataattcttatgagtcttatgttatgtttcaagaattcaacctctatttataatacattttgttttacttttgagaagattttttacttattgtttgctgtagctttaattggaagaatttataaatttccttcatatttatgttcaaaatcttgtatgtttttgcagtatcaaattttataaatatgaatagatgtatattgtggtgaatgtatatccattccttggagagtatatccattccttagaggacattaattgatacttgattgaattcttatgatgggttttattcattggttaaagccattaatagtttttacaagaatatattgatcttcattttaacaaaaatgttgtgaaatgaaacactttggttaacccttttcacttttctttcctttttattttcttttataaagatagttttaatagtaattaattacatttatcacttcatatattttattctttgatcaaaaaattttattttatttaatggttaagaaacaatttacataagattttcttaattgcaaagcatatctcacttattatatatatttacctaaacaacttaccagatttttttcattgattgtaagaaactatttctaatgacaaaagaacttctttatttaaatatatgttactatgctaaagagaatctaaattcattgttactgttatatttatttgttcaaaaacagcaatgaatcatgaaataatgtagcaaatcataaacaaatcacgattattttaagaataaaatatatcactactcattgttttctgtcaagttataaagaacaaatcatattgaaagttaacaaatcatttcataccaaatacaaattcggtaaaaaatcaactgaaagttaaacaaaaaaaaagatgaatgtatcgaatcacacttagttaaatagaggttggtttcacgaaaaattaatataacaatatcaaaagataaaaacagagtttgcttttataagatcaaagaaggtaaaaaaagaaatggcaaaatggagtgcgatcgtattgataatgatggtgatgattgttgcggtcacaatagaagcacaagaagaaagtggtgggactatttgttttcgccaatgttctcagccttgtcgcagtgacgacggtagttgctatgaaaactgtaaaatcgaatgcggtggtcccaagcctcccttatctcgtctacggtaatgtataaataattatttgcctttaatttatatatatgtgtgtgtttttttttcctaattacttatatatatatatatgcatgaatagaagctcacatgcatgagatggcatcatcaatggaagttcgcggaaggataggatgataaaaagagatttgtagcggatttttgatcatctctactgtttttaacttcacgttttatattataagagtttcattaaaaagatcaataaaacgagaaaatgtggaaacaaaccttgagttaatttttctatcaaaaagaaaccatgagttttgtcataaaacatgttaaaaacctgagttttgttttaagtatttaaaccctgagcgtttaataaaagtgtaaaaaaaaacctcaaaactcaactagatctaaaacgaacaaaagaaaatagtttcaatctactctatcgcccttttccgccacaccatcctgatcccctttgctgactcctctctgagttatgtctttgcttaatttgttcaggacataaagttattttccatagttcaagagcaagtaaagtataaccgtttcagtgtcaccaagataagcaaaaaaggaagagaaagttacggtgtttgaagatcttacaacaagttaaatatcacttgcaattgataagaactggaggccttggacatgaacaagaagcatatacatgtgatagaagccatctttaacttatgtggaataatcataacatacaaaattttacaaattgatagagttatctatgacctatgatgagagatcatgtttgaagtcacaattggctctattttgaccaattttctttgtagctagctatcacataacaaagttcagtattttacacacaattgtttgttttttaatctaatattaaattatattcaaagactaataaacatctatacaaattaatgcaaactttttaagaaaaataataaacaaaagaaattatctttcattgtgtgcctttgatgcaaaccaatctcgtaaacctacttcatacttccgctcatctccattttgtattgtacttaattaattattaatgttcttatcgatgattcttatcaccctctcgcttggtgatggctcgtctctatgccttctattgttcctctctttcaaaatcgagtggatcgtgttttgaaacacataacatagagtgaatgtttttgttatgtcaagattgtttccatttaataattatttataaataattaagttaaacaattgcaaaataaaaaaaattatcaaaataaaatgacattatctgtaagcaatattccttagttctacttttttgaactctaattaaaatcggatgataaaaaaaaaaacatactagtatattgcttgaaattggcaaaaataaacactcccatagaattatgcttcgttggcgattggacaagcgaaccagtaaccgtttctcttctttggcctccatcttttccgattggtttagggccgccggcacttgtcggcggttccatttcttctctttagtttgattttgctttttgttttaatctaaataaagtatttgctctcaattctggatttctaaatccaaacttcttcttcttatttgtagttttaattcacttttagatctgtaagaaaaatcagttatgtatagattccaagtgtttctgttcaacatacatggtggaagatctatggatgtgaacatgagcctttggatgtgttgggtttcttaccgaaatgcaatttccgacggctacgccgtatttgttccgacataatttgtcgattatatgtcaactctaacatgtattgttagttttgtgttagtttccggtggtcatcgcgatcgtttggtggctttccgatgtttgaaacaaatcttcatagatttgttgtggaaacggcgaccaccttggaaaccaccatggaatcaaatcataagaaccttgtatttctggtctttgaagaacgtcaacaagagaatcgagatcatggatttatcatgggcaacatttacaaccaaaacaatgtcattgtctcacgcgggtgatggaaataattatatggttagcgatgtaactgatggatcgcaaccttttgattttcgaaaagtgtgttggagtttcattaaagagatgatagccaaacaagaagatcaaattagaccgaagacgaagacgatcaaggaaaataacagattgataaccctgttagcgtgtaaggcttacctacgaaaggaagcaatgtgtaatttcactttttcgattatttcgttcaacttaagtattggttgtatggattgtagagctctcacttatatgcttattggtatatttgtaatctctttttaagtttaataaataagacgttaaaaaaaaaaaaaaaaactcccataagttttacgccgttaaagagagacggagcgacgtttgctacgaccgtcaagattcaaatggaatcttttttaaggaaaaacaaaaattcctccaacggctatatctgatcagacatctctgtcttcttcttggatgcggaaaaggaaaaaccttattacttgtttgagattctcaattcaattctctgagattcttaaattcaattctctgagattttgcccttttcataataatggagtctacgcctccttatcaccgatccaacactaaatcagcttcgcgtctccaagattcttcgaatcctccaaatctctctcttgatttggttctgtcgtctcccaatactccaaacccatcatcacctgttcctcttcgcgatatcctcctcttacctccttctccacttcgaaaatcgaggacccgtttatccgatcgactcgaaatgacttctgaagatgctatggcggtggttcggaaacggggcaaagggaaaggagggcaaaagagtcttttagcatctccgaggaatccccggagatcgaggcgaagatctgaagctgtggaagagaaagaagctaatttggttatcgaagaaatcgtaaagcttcctcctagaaagcggaagactaatggtcgacctaagaaggataagcaaagttcagctcctcctctttgttcttcctcagatcttccaagtactcttctttctcttattatctgctttatgtgtttctctgcttaattctgatttgcttgtgtgttgggtttggtgaagatacatgtcagagcgatttgaatctgattggagagattataagtgatttggtaatgtggagagatgttgcgaaatcgactctctggtttggttttggatgtttgtctttcctatcttcttgctttgccaaaggagtcaactttaggtaccaaatatctagcttgtgtttgtaggctcaattagatttgtgaaagtcatgacctttttctttgttttgaagcgttttctcggcggtttccaatctcggacttgtgttactttgcgggtccttcttgtcaaacactctttgtcaaaggtacatttacttctgtggtctcttttgtttggcattctccataagctaatagttagtgtgatccttcaatgtgttgttacttttaggaaaaatgaagacacaaagagagcgttccatgtgagtgaagatgatgtcttgcgctcagctagacgagtgcttcctgcaaccaacttttttatctcgaagactagtgagcttttttcaggagaaccatcaatgacactcaaagtaaacaaaatcaaatcagttttggtgattgctatgtgttggtggtttacttgccctttcatctgctgattttctttttgtcacaggtgacaccatttctgctacttggagctgagtatggtcatctcataacactgtggaggctatctgcatttggtaattaacatttggaacataagctgaaacattgttaagcatgataggaattgtgatgatgatatgtgtgtatggttactgaaacaggtttcttcctcagtttcaccatcccaaagctgtattcatgttacacgcatcagattagccaaaaaggtgaagaataatgaattgcacccattcacatattgtcaattgtgttagaatcaatagtcaagtgtttgtagatgtctttaactggtccaatggtttaaattcttgaactggtttgagtttcatttgtgcagttgaaagagtgaaaacgagaataggtgaagcatggggagtctgctcacacaagaagatcttggctggctctgcggtgacagcgttttggaacttgacgagcataagaacccgaatatttgcaggtaatttacctaaccaatggttgacagagtatttggtttgccttgtatcaaaatataacgtatacgtctttcatgttctgcagtttttatcatcctggtgatatttcggtataggagacaaaatctacagctaactcccgaggaagttgagcctgttgagaatgagcaagaagaagaaacactcccgcaggaagaagaaacagttccacaagaagaagaaacagttccacaagaagaagaacagacacagccatcagaagagcgagctttagtggtggtggttgcagaaacttaaggatcaaagaaactgtagtgtttgtactttgtatcaatccacattcaacagagatgtaattctatatctcgaaaggatctgtttttttaatatgaaaaattaatgacaaagagatcctttaacaaagctgcccattcaagtcgtgaatctttggcagagaatacaatgtttcataagatccaagggacaagaagaagaaacttgaaaccttctttcaagtttaagggtcgacaagttaatgtgccaatttgattgccaaatctgctactttttccctacttattttgatgagattcttgattatatatatatatatatatatatatatatatatatatatatatatatatatatatatatatatatatatatttggtagaatcttgattataatttatagtattcaaactcatggatgtttccaagttttaaattagtagaagtgatgcaattttgttgagtttgtatgttgatgtaatagaaatcatagagatttgattcaaaagatattggacatttgtctttgatatgaaaactaaagacaaagagatgatttgtgtttgaacagtacaacaattattctttgcctaaatactcttaaaccttctctcgcaatcaacaatctcgcattgggtacgcgtagacatcatcaaaagtcctctttgcaagctgataaattataccaaacatcagttactcgtccaaccaatacaacatgtcttacttaataggctgaaaacaaagaaaagctctccaagaaactcagaaacaaaattaagagggttttcgttcctaagtttttctaaagaagaaggctttaaaaggtagaggttttgtacataaactgtagcttcattgttcctctggctaactcatcacacatcatcattgcaagctgggagtataagaccaatcagtaataactcaaatgctataaccaacaagaaaagaagacacgtttccgggtacatgtattttttttaagaagatatgtaagaaccagttcttttaaaacacaatgcagcatcaaccattgcttgatgtgtatctaaagcctatcttattgcctgaaacccgttctaatcgtttatattatttgcatgaaaacccagatcttggcttcgttgtctccatctacacttgtgtcagcctacaagatcgaaaaactagaccaattgagccgctatctctttacaacgttaagcagaaagacaacaacaactgatccagtttttcgccatagcaacaaccaaaaagaatctacactgatcgagaaagcttcttaaatggcaaaatctaaactagttctctacctatgtctaatacaacaatctagaaagccaatacagaaacagctctcaaacacatttcatcaatcaaacaaagcatatctccactcaatatttagtacatatttaagccattattcaagcattacaaaattgaaggatgtgagaaagtaccgtcagagagccagccataggtttggccagagatagaaagctttgaagtcattagcgctgaagctgtagccgagtgatatggtaacaatgactccacacagaagctcagttccacaggatttctattcacatcaaaaacaaacaaaaatgcaaattcttttaagtaatgtgataagagagtttcacatttaaaatcaacatcaaaatgcaaaatttcatcttttttacttgtgaataatcgatctggaaacatgattaacgcaaaaatgtaatttttacatagagaagttccttcttttttttcacaattcgatcgaatttaacccatttcaagcttcaagtagcacaaaactgtgaaatgagctcaaataaggaaatgggtatgagagagactaaccggagaggagaaagcagtgggcttcttctggcagtggctctaaacaatggtggagcggatttcgcttgagaggcgaagcggccagtagaagcagcggcgctgcgtgaggaagcagctcgaagcatcgatctggcaccggagaggacggcggacgtggccatcaggagagagaattgaagagaagatcaaaaactacggctgcgagagagaagaagagagaatgctgaagcctgaactccgattacgattacgggaaatgatgataaaccctataaacgcgatcttagtttggacgaaaccttagtcttttgttataaacgcgatcgcaacacttttgggccaaaggaaagcccaatttcatttgtgcgtctttgaacggcactatgcaagtggctaacatttcttcactttttttatgtgatcaaagtaattggaaaattttatggatcgttattttttaaactgagtcaatattggttttggcaagaatatgtgtcgacttggtggcgattaaaaaaaaaaaaaaaaaaaagagactaaagtttatataactaaaagcgtcaggtcatacaaagatcccaagataatgaaacaaagcttaaacggagagtagaaaaaccatgagataatagacgaaatagtaaaactagtgacaactggctggaagcagaagctctctctcttcactcctctctgtagtctgggttctcctttaagatgatgaatccttctagtattggcgacagaggaatgtatctgtttgccagttacaaatccgagttttataatcagacacctaagtaggcaacataaagggtacaaggaagaaaggaaaaagaataacatacttgtccgtggctagttcggctctctctccagcagccaggagaacaggtgtggagtgtgtctggaaaccggttatggtcttgggccgacccgcttgcccaaccacatcaactgcttgtcctacccgcactggcactgacagtggcttcaggttttcatccactgtcaacatcatccttggctatacatttttttaacaaaatttgattaaatatcaaatcatagcaagttcatcagacctaactaacaagagggagaaacacaggacagaagttgaactcacttgcatcgccaaaacgaggaagtacagcacataatggtacttcccgagtatgattggtttcatgtcaaggcatgcatgcaaaagtgtcactataccagcaagtgcggttctgcataaataaggtccgcatgagaaacctttgaacatccaactatcaaaaaagatttggttctattggtgacaaaaagaatgaacttacggcgatagcaagaaccgttcagagtggaaggggctgagtgtcaagagaccctttcccatgtgcacaagcccttgagcaatacgcacctgcataatgacttaccaagttagttacaataattccaacaagaacaacagcttaccgcagggtacagaaaccaaaatgaggaacacattacacagaagagaagactcatgtctttgtaataatagctggagaggttccgaagcatcccggctatccttgcgttattagttccagcgccaatcagtcccaatgatataattgctgactgtacgagtcaaaagaaagatcagtcctctctcaatactattcagctaaataatatgggacaggctatgaagcgaaatgattgctaaccatggcaacttccgaatctgtgtcatggctaagccggctcaaggtgtccattacagtcacctggaattgtgggaaaaatattaaaaacccagtattactctagacgcccactaataattgtaagcaggtgcagtaaaactacatttacaaaagtatttacctttggattggatatacaaaggagaccaagggccaaaggcacagcacgccgaatgttttgttctccgtattgtagcatccgctccagagaacggatctccatatcaactcccagttcttcagacatagcaaccattgctaacccaagcacagctggaccctggtggatgtcacctttctcaagatgctcgccacactgagcaagaaggtcttgtacctgaaaatataagtaggagtcaacaactaaacaagtaatgaattatgtcactcaaccaccagcacaattgattagatacctttaggacatttccagttccagcataagcacaagaaagaagtgtcatatcacaatactttctaatcttctcattgaaggtcttcgaaacttcagctgtagcctctacactttcctggtagatattggaacaagttgatgttggtcaagcaatgcaaataatgatatacgaacaaagagcgagattatgtaaaacacattgctaacctgtttgcccaggtatagaagtccaagaccaagtggcaagaaacgagtgagggcatcacccagttctgcctcacttcgatccatcaaagcaaatataatagactgggctacttcttcgttacaggaaccaacatatatcattcccaaagaaagtgaagcaaatgcaatcacatcaagaggcgcttttgcatcattcagtatcggggacaatttgtttcgaatctgttgaaacagtgtacgtgttaaagttttgtgaacacccgaaacattcaagtagtaatatgggaaagaatataacaagtacctggtcattttgggaacctgcgtatgaaattccaagacccatgatagcaccgattctgacagatgaatcctctttgtctatatagtctccaagaagtgccaatgcctgagaaataaggctgagtaagatggaagagtggctgcaaatattagcacaaatggtcccagcaaaatcaaacacgacagcaactcacaggatcacaatcgttcttaatgccacaatttacaatcccaactcccagcagtgctccagcaatgataggattatcattactatggaaatatttgtcgagttgggaaagtccagagtccacatcccacagttgaatcataccctatatgatagggaaacaaaaagatctggttacaattcttacttccatgatctgagcacagtaaataaattcatcaaataagaaaaagtataccagactagcagctgcactagtcttgccatgttctttatttttgaagagccagtttccagaagatccggtggttgagtctgaaggtactgtcattagtttgtcctgcgataagcaaatatattaagaggacacgtcttccactagatctattttattataatctgcaaccatacctgaccaaaaccagcatttacgaatgcattgacaaaggtagcagccaaattctgtctagcagaatccacgcttgcaccggagctagccctgccgtcgagtaagtgagcctataaaattcaaaaagggcaggtcaaagactgagggaaacataatttgtaactaaataaatgagtagcaagcctaacacattaaaactgatttaccttgtagatgtcttcaggcgttttggcctccatgacctcaatatcccttgcaagggtcagatatccttcacttaacttagtgttgttaacaatatcctgtagggcttcccggtcatcatcatctgcaaccatctcatcgtcaagttcaaaggttataccctgcagggaggcatacgacgagaggagaagtataagaaagtatgtcaatcgggtattgtgtctctaaatgaatggaaattttaaacagcgatgcagcagttaatctgtgtgtgccttagaagagaataggaggaggccagtgtcgctaaagaatgaggtcttcccagaaaaacaatacaaaattggactaaaaataatgttcaagaaacatatttaaattccctctagatcatgctgaattacaactacaaactatgttctcattttttttctgctaactttatgtaacagctggaaagtaaaatacaatcgaataaaagcacaaccaactatcaaagcatataggagtaaagatccaaatcaaaacatacataccgaaaagaaagaatgagatagaattgtagtaaagtagagatagttaggacttacatgacgagcaatcatgtagcagaactgtttcttcttcagcagatccgtacatgaggtaaatacttgtttaacatactgcaatacagaaaatacaccatacagcacattaaatatcaaaaatgtctacgcaaatactcgaaataaaacatagaggattgatttttccaaatgcttcacacgcagaaagaatgaaatgaaactacgttctatagaaagattaaagtcctacctgcgtgttatcaagaaatagtgcaatctgcagagcgtttggatactcttcaaacttcatgtaaatcatgtaggaaatatctagaaccaacatgtcatctggtccaggaaggtacctgaaaattcaaatatataagacgtcagagagatttttggaagcaaatataaacaaagctcaccacttgtttctacaagatcagttcaaataacaaagagtgaggaaaaataaaataaataggattgactatgtttaaagtacctagctgcacttgtgagatagttgcatgtcctcttgaaatttgttttgtctacatgctcaagtaagagatcaagatcctcaacatccattaaaagatcaacagcttcggtttctgcattatgctgcaaggagtaaatgaaatcgtttagaaataaataaatcgcagaggtgctaatctcaagccctattagtttaggaattcaccttcatgtgaaaagcaacaatttgttgcacaagctccattaaatcgtcaatagaggcctcctcactctgagataatgaacaggtagataaatatgactcagtgacctttctcattgaataagacacatttagtcattcctcaaaactccaaccatcagaattcagaaggataaacccaaacacaacttccaacaatcttagaatatctgcacaagtcctaggacgagaaactgaatttccaaagacaaaatcgaaaattgatttctaacctgacgctttgtatactcttgtgcaatctctccagctaaattcctgacatattcatgaccccacgatccaatgtcaccctctgttccaatcaatctaaaccttaagctttcctggaattatattgtaaaagaaagtgattagcagttcaaagtatgccttaaaaaatacaaatcagaatacaaagtatgcccaagtcagtagaagcataccctttcaccatctgcagacatggtaagggccaggacagacaggatatcggacaggtacttctgcaaacatagcaaatgtaatttttaagccataccaatataagaattgttaatgacttgaaatcaatgatgacatactttgagatcagaatcagccattgtttcatgaaacgctttaagagttccataatggggacgcagaaactttagtggtttgggaactgaagtcatggaacttgttgaagctcggatttcctgcctacaaagccaaataaaactctaattaaaaacataaacatgtacaccaagagcagagagaaagaaaaaaagctttataagttgtacaagcttcagtggcaataatctgaaaacccgaagctgatcaagtcaagaattacctcatgctctcaagggcagccttctgcaattccggattaggatcctgaaccctctcaacatagagctcaaggttctgctttagttccaagtcctcttcagactacaatcacaacccaatgtaagtcgagtcattaagaaagtgaccatatacaaacaaaaaaaactttcctcacatcacaagttaacaactttctaatccggctagtctaatgacgaacaaaacactcactttgccagattaaaaaccctaattctataacacccctacttcaactcgatcgagactccaattaaaaacctaactgcagatcttacagatttgaaattaattcgtttctgatgaacccagatactaaacacgacacacaatgtcgaaaaaggattcgataaatcaaaaaaccgagaaagaagaaactttaccaaatcctcatcctttttctcgtccttcttcttgggatccttagacggaaccttcaaggtagcttcatctttcttcgcaccgcctccgacactgttgggatcctgagttggagccatctctacagtaacagatcaatctaaggaaccccttgtaaaaagcttgaaatttgaacactcaaacgaatcgagaagcttgtgcttgtgctatcgaaaactctctgattgcaggaattaaaacaaaaaaaactcttctgcaactctctaatcaaagcacaataatatatgaagaagaatctaaatattggaatcggagaagataacccctcgatcaagatttctacactatagaatcaatcagcccattacaacctctttttcaatgtcacagcccattaaccgtattgggctcatttagtgagttcttcttacatgggcccacatgtctaaaattatttattcatcatatttctgtatggttgaacaaacataatttatccttatgacagttaatttatttcacgtttgaagaggatttcgacatattttcattctcttttcgaccggtcgcagacaaaactgcaagacaagcttttctttcacaacctagtgaagtcatagtttcgtctaattcactgcattggatctggtcattagtaaaattgttgaaatatctcatgatccttgtaaattcaatattgacaatttttgaccatctatctcatggtaatttagtagttgaaatcttcaccaaagagtttatagagaccatggttttttgttattttcactatgattttagtaaaagttagccaatgtagatgtaggcaccaaaaactagtgtgcatttcgatttggaatgtccggttagaacaaaaaaaaatgatttgtcttcattatcttcgaccaaagtcctttaaatttttgaatttgaaccgagtattcattttggttatattggattttaataccatgcatgtagggtttgaatatatttacttttgcctataaatacgtacttataaaaagcatatgtgtacaagtgtgagtggaaaatgagatgctagtaatagtatccgcatgtatatgaattatcaattatgaagagagagggaccattcaaatttgaaggagacgagagagagagagagagagtggtcacaattggagaaagaagaggtcgttacgttggattttacgttgcctccatgcacttccttctcctcttatctcgtggtcctctccctctctcctcattattattttatgccattgttctctcaatcccaacaatacgtttttatacggtaatatatgcatggtaaacacacaatttcattactcatttttcaccatatataaccggctggtatttttaagtataagttatgtttataaattataagtgtatatatactcgtgaggttgtcctctttataatcaattggtcgtcgtttgcgactttgctttgaacgcttccaatttccatatgatcatttgatatggaaatttgttgtgttatgttttataaaaaaactttatataagcaatcaagttctaaatcaccaatggttagagaaaatataggtaatttatttgcgttaatagagctagagtgtacttagcaccctagatacatatgaaaagggtctccttattagtcacatgggacgattaagtaaagagtaactcttaacacaacaagggtcaaaacaaaaacaacccttggaaaaataaaagtacaataattgaaagacatgtcgtcgaatttttgtttggttctcgcttgcctacggatcttgtgcgtttcaggcacaagacgcggtcggaggaacctcagagacaccgtgacggtgaagctctgtcataacaccgtcaacagccggcggatttaatcccaacggaagtggcagccatggcctcgtcaatacatctcctatggctgcatccacgctctcttttgactgttccatttataatatatatacacaaaaagtcaaaaatacataattacataatcaaatgcgaaaagtcaaaactcgacaacaatcaattcattatattagattcttaccggatgtaagtctaccggaggacgagcaccaccaaatccaagatttggtttgtacatcgtgtgatgcggcggcagagcatgcgggattccggcaactggcggtgctctaaatctctatacaattaccaatcaaaaatacgatttaaaacatatatatagaaacaaaaaggggtatacatacggaaacaatcttataaatgttggttcattaccgtagctacggtcggtaaatacggagtcgtcccgttatgcatctacatgcaaaaatgctggttagaaagacaagcatatgataaaaatactcggtgtcattcagctttcataatgttaaatactatgatgaaaacaaatatgataaagagctaaagtaaaggtttcataaatgtgggaacttactggatgccaatagggagaatcggagacccaaaacggcggattaggcatggcggtagaaggcggaggtaagtgtttgggccacacatgcggcataatggactgatcaaccgtgggatgtccccacacatgcaggggcctaaaatgatggtggtggacaggtggcggtgcaacagccacgggtggtggtggtggaaacccgagagtgggtgccggtgcaagccatccatttttagtccgaccattaagattagcaccggtgtctactccatagatatgccttttgcgtgtccaattagccgcttcggcctcacgagctagcaaatgtttccgatgagacctatatttctagtataccaaataacagcaacatgttaatttggatggttaatattagagaatgaaattgaaaagaaatatactaacttggaggtgactagcaacgttgtgacgagtgagacaatggactcccataagctccagaattcgagaaggaacagctttgtccactcctaactgttccactgcctccacgaatctcctgtgtagctctggtgtccaatccaccttcacacacatcccaacatatatataaccaccatcttcattattttttcaatactttttcacatactatataaaattcacaattagcagctgactattttacataatttgaaagaaaaaaagtcttatagagatgcacgtgatgtctttacacgagtcttgtaaacatgactgaaatatgaaaaatttagaagatttagcaagaaaatgaattctaaacgaataatccacttttaaaaaaaatacgaatccattatagacctgttcatttaatcgagtctagctagggtttttattcatataagactaatgttttatatatagatgatatgattaaaatcattaccttcacctttctcttcccttcgttgttactgatccgattgttcttggaagaagctgaagaggaatacttccttttccggtcactgtcaccgtcataagtcaccgtctccgccgcaacatcgtctcttttgcttacgacttcttcacctttccccgaactacccttagtagtctccccttgactatcagtcttatccgacgtcgtagtaatcgttgaagaagcgttcatgtgattggagaaatccccggataagatctcagggtcgatctccaagtcaggaagcacatctccggccacaccgaatatatcgtcgaagtcaatgatgtcaagaagatcaccgtggtcagcgaaatccggaaactcctcctcctcctccgggtttataatcgtgaatccacacgacgtatcaagaaactctgacgctccgtcgcaaccatctcttgtcgccggagacagagctaacatcgatcaatcttcacttgtagatccaaatataatcgtagatagaggtttatgtatgttgtagataggctagacttaattagaatagagagcaagacatgttttgatatccaaagtaagtctctttcttctcccttaaaggcaaatataattcattttcatttatatgctatatatagagagagacagaaagaaatccatcacaaaaatatatatatatatatatactagataaggcccgcctattgaggcgggtgtacccgaaattttcaaatactcgaacagatctaaacttcaaaacccaaaaaactcgaacctgaacccgaatacgtatccaaacatatttcaaatataaatatatattagttatatttatacttatatatagaaaatattaggattttttggatattttaattattttgtgtatttttagatatattcaagcaaaactactcgtgttgttttgggaatttttgaaattttcaagtaatttaatagatttgcacacaaaatttgatatttcaatatataaataaactcaaacccacccaaaccgaacccgacccgaaatcttaaattacccgaacgggtcctaaacttctaaacccgaaaacccgaacccaaaatacccgacccgaatacccaaacgcctagggctaataattaataaaaaaaagaaatccacaaaatatttagaaaccaaacattgttgaaaatatattttctatatatgccgtaatctcgtaagttaattttacatcatgcaaattaatattaaatgagttaaaattaataaatgaaaataattgaaaagttaaatcctataagataagctatttttctcaaaatgttctattttcacttatgattacatgagttaaagacaaatttgttaattttccttttgttgaataaatgttaattgtttataaatatatagacatataaattagtatatgtaaatttgtttactttttaagattttctatttaattttagagaataaaaaagttaaattttgaatgatacatgtaaacatctgatcgtttgacttgacacgtgacacaatcttatgagttagcaactttaaaaaccatactttatataataagatatatatatatatatatgcctagttctaaatgtggtaaataaaacataaatttttttttttttactgtttagataaacataaaatatcgacaacaagctcaaacatatatttaggcaactcttttagcgaatctttttccctgttttgttggtaacacaaaaatttaagtgaagttgttgccaaactggatcagagccacaactttaaagttcaatatctgattgtcgcatttgtccctttaccgttttggtatcttggttttggtctgtcccaacattattgatcaatcggatggcatttcaacggttctatgtcactatgtaaaaggtctatgctggtcaacttacatgtagatggatgtaaataatcaatccatctaccgtatcacataccccttatatattgacgtgaatgaggctcgcaaattaagctgtggaagatgctcttataaaaaaggacagaattgtctcattaggtataagtggacatgcacgtcctatgggtcctcaagagctacaataattgttgttgctcgtttccacatcacattttttgaatcgaattc

SEQ ID NO: 257 - DNA, 129667 bp, Arabidopsis thaliana
gaattccattaatttcctaaaagatgcatgttgtgaatatgtgaaggtacgtaattaaccaatatctattctatgagagataatattttttgtcatttcattgacgaaagcatataagtaactgcttaaggcaaaccaatacaaacaagtagacaaccacaaaataaaaacaaatattcttctatattagatcatgtggtctcaaaaacagacatcttttgtttgttaatgcctatattaatattcatgttctcattcaaatgcattgactcaaaacaaagatatttatccaagaacaatttttttctttttttttaacaacatacaagaacaatttaatttcaagtctactgtctttttccaagtgaacgttgtttctttctttagatttttcaagaataatttaagaataataatattttttttctgtgctgcttattttgtttattatttaaaaggtgataacctcttcatgacctcattgaggtgcttttgtgatgctaatattatgtgagaaactaagaatctcaaaatttatcatttatacatatctaataaataatcatgatggtgattcatgatatgctccacaatcattataacaaaatagttgaatttagaagtcacttgttgcatcttttcatatacatatagacatatttattatttatgaccctatcatcatatctcataatgggtttgtcttttcaataatcataattctatgaaacaaaaatagcattgttagaaataatgacaaatgagcatgcatgagtctttgtagctttttttatttatttatcaaattctttgcaaatatttgctgggcaacaatattaaagaaaaaagaattacttaatgaaacacacatatttctgattaaattcttgtatttagttaagaacccacgttgaaataaacaatttacaaaatcaactaatctcgaatggatttactaattggtatttttttttttccaagagtaactgatctcaaattactgatctcaaattactttaataactagattttaacccgcggtacaccgcggagacagttcatttttaaaaattaatatatataaaaatttgtaaataattttatagtttaccattgttactaagtaacgtcctgccaaacccgtcctgccaaacccgtccacaaacaaaaactatttattttattaatgttgatcttatttataatatgtttatgaatcattgtcaaaatattttagtcgttgcgggacgttgaacccacacatttttcgccaattggttaatatatgttcattcttaaaatttcgaatcacaaaatatgacgaaattttttttgagatttttttaaactttatatattatataatgatgttaattatttttgatagattaaactttttataaattcaaatattaataatgttttatgaagtttaaatatacaaataataatatttaaaaaattaatattttttgccttttaggtaaatgatataataactctaaaagcaaaaatttagaagatttaaatctttaaataaatattttcatgcctaaataattaatgtcagtagcatgacattgtaaataagttcaaatacatgatttgtttatttaaacaaaaaacatttagtaagaacaatatttatttaaacaaaaaattttgttttaaaattttgttaataaaatacgtttatgctaattttaagggattgatgtgaagtttgtttggattaaatttgattgataatgtgattgacaatttaaattaaaaatttaaagtaaaattaattattttggaaaaaagatttaatgctaatggcattaggttgtaaataagtccaactttaagatttatttgctaaaatggctgcaaaaatgtatatatagattgattctataatatatacctaaatattttagagcattagtaagcaagtgtttcttcataataaaatactataaaaaacatggctataatttcacaagtaataataatgggaattgtaattaagtaaaacgaggctaagcattcagtattagagaacagtattagagaaaatgcctaaggcacgctttcttctctgtgtttctactcaaagttattaatggctaagagattgtgagacaatttcaaattaactctcttattttttctgctctctttgtctccttcatcataactacatttaatattcttacccatatttatttactgcaaaatttattcacaaagttgagtagtaattatttatagctgaaaagaagaaaaaagctgagtattaattttggttagaatttttttttgtgtgtagacaaaggaaaagactgtcttaagcagtagatacgaaaatactttattagttatgttggtctgaaactgattagacctggtcaaaccaaaagctcctttttaatcaatcttttgaaaaatattgcctcctgagccacgccttttaccactacttaccataataaagacagagaacaacatatgtgtatgttccatcataatttagattcccatttgtttgtttgtcatcaaccacaatcattttcagtttcccctgtgtcctcttttttaccagacaaatctcagagaagattaatctacaagcatttgtctctatatgcccctattttatgtgtatatatattgttatttttcatagttatttgaataataccttgtgaaattaaatggccgaagtccatacataaacgcatatgatataatgtttaggccgaagaaagcccaaaagtataaataattaacagcccatatagttaagacactcgtcgagctcgtgtccttattattagaaaggaaacctctcacaacatcaatttcattgcaacgtcacaacatcactttcaagtttcaagtgccgatttagttttcctttggcctgaacttgcaagcaatcttgaggtcttccgggggtttgtccccggcgaatccagcgtcaacccaagccgagtagcctccccccatgttagccacatggtcgtacccctacgacatgacatgtatttttgaataggtatacttattaattgtgtgtatgtgtgtgtatatatagacgcacctcgttaagaagatcaacgcaagcacgacttcctcttcctccagcgttacaagccttcacggtaacatagttagactatttagtataaaggaaatggtctaactaaaatctaaatctaatgtatgaaaatacatgtcatcactaattaaatattagagtctaaccacgatcaaatgttcatctttcttgcaaaccgatgccacttgagaaaggaaatcaggatttataaccctacctacaaaaccattcacaatacataattctaagtgttatttgtgatcaaaatatttaaaatgaaactcttgcttaaaattttaaaccaccttcatctgttttgaacatataaggaatgttcaaagcctcctcaacatgactcttggcaaattcttcatttgtccttcaattaccgacaaaaataataagatttcttacaaaaaagaagaagaacttaaatgatatatttttctttatacttaccttacgtcgagatatcggtgaccagtactaagaaagcctttagctgtataaacatcaacggtctcaacatcttcaacgctgtagaaacaaatcgacaatagaaccttcatatatacggaattgttaataaaaatcaataaaaataaaagttttttcttgactcacgtctttggttttgtttcctccatgagaaagccttcggtgtgatctgtttttcttttctttctggtttgtcttctgcaatgagaaaggttgaggagagaatatgtatacatacaacttacaattattcaacttgatcatgtgtatttattattaacttaatcgaggtgaaatattatagaaattaatatagaagttgaccaactattattttattattttgtaatgatcgtgaaagttgaagctagagaaagatgatttaagaacaaatctcaaatcagtttattagttttaaacaaattggtaaccataagaaagtactagaccacaactataaaattattaatgtcaagaagaaagcgggtctcacgatttatatatgcatttcaaaagtcgcaatatttcaggataagaatccaagaacaagttttccaaggaatagtggcttttgcaaggagaaacaactagcccaacacatgaatactaatgtagttgagttgataacacatgaatacacatgaatatgcgttgatctcgatcatatattatcaatagcaagtaatcaacttacaacttacaattatacaacttgatcatgtgtatttattaacttaatcgagttgagatattatataaattaatatagaagttgaccaactattattttattattttgtaatgatcgtgaaacttgaagctagagaaagttgatttaagaaaaaatctcaaatcagagggtcgaccctgagattttagaggccacacaccgactcctgacgaaccggctccttgacgaaccggctccttgacgaaccggctccctgacaaaccagctccctgacgaaccgcctcctgacgaaccagctccctgacgaaccgcctcctgacgaaccagctccctgacgaaccagctccctgacgaaccagcttcctaacgaaccgactccttgacgaaccgcctcctgacaaaccaagcttgtgacaatctacaccgaataaatggtctagccgaaccaagctctccatgccatgttaatctcttcgaaagactccctcaccattacgtgacaagtcaagactccctcgtcgtgatgagccaacattctcaccattactagccaacgtcttttcctctagctaaaccatcccgcacaacaaagtcgtctcgcaaagtataatcatcaagtaaaacatagccatcccgccaagtagagccatatctccaaacgaagtcgtatcgccaaaccctttactgcaagcggatccatcgctaaacaacttagctcctcgtctaactgtcgacgtcatcacttaactgcttggctccaaagcgcatagttccaaactacaagctttcacctatgtaacatgaactacgaacggcttgatcccttcaaagggtacgtaggcagcctctaccgaggcgcatctataaaataaataaacttttgtctgtcaaaagcacgaccgagttctcgagtattcaaaggaagaaattgtttaccctaaaaccctttaattacttattgttacaacctcagtacaaacactatcctggaagaggtgctaaacactttcacgtgcattttctcatggattggaggctcctccagcataaaggagaactcctcattccactttgggtctttgttcttctttacatgctttgtttttctctcctcccctttgaagtagatgtgcacgtaaggattggtatggtgctttccttcaacatcctcagccgaatgcactattaccacaaacattcctccagcagccggtgtgccttctggagctttctgaaccgcttgcatttcttccttcgtgaatgacttatacaagagttcaacttccagcttccccctacaagctgccgttcttgaccaccgtccaaagtcttacgtagttccaaagtgaatgctttatgttcgtcaagcaccatttctttcagatagagtttcgtatgtccgagaattttgaagtaaacaaacctaaccatgttatcacctagattgagatctataccttatttattgaatcatgacatcaggagaaacccccgatgacctaacgcttctcttatagtttatttaaaacttaaatcaataactcaattaaattatatgcaataaaataatatattcgatagacttataaaatctctaaatgagttaccgactgtcacgtcatcgatacacggaagagttatgttgtaggagatttttcagattgtggtttgacctatgctatatttatttgacatggaggtttatcttgcaaaaacaaaattacattgaaggtttttttgcacaaattcttatgttttctaatagagttatcgagtgccacgtcatcgatacacgtaaggattgtattgcaggtgattttagagatggtgaagttgacttgcataattctggaaaatagtcatatcacattcgcttctcttcccactggaggaaatgatctcaaacgcatccgcttcaggtattttaactactcaaaacaatctctatatcttcatgacattcaaagctggaacatgagataaaaactaaccattacttgtgtcttgttttgaaagccgagagatgtacaataagtggcaagctcaacggcggtggggtgagaactatgacaagatcgttgagctttacaatgtacagagatttaaccgccaagctctccaaacgcctgcaagatccgacgatcaggtaaaagacatatatcctagatcctttggtctttcttcagacaagaaccttgtgaatcttgtcctttgatccaaagaaggtaacacaagtttatttttcagtcacagagagattcaacatactcaaagatggattcagcaagagaaagcaaagactggactccaagacacaacttcagacctccaggatctgtcccgcatcacttttatggcggctctagcaactatggaccaggaagttatcatggaggaccaccgatggatgcagcaagaaccacaacttcttccagagatgatccaccttccatgagcaatgctagtgaaatgcaagctgagtggattgaagaggactagcccggtgtttacattactatcagacaattatcagatgtacgtcgagtcagattcaggtataacaaaacatcttaaactaagcattggctaatcatatacattttgaaagttgataatcataccgtgactaacaggaatctatgattttgtggtttaatcaacagccgggaacagtttggggaagtgcatgttaagacatggtgggagcagaacagagagagaatacaaacacagtacctctaaaaagaaacattatgagcttctctaccacaatctttaattaattaattaatctcattcacataacaacacaactatatacattttgcttatcttttgttcatcttaattagcttaacatcttatacataaatcaagtgttctgaagtatcatctctaatcaaagctgattacatataagtataattatcgttaaatgctctacacgttttcaagtaatgtaaaccatgtcttgtttttgtgacacaaagataaagaagtcaactatgaacctaactattctttaattctagctagatctttctcctctttgggggtttaaaaatatcaaatgttagttcttttatgatcaacatgtggtatagaatataaaaagtcaactttattatttgcttataaggaatacaaagtagagttgaccatttgaggttttagatgagcaaaccataaacatgtttggagaaagagtcatcatagttccatcaatggctgagatctctgatattactactcagactcaaaccgttgtctcggacatcgaaaacgatcgatcaattgatgattcccagtcgtcggttttatctggtcctcttgtgtccgtatcattcgttcaaaaggtgagacacatcttttatgttgccacatggtttcttaattttttcttgaaatatttgtttgtcgaatcaagattttatattccgtgtgatgttgctatatgcgatctcaatcttgactttggctctaattattggtgattgattttccagtttatgaagtatagtaatcaaaccgaacaaacatctatttcgaatccgtttggtacaagtttgtttctataacagtaaatttaaacacgtaatatttttactcgttgacgtttgcaaaaattaaatcctttatttttaccattcataaaaattattaaagtttatgttttcatgttttccctatagaagttgacttttttttttttgtctaaactctatagttgattggcgagttcgtggggacattctctatgatatttgccggctgctcagccatcgtggtaaatgagacgtacggtaaaccggtgacacttcccggtatagctttggtatggggactagtcgtaacggttatgatctactcaattggtcatgtctccggtgcacatttcaaccctgctgtttctattgcctttgcctcttctaagaagttcccttttaatcaggtgaaccaaagatatctacaattgtaaaaaaatacctcatactatctttataaggttatttcatgatttcgaccatattcataactataagcagacaaaatatgtttttccactagttatttgttaaatcaagtttttctcgaccactttggttaaaacataagctaacaatgttttattttcaaggccaatttcgggagcatctatgaatccagcaagaagcttagggcctgcacttatatggggatgttataaggatttatggttatacatagtttcacccggagcattatcaggtgcatggacttatggtttgttacgatcgacaacgaaatcatatagtgagattatacgtccaatttgcaataaagtatcttcgagagatcgccaagaagcttcccaagatgagatttgtgttttacgagtggttgatccggctaatcaaaactattttatatgttcatcacctaccgatatcaatggcaaatgtaatgttacatgtaagttggcgtgaattatatcgatgtactactcaccacactagttcaatatccatgtattttgttttctcgtttcatattactgtgtatatttttattttatatgcgataagtgataaaaagcttatatacagtattaacacgaaatgttttctcatgctcaactttatatagtaatacaataataaaaaaagaaatctatttttgaatgccagccaccacacgatgttaatcgaggaaaagagtaatactaactaccaatgtgcttaagtacatgccagttttaagtgtcgtgggcttatgaacctcaccaacaaagtggaacccttgtacggtagacaggtttgcgacatcgtctacaaactttgtcagtttcgccactttgaatatagtttcttttgttccaaatgttccgatgcacaagaaacattttaataacgaaaagaagagaaaaataataatcatttcttagaatatttgtgagagttaatgtttgtgagtgtgtgagtgaatgtgaatccacatttatacgtatatccgattactgaaaacgcaacacaacctttctatcttttcatggttattttgttaaaacgtatgataagaatgtaacgttgttacatgtaagttggcatgaaagatagatgtaccattggcaatacactagttcaatactaaagtatttgttttccggtttttatttcagtaaaacctctataaattaataaagttggaactaagaaattttattaatttatagagatattattaactatagacagattgtattaatattataatttcttaagaaaatatttatgaaaacagttttttaataatcaatatctttctaaattcaattaaaataaaaagcaattatttagtttaaaaaagggaattttgcaaaataaccctctaagtcaattttatttgcaattttaccctctaaatccgaattatgcaaagtgcaaactcaacctcaccataggaaagaaaagtcaaagagacacaacacaatacaaagtttataaatacatgaaaccaaatatctctttgtttgttctcgaatcgaatcagaaatcaaaaggcagtttgccagtcaagctcgatttggatctttccattcttagaatcaataaggtgaaacttctgattcatccttttgttgttcaccacgtccaccaccggaatatccacgtaccctagtgtttcctgtccatcaacaaccacttttagattagacaactacaaaacacttattagtgttactgtgagtgaaacaagtgtgttaccttgggatgcaatagacctatcctagaagaggtgctaaacacttccacgtgcaatttctcatggactggaggctcctcgagcataaaggagaactcctcattccactttgggtctttgttcttcttcacattctttgtttttctctcctcccctttgaagtagatgtgcacataaggattggtatgatgctttccttcaacatcctcagccgaatgcactattaccacaagcattcctccagcaaccggtgtgccttctggagctttctgaaccgcttgcatttcttcctccgtgaatggcttatacaagagttcaacctccagcttccccctatacttgccaggctgcccttcttcaccaccgtccagagtcttacgcagttccaaggtgaatgctttacgttcatcaggcgccaattctttcaaagctaatacattcatacccatcttatcgtgcttcccaatctgcgttgcaaaaaaaaaaaaaatacatatatatcctactccatgtcacttgtcacccctttggatagctttttaccttttcccagccatacacattgaattctagaacctgagtcttgggatctctgaccgagaatttgaattcctcattccattcagggttcaaattcttgtgtttaacagttgtcttcttagatgaaattttatcttcagagagctcgatttgcacgtatggatttatcatgcccatctgaacttttttcctttgaaccacagccttcacaactttcacatggaggattccaacatgccttcttaatgctctacagattaaaaattaagatttgctttatattattgaatttaagacatggattaactattcaaaagataaaggcatttacatgttcacaacttgatccttgatttgctcctgaaacaattaacgcaacaatgaaactacaaatgaatatttgatccagcagaaatgtaaaaacaaaaagacaaaacaactttcatatatattggtccaaatacatatatattggtcaaccaagaagtcagagtttcatttgccattcagccttaaaagattgaaaaaaatcctcttcatcaaactagactaagaacttttcgataacatcctacccattattagatctactaatcatctattttttgagaatatcgtaagtctgaatttttatctatctgatttacaacttgatattttcttctttcttgtcttttaattgataatctattggtttagtttaattcgaaaacttagtttattgtgtgatctgagagctttgtggaattcgaccctaaagtaatacaatcgatctcttatttgagagagtggtcttaggattaatttgatcatacatcaaatcagcgcacctatcacccctcgaaacacatacacatccccacactcttcacctgcaccaatcatcatcttcatagcacagcgttcacaacaaaccctacagcctcatgcgttacttctttgtttcctctcatcgtttgtcgccactattcccaaactattctatgataaccttgtgacaacttaggaagaggctctatgcttgtgatcgtacaacataccataccaaatcgggatgcatccaagccatttaggaacgtgtttgtgcgttcttgttgcgatcttcttccaattgtgaagccaactctccgcagctacatgttcgtatcattttataaatcgccaattcatcccacatcttctttagcctaccatagtatgtcatcaccgtgtctccattctgtctacaatttgcgatatcagctcgaagctcactgattcacggttcattcccaggcgagaacgtcagctttaagtcatcccacaacacttgggcttcctccacccttgatatcgaagtgcgtactgtgggctcgaatgtattcattatccatgcaactagcattgtattcacaacctcctactgttccatatcatcttccttggtaggtttctccaaggttccatcaatgaatcccaatttttgtttagttcgtgaggcgttccgcacatgctttgcccaatcttcatagttttcacccttcagttgaacattagttatcaaattctctggtccatcagaagaatggagataaagtggggaagccatggctttttctgccatcgtgaggccagtcccaccgtcgccttccacagctttattacccggttatcgtcaaatctttgttaccaccgtcgtcgtcgtccacatgatctcttatctctccctttattttgtttccgtttcttaaaaccctagctctgataccacgtcagagggtaaagagaatatgtctattgtcttattgagaaaccctaactaccctactttaaagatattaacatattagactagaaattattatttatttacttatagtccctaacatgacatacttatatttttgaataggtatacttattaattgtgtaagtgtgtgtgtatatatagactcacctcattgagaagttcaacgcaagcacgacttcctccagcgttacaagccttcacggtaacatatttagtataaggaaacggtctgtgtaaaatcttaatctaatgtgatttaatatatgtcatcactaattaaatattagagtctaaccacgatcaaatgtttatctttcttgcaaaccgatgccacttgagaaaggaaatcaggatttataaccctacctacaaaaccattcacaattgtttgttagttttatttgtgatcgaatgttgaaatgaaactcttgctaaatttaaaattaccctcatctgttttgaacgtaccaggaatgttcaaagcctcctcaacatgactcttggcaaattcttcatttgtcctacaattaacgacaaaaaaaaaagtaaggtaaatgataactctgtagaaacaaatcgacaataaaaccctaatatacatatacttgaacacatacatacggaattgttcataaagaagattagaaattgttttacttgactcacctctttggttttgtttcctccatgggaaagccttcggtttgatcttcttttttctggttcgtcgtcttctgctatgataaaggttgaacttgaagagaagatatatataaaacatacaacttataattgttcaacttgatcatgtatttgttttaatcaatttgaagttgtataaaaagattaacatataaggtgaccaactattattttattacttttaccaaaaaaaaaaaaaactattattttattattttgaattgatcgtgaaacttgaaccaagagaaaagtagatttaagaaaatatcaactcagtttattagttagttttatacaaattgttaaccataacaaagtactagctgaccacaaactataaaattgttatgtcaagaagcaggtctcgcgatttattagggcatatatgcattttaaaagtcgcaatatttcagcttcagaatgcaagaacaagttttccatttgttctcttcaaaaacagaacaatggaagcaagaaattcggtttcgaatatgcattgatcttcgatcatatatgatagatactgttagtttgccaaataaaaaatatgattatactgttcaatagtaatttgagaaaatcttctcactaaaaaaatgagatgtggaaactgagagtcactcacactaccgaatttcatagaaaagagaagtcgaagacacacaaatccaaataaaagaaggctctgcaaatctgaatgttggtttttaagagttaaagcccattttgtacaacaacacatagtttttaacaacatcaaaccaattatctctttgtttgttctcgaatcaactcagaaatcaagaggcagttcgccactcgagctcgatttggatctttccgttcttagaatcaataaggtgaaacttctgattcatccttttgttgttcaccacgtccaccactggaatatccacataccccagtgtttcctgtccatcaacaaccacttctagattagaccaacacaaaacacttgctagtgttagttactctgagcgaaacgagtgtgttaccttgggatgcaatagacctatcctggaagaggtgctcagcacttcaacgtgcagcttctcacggactggaggctcctcgagcataaaggtgaactcctcattccaccttgggtctctgttcttcttcacgtgctttgtttttctctcttctcctttgaaatagatgcgcacgtaaggattggtatggtgctttccttcaacatcctcagccgaatgcactattaccacaagcattcctccagcagccggtgtgccttctggagctttctgcacggcttgcgtttcttcaaagcctttgggcatttcttcctccgtgaatggcttatacaagagttcaacctccagcttccccctatacttgtcaggaggctgcccatcttcaccgccgtccagagtcttacgcagttccaaggtgaatgctttatgttcgtcaggcaccatttctttcagagctaatacattcatacccatcttctcgggattcccaacctgcgttataaaaacaaatattacatatatacccactccaaggcaccagtcacccttttgatagctttttacctgttcccagtcatacacactgaactctagaacctgagtctggggatctctgaccgagaatttgaactcctcattccattcaggattcaaattcttgtgtttaactgttgtcttcttagaaggaatcttatcttcagagagcttgattttcacgaatggatctgccccgcccatcagatcttttttcctcagccccacagccctcacaactttcacatggacaattccaacaggccttctgaacgccctgcagtttaaaaattaagatttgctcagcataattaaatttaagacatggattgactattcaaaagataaaggcagaatggcatactttgcagggtcaaggattggaactacaagggtcttaggccagagatacatgttcgcaacttgatccttgatttgctcctgaaacaattaacgcagcaatggaactacaaatgaatatttgatccagcagaaacgtaaaagcaaaaagaccaaacaactttcaccaaataagagatttaatgtccaaatacatatgtattggccaaacgaaatgtcacagtttcatctgcccttcagccttaacagattgaaacaaatactcttcataaaactagactaaatagaatgagtagcccatataatgatcaatcatacctctccctcataaaaaaattcttactcatacaagtcagggatttgaatgatgtatgtaagagaaagatatcaacctgaacaaatctgtagaggccagggattgacataagatctgctccaccaagcttcagtccaaaatcaacatgtggctgccatagtagcaaggatcagtcaaaaacacaaaatctctaccaaagatctgataatgaggctgactactacacaaattgaccttataatgaaaaaggttataccacataccttctccataagagacacatagatattggcaaaacaagggaaacttggaactaatggcttgagagtgatacgaggctgagcaaaaacttgcagatcgaccacctgacaaaaattccttggtaagtgagggacaatcatgactgataatattaagtaggtcgttccttctttaaggttgactaagcacttggcagcataattacctgaactgttgccttcaacccaaatgccttgatggcaaccaagatattgggatttgcggcccatttcaagcatggttccataatcaactctttctcatccgtgagataaactttcatccctgcaaagagaagaataatcgtcgtaagtcctggaatcaattcataatcatctttcgcatttcaccaccatccatcctccagttcttagttccattatgcaaacaggacattcaaggagatattaaagatgagaagaaaggattatccgaccttgaaatgtagggggtaaagagcctagagtaagtgtttcaaattcaacagagtcaatcttgtactttggtatctgctcctcaatgatcggttttgctatattctttgcagtcttacatatggcctacatggatagttggagagaccaaaattcaaaatttagcaaatgaaggtaagagaaagtgaagtatcacaagaacatcagtccaggtatgtaaccttgtcgagataaggccacatgtactcgagaaatctgtttatccagtcaacctaattcacaagaagatagaaagacaaagatcagagcctgagacaacaaaaaaaaaacttgtaatatcaagagtagggggaagaatcacatacacgatcgaaatccggatttttgacccatagaggtatctctggaagcatccgtagcatagctttgggatcttggtcagctattgaacgaatttcaggatcctataagagcgaaagggtcacaaacttgaactgtaaaatgactgtatcaccacataacactgtttgggaaattcctattctgggatgcataactaatttagacacatacaccaatacagccaagaagagttcaagtaaacatgtcaagcctagagaaatgttgttgcaagtgagcaataagtttaattccatttgctaatcctaatgtagtttatgaacgatcaagcgtggacataggattgaaccacaaatctcagtgaaaaaaacgaaccttgacgtcgttggggagcaagtagacgaagagaacgtaaccaataacaagtcccaatgaaatcccaactccaaatccacaaaatcctagtatcgtactgaaaaagcccattttgatttccgtttcagatccaacaaattctactcagcaaccaaaacaaaaaccctagaagctttctcctaaacacagatcaagacggacacagttcagcggcgtcggaagcgatctgaggtcagagattagtggagattggactaatcgaaaagagagattaaggaacattgactgagatccatggacgtggaaatcggagaagataaacagatgtcgtgagaatcgtgaagcccagaaggcaagcaaactttgtgtgcgcttcgctgctaaagacacggaccaatttattttattgttctttttttgtcttttacttttaaaaataaaaaatatcagcaatttaatttaatttttttaatttttattctctcttcgaataataacattgctttctgatgatactataataaattaattaatgaaaatcttattcctttttcataactttctacatacatcaatattgaaatttacgtatatgttttcaaagaaaattagtattttgtttacgaaaacatatataattgttcatttgttctaaaaactatatttgggcacatttggataattattgaaagagaagggtaagtatcttatattgggccatcgcatgttgataagaagcccatgattaagacaggtggcacactttaagtggatgttggtggcaattagggccctgtggttgttgatggaccacgtaagacatctgactattttatttactctctctcgttaagagacaaaaaaaaatgccatgccgacactatcgtcactcaaatttccggtttatttcaccatcctgatctttctcacgaaccggtaaaaccgggtggtatgaaacattatttattaacaacgaaacggcgtcgcttatgcgtttcggcgggcaacgaaattcagtctcccgcccacgagatgttgttttgtgttcttgtgcatcgctattggatcgtgaaattgaaaaatggaaaacgaccaagaggatcttgaattgcttctgtctcttgacgatagggttctcgaaactcctcctggttctccttctgctgcacccggtgagtttctctctcacttttgtagggttttgttttttgctttcttaaatccagtgtgcgattccgatttgcatctctgattcgatcaatcacttgcgtaatagatcttatgattcgaatattgatctgggggcgtcttgtttccatctaattcgctcaagaatctgtaaagtttgatgcttttctctcagttggattgttcttgtccttaatgcgaggtaacgtttgtgcaggatatctcacggatgatgaatcccccaagcgtaggggtcactctgacttgtctgacttcagaagtgttgttcaagattgcattgactataatcctaaaccaatcgccaaaaacactaaacccaaaggctccaacaactccaataccaatgacattgagaagttttctggcttgcgcattaggtaaagctaaacccttttcactctagcaatgtgagtcacagctactatagtcgtagattgttttttcagttccaatctatagctgaaatagccaatcttttgatgtatttgtaggaatcaattacttagccctgcagagataagtgatctgttttcagatatccgtttcgttcgattgccaacaataaagtaagttgttcacttcttagatagataaacattacttactactcttgggaagcagaagagatttaaaacaagtttctgtgtaggaacttgctaatgggtgacaaactctctggctgctgggcgacaatgggagtgataacagagaaaggacaacccaaaacaagctccattgggcaggcttatggtatatggaagatcggtagcttaaatgaaaacaatgtctccttgttcttgtttggtgatgcttacaaaaagaatgagacagaaaaggcaggaacggttttcggtctgtttaattgctcacttcgcaaggacaatggggtaagtatatagcatcagcttttccagtagccggatggcttaactaaatcttctttttaaaaaatttatgtttgtggcagggacgtgagttctcattgagtgtcaactctgctaaacaaatggttaaactgggggtttcagctgattatggagtctgcacagcaaagcggaaagatggaacaacttgtacatctgttgtaaacaagtaagtttaccttagcgatgcatctctctttgtattgtttcctgaatgttgagttacaactttgaatttggtttcaggcgccaaggagcattctgcaagattcataaactggtacattttggtaatactttggtcttgttttctggcgtcaatgcaatgaaccatgtttttcactaactatgaatttttcacagaatgcatcagacaaatttgctacaatgagaactgaactcaaaggagggtatgctaatcctacctagtcgtgttcataggttggtcataccacgagttggaaattttcatgattcttgggatgtttttctatttcaggaacttgagaacagcgttcagagatctaaaatcgcaagggatttacacagttgagccaccagcagatagaagcggaaacaaaaagaccactcagcctgttcgagtgctatcagtggaaggtctccgaaaggctctaaggttggaaactctcaacaagttttttacttttaacataacgaacagaacccgcttctcagattctaaagccaattgtgattatgcagtggcgcggataaagtgacccctaatgtacactcacaaggaatacgtttcttgaacgagatggccagtatgcttcttctttctcatttgacacaatacaaataaagcttataaggtgaaatgtgtgactgatcttgaaattacaggacaaaaggcatcaaagaacgtaaacaagaaatctgaagctgtgaataagtcgacagagaagaggtaccatcttcctgagttgttactttttttagttgtactgatgtataaaagttatctcaaaggagatgttctggaatctcctcttcaggaaagcatcaacgaaagaaacacaagtaaatggtgagccaaagagaaagaaaacagagcacaggaaggaaactcccgagatttccaccggaaaaatgatgctcctagatttctgcagctctgacgaagaatgactcctcaatagacagacattgtcaaacaggtactcaggccttaagatttgggccaaatgtgatgttatatgaaaccatagaaaccggtttttttgtggcttttgccggtttattcaatattgagatagattttgtggttctcaagattagtcttgaaaccggcaaaacaaatatccgtcatgcaaaaaaccttccatttcaaccaaaatatatagatggacacatttatttaatgcatcaagcagtaccatatatatatttcctcacagttgagaacctataactcaatagtagcattgttaactgcaacatgtttattctctaatcatctgaacagtagtgttgttggaactgcattccttgcaggcataaccaaattgcaccataccaaaaaactctcccattcctatatcaaataacacatggttataggtaagttaacttaattggagacgagataaacaatgatcaaaacaaaaacaagcaacaattaacaaaaccagggttatccaaggagaatatagttttcaaatcaacaaaataaaaactgcaagaaaggtagacacaatagagtctaataaataaactagatatgatcgagatacatgtgacggagggtagtaatatagtcgaagttgtcctcctcccattgctcgatccctgcctccaccaactccaccgtcgcacttgagagctcctctgcggtaatctccgcctcaaacgccagttgttgcacttgctccctcagctcggtaaatccctcaacgtcctcgcctcttatcacccgtctattgttttggttgataaggtaggtttcgtgggtcttggcttctttgatggtttcttggacggcaaggtaggtctcgcggagttgatcggccacagatttaacatctttgtttagatcttgtctcgaagctttgatatcctcgtcgactttagatctcaactcatctcggagctcttgccatatctcgtcaacattgtggcgcatgttgtccctcagagttccaagttgtgagcagatcataccatctaattccgtcattgtcttcttcccatctttgctcaactcatcaagaaattctccccactcttttctttgagtttcaagaactgagtggattatgttctgcataactgtcaccctcttcttcccatcttccactaactccttcatcttctccacttgctcgcgcacttcaccttcagagaccgcatacattagcataaaacaagaaatgatagaaaaacaatagctagaccgatttatataattaccgggagtctcatcactcttagattgaggtggaggaggaggtggtacgacttgatgagatctaaggaaatgctcgaacatgtaaatcgagtggatcacaacggagaggaaaacggtgagacgccagaggaaggtaagctcaaagcctcgatccaatagtttataatactcataggctaagtaaaacgtagagcggtccaatataaacagccagatttttccaataccctaatcagacagattaacatgtttaagtagttaggttcttgttttaatacatacaacatctgagaagagatatacttactgatggtccaactgaagagagactagtgcaaaagaagaagaatggtaatgcgaaaagagtagtggcgagaatgatagggatgataagatctaagaggtatgttgggaagatgacaagtagaaacagaaacaaacgttctgtccaaaacaatccatttgcttctagtctcctctttttttcttcttcttcaaccttattcatcttcttcttcttcttaatactttgtttgctcttgctatgtttgtgggtttataaaatttataagctggacgattttataagaatcctacctaactctaatcctataaagttgggattttatttgatattaagacttgagtttttttagaaacgaaaatttgataatacataaaacttttccaaagcaaaccgttcacaaacgcttattttgcgggtaacaagatgaacaaaagaatattcagactaattggttggttacaagatgccttgaagaaggggtttcccttgaaacttgtcgaccttggagctcagaaatgtgaagcttttgtggagacgagctcttttcatatcaagatcccctaacttcgcagccatctccgtcattttagctctccactcctttatcttcttctccttctctcccagttctttcacctgtttctcagtttcttgtttcgcaagtaacacatctctctcccacacctctttctccactacgctcatcttgtgttcatcgtagtgttttaccgcctctacgatctcctccaggacaggcttgagccaacctgctttgattttcacggactcaatgtctttaacaatcgctaccatttccaccacgcggctctccttgagatacttcaggggagttgtttggagttcgaataccaccgaggcaagcatgtcgaggtagtaggatcgtgtagcaagcgattgtagtttggaaccagacgcaatgtcaccgtgcttctggagtatgtgttgtagagtggtcgagacgctagctctgaccttgtactgtcccacagaaacgtaagactcagatagaatagactgcatcacgtcccttatttcattattggtaattattcctttcatacgagagatctcagcgagactgaagctctgtgattcatctggcagctccggtggctcgttgtttgctttatgctgttcctcttgttcgctgcttccagatttcgatgtggtttcagcgtaaattgaaacagtgtgttcgtcgtgatcatccacaaatgaaaatttatcgtcgtctgtgcttgcagaatcatccatttcatcacaatgttctttctgtttgttaggtgtttcatatcctcggtgattaagctgaggtaagaggcaaaaactgtcattagcatgtgtagaaatatatatatatatatatatatatatgaagatgtgaaagtagagagtagagagcagtaccgtaataagtctagagggtggcctttcttgaggtgacaaaatcagttctggaaagagtagaactgattcctcgttcttctcaatgtacactgactcagctttgctcccaagataattgtaggcatgagatgatctttgacccatttcttgtgagattttttccctgtgatcaggtgaccttcctccatagactgcagttttgggcctactttcatgtattcttggctttgtttccacagtcctcggctggtgttctggcgtcctaggcctagtttcaactgtccgaggcattttaagagcagcgttgtcaagggatctgtgggacatgggctgagtttggggaatcctagggctgggttcaggcgtcttggaccgctgttttggagtccttgaggatggttcgaagtaagtaggttgaggctctggggtcttggaccttggtccgggggatctttccatgaactcaggtgacctccctctacgttgtgcagtcctcggcctagtttctggtgtttgaggcctccttcctgttgcagcagactcatgtataggtgtcctcggcctagtgtcagggatggcagatcggtgttcaggagtcctcggcctagtttctggtgtttggggcctcctttctgttgcagcagactcatgtatgggtgtcctcggcctattatcataggtggcatatcggtgatcaggagtccttggtctagtttctggtgtttgaggccttcttcctgttgccgcagactcatgtatgggtgtccttggcctagtatcagaggtattggatcggcgttcaggagtcctcggcctagtttctagtgaaaaagcgtcctcttggtgtgcagagcggtgttgcggtgtgcgtggcctatgctgaggcgtcctaagagggtgttcaggggtcttaggctgagttccaaaaggccttggtgatacatcatcatcctcatctccacgctgatcagcctggcttaaacaaataccaacaaatgagtgagtttcagaagtcaagtgagcaagtttagctattctttgatttatgaaataatacttaccctccttgcaaagtagtctccccctgagtatagagcgagagaaggcgaaactggcagcgaatcgacattgcttgaaggctcgatcttgcgtccctgtagcggggaaaggcgacttaagaagttgccattggtgtgatcataagaggatggtgaactctctgctgacgactcaaccttcttcttggcgaaatagctggccagaggtgatctgcttccacgagccggactagctggaggagtctgatccctgctgggagttctcttaccaaaccctgacacaagacaaaaacatcagagactcttcttgatgacagaagactttgacccaataacagaatcagaagcatatttgtttcataccaaagagtttcttctccttcttgtggacatctggagagtttactctctcaaaacagatagcagtacactcatggaaaggattgcctgcgttggagcaacctggaactacttttccagacactaattccatctcacaaacttaaaacaaaactctatgataagatctcaaacctgaccattccaaaaagaaaaaaaaaagcgtcagatccattgacccagcaaaacaagtagatatcatcacacaagaagagagtcaacggtttctatatatggaaactacaataaaagattcatgttttctctttgcttaattatgtttcttctccaaagagagagacttgacaatcttccactggttttcttactaatcaataacggattgtgatgttgataaattgcaaaaactctcataatcagctaattaaaagcttttgctagataaaaaaaaaggtcaagagagaatagagattgatgatacctgtgaaaaaattataattgaggaagaagaaagaaagaagcaaagccagttgaagaaatgagatgaatgatttatctcatcttgtctgtacataagagagatagccaatgaagcttataggtgtatatataataatatcttattgggttctaacatgggttgactttgaccgcaataaaaaaatgagtcattttatagtttcagccgagacttcgtcaattggctatttctttttcttttcttttagtattttatgtatttgtcaaagttagaatggatcgaagaggtttcagtctaactaagcagaagaaaagaatcaaagattttaggagatctctaacttcattgtgttctcattactccattatcatttgcttcctcctttcttcttctttttttttttggttatatttaaatgctctatttgaatctcagttgacaaagtttaattgaaaaacatttatttttatattttatcatttcttaaattcttgggggaatttttaacaacaaaaaattgaatatctttttaacaaaaaaaaaactactatcactcacgtaatttagcttttgttgaacgtttgacgcgtttccctaattatataggcggtagaaaggaatagacaacatatgccctttcgaaggcccagtttcttctgtcagcccaaatacaaaaaccaggtagtaatcgaaatcaaagcagtagtaaaagtgaccttaccaactgtttttcaatgaaagcggtcaagagaggaccacaaaatggttttccagagtcagaatcacaaatattgaattatatactaatttttattttatttttttatttggtaaaatatgaaatatttatacaattttcgaaatttcgattgaagttacaaagagtactagtagcaaaaaaataacaaaatgtacagaaaaacagacaatgacaaaacagcaaaggagaaaaacatatgtatataacggaaataaaagaagaaacaccgattccgagatgccaaatttagaaatttacgtaatttccacaactctaaggagctgaaatctcatcctagttgccacgaacaaacccaactagaggcccgtccacaaaacctcagtatcaaacgtctataccttttccgtaaactaacgcaaaaacgcgatgataacagcggactataattgttggggatgattttatgcttaccaattcaactatcacacgttgacatggacaacgtttagaatagataggaggacttttaaaaaatgagcatgaaccttctccctccctcttttccaacaaacaaagacttctccgagtgattatgcttggataagcattttccaaagcggtttactccactaaaccggtttaattaaatttccaaaaggtcgggttcagtcaacgagaaccgaatgaccgtcgaatttaaggaccttgctctcatagagctccagattcttcttcactctcacatccttcatctccagctgccccagccgtcccgccaactccgtcactctctctctacattccttcgtttccttctctctccgccgcagctcctccctcatctcctccatctcttttttccccgccgtcatttccctatcgcactcctccctcacaatcttcgccgtgtcgtacttcccgtagtactccaccgcctccgctagctccgtcaccgctgttttgagccacgatacatcgattttcaccgaatccatgtccttcacgaccgccgcgatttccgccactcgcgtcttcgtcagatctctcaacgccgttgatttcagttccattactgctgcggctagggattcgagataaaacgacctcgttgaggtagattgtaacttcgacgaggcggcgatgtcaccgtgtttgtcaatgatcgcttcgagcgtggcggcgatgctcatccgtaccttgtaattggcgacggagacgtaagtctcggatatcgctaattgtatctcttcctttccgtagctttgaagtccgcgcattctggcgatctcctgcatcgtgaagctctgtgactcgtccggcagctccggcggctcgaattgcctctcctgctcgtaagtctctaccgatgtgatctgatacttgtagtgaaccggctgcacaaaccaaagcaatttgaatttaagcattttcttcacactttggtaaatagagacccgcgagagaaaaaaacgaaccgtgctgcttcctgaaactcccctggaacgacgtccagtggcaatttctggaaagagataggtggaattgttgtcgtcttcgtcgtcactggatgagtagaacggcggtggtggagagtagcttgtgtgttgatgaacaggactcatgggagggctgttacgcggtgtgatatcggcatctgcctcgtacatcccctcgaaatgatcttttccgttgttgtatctctgagtctgcaactaagtagagccaatatatcagagaatgaatgattaacaaaggcgttatatcagagaatgaatgattgaatccactaacccttgcgtgtggcggtggagagcggctttgggatggatgaaatgggcttgaaggtctgttccgggaagttacattgccttcagcttcatatctttctctactgtagtctcttccacgttcatgctgcaattacaaaagatttgttttttagtcgatgacggagactaaatgagaagtatgtaaaacaacattgagtaggattagtacggtgttgtagggagctggagagcggcttctgaaggggtgaaatggactcacattggcatctgcctcatacattctctcgtacagctctttggttatctcgctagaccttttacgacgatcaggctgcactccactcacagacaaaactttgttactggttccaaatcagcagattgaaaaaaaagaacaaaagtgatttggtaccgtgcgggttctggcagatcgaaaagggctcccagaaccgttgctccttggagtcacatcctcatcaggctctctaggacgctcaggctggagtttggaacaaagaatgaaaaccatggaaattgaaagaaactgtaaatctcatcacaaggagttgagagtaccgtgctatatctgtagactggaggccgttggtgggaatttgggatgcgttcagaggcttgctgttgtggtttccagtgagtggtttgttcatcggagatgggaaacgcgtactctgattccgatcttttcatgccgaaatgagttgtcggctgagaccgaccctcagcaagatgaggagggctcgacgggttgctcttgctcgcacttttgtgaccaaacaatcctgtagacaccagttcagtttagccaccatctaacctaaataggtcttctatttgtcatcatcatcatataacaataagtagaactgacctgctcttttgccatgtctcttctctcttgaatggaagaaatccatccccggatcggtatgcaaacctgcgtgtacaccggacaattcgatcagccagagtccattgtataatagaatcgtgtgcatataaaaaagtacctgggatccaactaccaaattcttaattaggagttttgttatgaactgccgtctgagaagatcaagagaagacaaaggtctccaacaattactcttatattattatgctagaaacgacatggtgtggtcatgcaagttaataacctgaaaatgacaatcacgacaaatattaaatttgtgtcatttgtataattgatttgatgatggaggcttctatccaactgtagcagccactgacactgacttggtcaattttggcaaccatctttgaaaaatatgaagaccaaactactaagaaaaattaacatttacacgaccataaacgtcataacgaatcaatccttcggctactaaaaaggtgacaactttattttttaataggcgcaaatgtagacaattattgtttataagaatactaacgggctttgaaatggaccgaaataggcccaagaggggtttaaatgaagataaaccctaagctgaacaaaccttctttcctcatgtgcgtcggcttcgcttctggaagattctgaaaatcaccgatttcgatggcgactcggctcaaggagattgtgaagaagtacggaaaagtcgcgcttggagtccatttctcggtctccggcgtctcaattagtggattctacatcgcgatcaagaacaacgtcgatgtcgaatcgctcttggagaaataccaaatcccatggttctccagcaaggaaaaccctaaccctagcctcgatttaaagctggaagagcaaggttccgttacgagcgataacaagacgaaacagcttgcgaaatcggccggcggagccctagcgttggcggttttgtgcaataaggcgctttttccgatcagagttccgatcacgatggcgttgactcctccaatcgctagattcctcaggcagaggaagatcctcaaaaccggccaatgactatttctctccacattttcacatttggggtcttgtctatgttttctcaccatctgtattggttccatgcgtttttgtttgttcgtaatttcgaatgtaatgcttcttaataggaagagaatgagatattgtgttagaggtatttcagactatagtgttgatcatctctccttataataaggtctgaatttagaatttaccaatattgaaatggactttacattatctatcattctccatgatttcttcacaagatgtctctgtatttggggatttgcagacaaaaaaacattttgcaggtcggttaagtgaaaaaatgaaagtagcttgagatgaatttttgacatgataccaagtacttgtctatgttggggacatctgataaattaggaaattagtgtatgtccttataaagaaataaggaattcgggatcagtttgaaacatattaaagttaggattacatgtgactaaaaagccaatagttattgataataaagcccagcccataaaacgacgactcttgagtctagacggtttttggaatctgaagtgaatcgtcggaaaaatttatcagtttcgagattcggagatctgcaagggagaagatgatcgtttgcgtcgccgtcgtcggccaccaggtctgccgcagaatttacattccgagtttctattgtgatctgatttcattaggtcttaccgtttctgacttgaacttccctatggatcgaaataacagaacaatccgctttacatacaaagcttcacggatgctgacgatgctctcaagctccaccacattgttcattgctcccttgatgtcatcgaagagcgaggtccttttatccaatccaatccaatctccttttggtttttgctctgcatttcttcatcttattaatgtggtttagtctgtttcttcagtgaacaatccgaaaaagtctggtacaacactgaacgaggcttttcttggcttgctctatcctactgtgaactacaaagtgtaataagcacattccctcactctctctgatgactttgtgttgttggggatactcctttaatggcttcttcttattcttcctctgcaggtatggttacttgactaataccaaggttaaatttatattggtcactactgatttggatgttagagacaccgatgtgagaagtgtaagtatctttcatctgctcatatcctctactttaaccaatgttatccacttactagttctatagagttccttaccaaagttacagttggttcttctacttgtgtatgttacttcctcttagcaccaaatatgtgaagaagagtttcattctttgtgtgttttcttcagttcttcaggaagttccatgctgcttacgttgatgcagtctcaaacccctttcatgtccctggcaaaaagataacctcgagaacctttgcgcaaactgtaagcaacatcgttggatcgtacggtttgaactgaccttctcttataagttgctttttgtacctcaaacttgtgttttacggagcattgagcaagtctcatttctttatcatcatatgttgttaatatcaactctgaaattgctgtaaggtgacttgttgcttcacatgttacctttttactcgactagttcctctcaatttgacctaagcggatgcacttaccaaataattaggtagttttcaacgtcccgtaaagaccaactacgttttcatatcatgagctgtaaatgatgcaatatatggtgggaaaattcaacaacttgatgatgttcaatgtaaggattagagttagcaataaaaatgctcttgttattttcttaatttgttggaaaacaacccaagttccgtcatttatctctctttcaaacccacaaggcaggatgataattcttggacagttgcttctctgtggtatttatgggtctgctaataaaatctagggagagagaagacgcaggtaaatgaacacttattgccatttctagagtgagagtgcaaatggacacaacaagagaatgtactactaggttgttaaatggagtgcatggaaatgcaaagtggttgggaccaagggttctactttgatctgaagaagattgaaggggtctgccgctacttccaagagctgtgtcagagggccttttggtcagtgcgaggggctggtgccaccttgccaacagaaactacgcttctaattcaatttatcggcgtccatatttgttccaaaatccgtgactagtctacatatgtagtagctgtactgattaactgtgtgtgagagcgtgcacatgctagttctttgatttggtttaggcaacagaaacttcagagttccaaggaatagataatgagtatgaaaatggatgtctaggagttgtttacttttgagtgttctgtacaaaatgcatataaacgaagtacatataccagcgtgacaggttgagccaaatttgcataagccaatgtacaaagttctaccttaagcatagagacaccaagaactgagagaatactatgaattcactcacgactgcagctggggagtggagacccagaaacggaaccacatcaacgtgcagccaggtctcaatggctgatcccaccactgcacctgccactaatcctcctgccgtcaacgcagctgctttccctgtatcaaaacacataacaacatcagaggtgctcgcttgtggaagaagatggaagttatcatttacctagcttgactttctttttggtcataaagtatagggaagccccaaagctgctagccaatataagtccgggcacatcagcaccagcataaggcatcccagaagattcaaaggaactcccattcacataagtcaaaaccatcatggctccatagactccagcttgtatcccgagatcgctcgtggaaggcatatcaacagagacaggtggattcttcatccactgagtcacagtacttgttcccagagggttactagatttaacatcagcgtagcgaatgttgttgcttacaacttttcctgctcggcgttggtttaggctctgcatcagcagcatgtcatatgcagcctcagcctgagaaaattacagtgaggcttaagaacaagaaagtctatctctttccatggaagctaaaactagtaatggaacaaatatagaaaattagcgaatttgttgattggagagtgaaaattgaaaacagtcacctgagagatggcgttggggtcgtccttacgagaagccaggatcgatttcttggcacgaagaatttcgtcgaaggaagctccttcggagactccgagaaccttaagcgccgtctccacagacatatcgaagggtggagaatcgtcggcgcgagaactagctctaggcggagcgcatcgccgccgtgtgggtaagagaatcgcggcggagcgccacagctgagtcttacgggaaggaaattggagcttggtagggagatatagggggtggagaggaacatcggaggaggctgagctaaggcggttgggtcgggcggcggagagagctgcggttgccatttctgtcttctgttggtgttgttgttgttcgtctccaccaacaaaaaaaaaaaaaaaaacttgaggtaactgtgagatttgagggatttatgatctttctatttccaccgttagattgagtctatattgtacggcttgtacgatagccgtcagattgaaacggcggacggtagatagacctatactaacgattatcttgtgtcacacacataaatttgggtccaatacacaattcgaagcgtggaagcaaaagaattcggcaatttttttgtacttacatcaattacttttgaatctttgataataaattgatatttgataagtatgtcaaatggatattttgttttcgacatattatttattttgtggtccatgtctttctatttttttttttccatgtctttctatttctataattgtttgtgaggtaaatgttaattttaatctatgagtaatactgaaaaataagcatactgtattagaaacaactgcataattgtagaatgaatgctaatatattttaggtaaaaaaaaatacagacaaaatttggtttatgatgtctttgtggctatggcattacccacacatcacttactcacaagttaaacacaaggaaacaaaacagaagaagaaagattgtaaggtagtaaagatgttgtggtgtgggagcctgaatccgataatagtactaggtcccaaggggatggaggatggaggagccacctcaaataagaagaagaaggttgttgtcgtgggttctagctgggctgctcttggtgcggctcatcatctttgtaaccaaaaaaatacagacaaaatttggtttatgatgtctttgtggccatggcacccacacatcacttactcacaagttaaacacaaggaaacaaaagaagaaagattgtgaggcagtaaagatgttgtggtgtgggagcctgaatctgataatagtacaaggtcccgtgcgccggagaagactatgtatcatagcccaaggcgatggaggagccacctcagataagaagaagaaggttgttttaaaccaaaaaaaaaatgaagaagaaggtggttgtcgtgggttctagctgggctgcttttggtgccgctcatcatctttgtaaccaaggttactttcactttgatattctcatctccaactccatttgatgtcacagttcttgacgatggtcatggtcctgttgatgttgggttccaaggtaacccatttaattaccttttagttttacgttacccaactaatacatgtgatctgtgcaacaagggttttggtatccgaatggaaacatattttccttggttgatcaacttggactcaaacccttcacaacctgggaagatttacaggtactcatatattttttctctgtttcttatgaagcaagaaacctataaggatgaaaatgtttatgtgttttaaggttaagtttcctgtatttcaagagcttcttctatacagtagtattctcaagtaagtcaaatatttcccctgtttctcaaatattcttcatgatcccatttcttaccattgttatttctgcagttttctcggctctctttagcagacaagatatcttttcttcctctaatggctgcaggcaagttgtaataggactaaattttccttcatcttactgcctagctaaccaatgtcatgagtcttcatacataggagtatatcaacataggctaaagcccaaacaagggaagggagacataacccgacaagtaacaaacttccagagacaaagactagcaaagaaccaaatactaggatcaacactatttataaatatggattgtcggataatatttatttcaattttggacaagtaaattgaaagaggaagagactaacaacaaattttgggtgtttttattatatacataacaagtctgattgttgtccattttatacaaaacaaaataaaattgaatcagagaagtgatagtcgacgatagatctcagccggctctcaagaaaaaagaagaagagatagtctctccgatcttcaaatgggtgctgctaaaaacaatgtcgaaatggaggaaggtgccctggagatcggaatgggtaaacaactatttggttgttgaatacattcattcattgcaatgtaggaggatgctaaatcttcttcctcttctttttgatatatatttcatctgcagagtatagaacagtctctggtgttgctggacctcttgttatccttgagaaagttaaggtatatttaccaagaaattgttctatgtcttgttttcttgatgcattattattgatttattgggattcccagggacctaaataccaagaaatagtcaacatacatcttggggatggaactactcgacgtggtcaagttcttgaagttgatggcgagaaggctgttgttcaggtttccaactattattttcctcattcaaaataatgcaacacggccttttctttatagtactgtggtgcttgtctaggtctttgagggaacatctggaattgacaacaagtacaccaccgttcaatttacaggggaggtatgttactactctcttctcttgttgcgtgatatatttggtttactcactcacttttgccaatataggttttaaaaacccttgtctcattggatatgcttggccgtatctttaatggttcagggaagcctattgacaatggtccacctatattgccagaggcttacttggatatttctggtgagcactcactttagcctcctcttgacgcattcttttccctctcactaaagaggcttctgatctttggtctctccaggaagttccatcaatcctagtgagagaacctatcctgaagagatgattcagactggcatttcaaccattgatgtcatgaactccattgctagaggacagaaaattcccctcttttctgccgccggtctccttcacaatgaaatcgctgctcagatctatcgccaggctggtttggttaagcgtttagagaagtcacataatcttcttcaggtattgcttttcccgctgataaaatatgactacgcagacgattatatgacatcgtcactcatttgtaactctacgcaaaagctgtacatgtgtaacgctattcttttcagtattgacactaacgtgtatcacctttgtttgtgaatttgcaggaccaggaagatgataactttgccattgtgtttgcagccatgggtgtaaacatggagactgcacagttttttaaacgtgattttgaagagaatggttcgatggagagagtgacacttttccttaacttggcaagtatctcaattaagatgtagatgccttgaaaagatatagcagctctaatgtttccttgacttcaggcaaacgaccccactattgaacgtatcatcactcctcgtattgctctcacaacggctgagtatttggcatatgaatgtggcaagcatgtccttgttattcttacagacatgagctcttatgctgatgctcttcgtgaggtgaaaaaaccgatataggcatttcttctgtttttttcaaggcttaatttagtggttaacgttgataattgcactaggtttctgctgcccgtgaagaagtacccggtaggcgtggatacccaggttacatgtacactgacttggccaccatatacgagagagctggacgaattgaggggagaaaaggttccatcactcagatcccgattttaactatgccaaacgatggtaacttcttcctagtcgtttctctggttgtaggtgtatatatatatatatatatatatgttttgtagtaatcttttgatgtctgagatttctaatatccatccttcttcgttgatcagatatcacacatcccacaccagatcttacaggatacatcacagaaggacaaatctacatcgacaggcaacttcacaatagataggtacaaatgttgcgcggaagataaaattattttcctcgagagagttgtgggctaaatacaccttgtgtttgtattccatagataaacccaccgatcaatgtccttccttctctatctcggctcatgaaggtaaagtaaagtcttgtagattttggactggaggaaggtatctctatttggtagagatcactcaggtgtgctgtgcagagtgccattggtgaggggatgactcgcagagaccactctgatgtttctaatcagctgtatgtgaactatgcaattggaaaggacgtacaagcaatgaaagccgtggttggagaagaagcactctcgtccgaggatctggtctctctatctctgtctttctaaatgccatgttaaataatgaataaactctaagcgtttctttgtcactcacactgacaataaaaacttggggatgcatgcatgcaacagctgtatctggagttcttggacaaattcgagaggaagtttgtggtacaaggagcttatgatacacgtaacatcttccagtcgttagacctggcctggacactcctcaggatcttctcccgtgagttgcttcaccgcataccggcaaaaaccctcgaccagttctatagccgagactccaccaattgatcgatcatcccatgcttcttctccaaattgcatctctttttgttttgctcctttgcgctttggtttgcacctctctgtcctttcccaataaaaggtgactgacccaatcgccggctattcttttgaacattcttgtatcctttatttatcaaataaactaaaattaaaagaaccttggagacttgagctgttgctgatcctcgaatactgcttcaattgcgatgatatatctatctaataataataataataattccagagataagtaattccaagaacatacataacatcgacatgcttattattaaactgatgatagtcaattgtaaagaggacaagataataagaaatgtaaattggtcgtcactgatgactatttgttcttctgaaaaaattgccttcaaaattttctgaatatttttaatttataatatgattttgaatcattatctaaatattttagtcgatttgaaatgttaaacacacattttcgttaattagataatattaggtaatatgtatgttttctaaaatttaaattacaatataaagtaaaagatttttttttttttgttactttatgtattatataattattcaaaacagttttaaaatcaaacaaatatgataagagaatcataattttaaatcttctaataataaatattattaatttattattaaatatagaatattccgtgtatgagtcggaaacaatttgaactgaccttttaaattttctatgaacaataaatacaaacggatggagcatccatagaatccgacagcattttaccccacccgccaaaaaattcttgttataaattcttaattgctctgttttaccatactcacgttttcattggctatctttgaccgccttctctacaagtgctataaaaaatttaacagcctcgtttaaacgtgattaccaatgagacggccataatcttaaaaatcactcaaaatctgccaaccattcatgaccttgatatcaaaatacattcaaatgtatagaaatacaaaattcaatagcacctagtaaatttaaaagtaaagctaaacattcatgaccactataattttggatcaaacaatgcaaacgcagcacatgaccgagtccgcgtcagaaaaaggggccaactgctccgtagccgccaagaatctcgcaggtgtggaactttcctcctttattcgatgaatctctttcttcattcttcttcttcgaattgtacgtttattgaaagacaagtatattttcttatttactatataaagtaatttcactttctcagatcccgattcctcttgatcatcgtcttcttctaccaaaattgttgcgcgacaatggagaaatacaacagtttatcagattttctcaaggagttctacatccctacgtacgtcctctcggcggaaacagaagaggaggaggaggaggagagtcgtcctacacctgcgagccccgtccttgtcttcatcaactccaaaagcggtggtcagttgggtggcgaactcattctcacctaccgatctcttctcaatcacaatcaggtctttgatctcgaccaggagactccagataaagtgctccgcagaatctatcttaacctggagaggctcaaagatgatgatttcgctcgtcagattcgggagaaattaaaaatcattgtaagagaatgttgttttctttgtttctttctctccaattgaatgaaacatcatctaatgccatccattattattaggttgcaggaggtgatggcactgctgggtggctccttggagttgtatgtgaccttaaattgtcacatcctcctccaattgccactgtacctttgggtacaggaaacaaccttccctttgcttttggatgggtgtgtgtcttacttactactacactcctcctctcaatacacttgcctgcatatgttttattattattattaagtgtatgtatctctctacagggaaagaagaatccaggaacagataggactgcagtggagtcgtttttggaacaagtgttgaaggcaaaagtgatgaagattgacaagtaatgttttacatatctgtctccacagtagtttttattagtctttacttttggtgaataactaacagacgactatctatctgctgcttcaagttggcacatacttatgaggatgaaaactcccaaagaaggtggttcttgtgatcctgttgctcctcttgagttaccacattctctacatgcatttcaccgtgtttctccaactgatgaactaaacaaggtgatttaccttcttcttcccattattattatatagctgtgtctcttccttttttttctgtcttatcttatatagaaacacaccctttatgtttttcaggaaggctgccacacttttcgaggagggttctggaattactttagcctcggtgagatattttagcttcaatctaactttggatttcccacaagtcattagcaaagttagatttccccttaggagttggttgatgagctaacttattgagtttcaatctagttattgcattgtttgtattgaaattaaataaacgaaaccagctgatatccttgaaagacaaatctccttgaaagttcttctttctattgtgcttatgaaggaatggatgctcagatttcttatgcgtttcattctgagaggaagcttcaccctgaaaagtttaagaatcagctggttaatcaggtaccttttgaatttgaccttttagattacaccttctcttttaataccccttcactgggatttatactaaacaaagaataaatactttgcattttgctttacaatgccagagtacgtatgtaaagcttggttgcacgcaaggatggttttgtgcctctcttttccaccctgcttcacggtgtgtaagatgtagacatacttttcgtttcattgttttctgtttctgagtctcaggtccccctcaacttctcattctcattcactgtttttctctttctgagattcttggacatgaatgattataatgctctgcaacactactgccttatcttttgtctttagtatactgttctagtgtcagtaattagaaatttggtacccatcattattttcagcatttgttctttttactgcttgggtctcgttgtgtgctaaacaacatcaaatttgaaatactctccaacatcaatatcgaaacatgtaatcttatgctggttttatattctcggttaagtggttcacatttcttacatttcctgtcttttggctgtaatttaatttctgtttatatatgattttgctctctatcacaatgttaaggaaagctctatggcttccaatgcaggaatatagctcagcttgccaaggttaagattgcaactagaaatggccagtggcaggacctccacataccacataggtaatttttattaatcctgagggatcccattggacacagttcaggatggacatgttggatagtcttgggatctttctctgtttgtaacctttaactatatatggttacatttcaaatgttacaaagcaatggttacatgatcgaatatgaactactccaattcggacatttgtttctactcttgcagcatcaggtccattgtatgtctgaatctgcccagcttttcgggaggattaaatccttggggcacaccaaatcccaggaaacaacgtgatgtaggttttacgaactcttgacattgcctgagtgctacataagtttctgatatatcctcgtttgtgtatttatcttcgccatggtaaaataatatgcatttttctttgttgtgacacaaacagagaggcttgactccaccatttgtagatgatggcctcattgaggttgttgggtttagaaatgcttggcatggtcttgttctgctcgctcccaatggacatgggacacgacttgcccaggtaagaattgtacaagttggaaatgataacgatacacacaaataaagatgtgatgattgagtgcatacaaatgataacttctgtgattaggcaaatcgtattcgcttcgaatttcacaaaggtgcaaccgaccatacattcatgaggatggatggggagccctggaaacagccactgccactggatgatgaaactgtgatggtagagatttcacaccttggccaagtgaacatgcttgcaactcatgactgccggtccagaagtgtgtttgacccttcaacaccccgccatcaggatggtgcagaagattatgatgataatgaagacgactcagtggctgaaggcgaagaatttagaaagtttggtgctgcggataccttcaagattcctgatgaggttgatatttctcaacttagttagacaattaaccattttcattgttgattctatgcattcttcctccggactccaatttttttattcactctttcataaaggagccaactagcagcaactggtttagattggtaaccatcttttttctttgcttttgtttggttgttcacgtttaatggccgagataatgtatctggatttatagcaacacagattctcgtttaacgcacatgtactgcagcagttagcaggacagtgcagagacgccaaatgcgaaactttcagatgttgcaactcctaaacatagaatctgaccttttttttatagggagaacacagtaataaaaaaggaagggcttcaaggaggagaaattcaaatgttcatggttggtcacatgtgctctgaagacagtgcctaaatcttaaagaaacttgtcatatactagtaacagcacaacagtaacctcatcaatgtataaaatactacatgaatcaacattatgtaaactcatgtaattgaaaggaaaaaaagcaaacatatacacgtctgaaatgttcttagaaatgagatatatatgttcttgggcatagttgttgctaagaaaacaaaaaaagaagtcacaaatgattttctaagatttccgttcaaccaagaaagatgggttatatagagtatctcccagacacttggagattgtttcgttagccttctgagattgggctctttctccttgcttcttcttctccctgagtaaccaaaagtataaagatccaagttaggctctatatagaagtttcatggtgcagcaagcaccgtatattcattcaaaaatagaccagtgcctagtctatttagatagggattcagtatcagtacctctcgacatactccttaagcaattccttggcttggacaagctttgaaagcaggttacgatacacatccaggtcccgatccacgcttttcttgttgatatttagggatgcacaaagctgtttcatgagacacaaagatcaaaattaccgtgagatgtcagagagaatacagttgcacattgccagtgaacataatggatacaaaactagcaacatttcttcttcctctaaacacaagattaagctgttaatatagattagcaaaccgaagacgaatagaatcaccttgtccaagacagttggatcagtagcacttgcaagctcaagcaaacgaaagagcccaacagcgaagaacctgctgtaactaaacccctccttactaccagctcttcctgcaatgtccttaagaactgcttcaatatctccttctttagaggaaaagtcaactagtgaagcagaagtctgacttcgtgcccattcctccatcttctgagcatcaattctgtacaaaaaaagttatcatctttagaaaaagacattcaacaagaagacattcattatcaaggagaagatggaagcaggaagaagcaaaccggtattgcttaggatcctcattcaaggcttcaatgtaagccttaaaaatggcatctcggtcttgatcactcggatatccttccatgagctgatcatatacagtgacaaatccaagggcaaaaacaggatcataacgataagtcttcttatacctcatcaaatgctgctggacaatgagctcctgcaaaaccgtgttgtagatactcgggatgggtcgcttgtaagcttttaggaatttcgactttgtctctgatacaggaggcacatctgaccaacaaaaccacaagagagtgaatgcagataaagtcagagcctttttcaatacaaaacaaaggagaatgaattgtgaaatgcaatgtgaagttcaagaagagtcaccggcggtaacattggacatgcagtgaataagagatttcgaagtggaacgcgaattcaaagaaaggcgagaaaactttgtgcagatgcgaattgcggaggcgagaggacgagaagatgcgaaattggagatcttgtccgattgacccaaagctgggaaggaaagagaagagattgcagttgcagccatcgctaaattgaagtgagaaagagaggagaagaagagttgttgttgttgctatgtttaatcagaagagttctcaagtaatagccattggaaggatgatgatggctctggttggatcttctgagtttcgactttcgagtggcttatccaactccacgagatgtcggtagtgtgacacgtgtcccttgtctgtccacgttaggattaggcccatttactttggattttgctagagctcggtccatctaataaaagcccataaataaatgcagcatatatcacatgtacataatgttgctctctgtttcattatcaattgtacaaactacaaagtccgtttattcatgctcaagattcatcagaattcaactcgttagtacattgatcgtttccaaaaatgtcttacgtcgaattagacatatgtacttaaatcttatttaggttttgatcttcttctttttttcagttaaaagggttattgatcacttctcactctctttctatggaataagatgaactgatgaagtacaaacaccaaatacttaagttttatatgtgaaaatgattgaccccattagattcatagtcaccgatcaagaaaaaaatgatggtcgaaaatagaatctaaaatgtggaagatgacaaaaactgtctccacccaaaaaaaaaacacaagctagatcagtcatacaactaagcatatctatattctaacaaaggtcctaaattgtatcagaagaagagttttgtgtggcgtcaagatcgtccttatggttagaaatgggaaagtggtaatcatcccatagagggcttccaggtccccattcctctggaattgcattgaaccatgcctcagcccaacccgtctcctcactcacccctcctactgccaatgccgtgctcgaatcatcctctcctcttctgcttgagtcttcactagtagtccccgtctcacattgtttctgatgcacgggagttggctcttgtttattgagaaaaagttcagggaaattgagcctagcggtctctcccctcaacttgaaggcctcgcggtcgtaggccatggcggcttcttctgctgtatcgaatgtccctagccagagacgtgtcctgtttcgtggcttacggatctcggcaacccattttccccagtggcgttgcctgacacctctatatagcttggtggcgctgaagggttgaaccggtggcctcgtcagtggcagatcgctttcttgtcttaacatgttcatcatcatcattcttccgctcggactcagcttcagaatgtctctccagtactgcaatagatgttgttgttgttgctgctgttgtgcaacatatggttgcacctgttgttgaggatcaaacgagatcatttgttgctgtctttgtcctgaagggtcattcgggtgtaaaaatcgttgttgattttgaatcgctggagggaggtaaaagggaaaagagacagagcatgtagttgttgttggcggctgaggagtagcataagaagatacgagatagggattatgtcggtcaaaggttctagtcttcctaagacttcttggagacgtagaggaagcatctcctaaccacatgtccgagccaggacccgaatctttatacttgccgctactaaactggaactcctcctccaactccatctcatcctttttctctgcttcactggtaccaaggaccctgattgattttcccttgttcttagcagtagccatagagaagaggagtcaacgacgatgtcctcttttgtctttgagaaaacagagcaagagcgggagaaacagagagatttgttgtgtggttatgaaatattttccccacttttatatcagaaccggtggggcttaactaagatgttgacatatatcactaagcaaaatatctcaagccctctcaggaccgtacttgtgtttcttttggacggtggaacattctttatttttctacttaattattacaaatacattgttgatagtatgcacatcgttgatagtatggtcggctaaccgcggctaaggatgacatgcaatgagaatgagattgaagcaattgattgcgacgtaacgtgtattttaattaggcttgttatcatcatctctcgaaggttagcgatttgtcgtcaaagtcagctttgactttgtttttttttctcttatttttctgtataccccacctacaaaagacataaacaaaaccgaccaaacttgaaacacacaaattaaaaaaagcttatatgatagtataagttatatctcatccaacttaacgtatcaactaactcaatagaaaaagaatgtaccctacccatgtcagtatcaccatacattcataatatatataacttcttttagaatttatttaaattttggatggctgtttcgatacataaccttctaataagaagtgtaaaggcaggcgtaaaaaaagattcgaccttaaaaagtaattaatttcaagtcacatgaataataattaaaatgatgtaataacaaaataacgaaaacatctaaataatgctaaataattataaaacgctaaaaatacatcgtttttaactatatttttaataaatgtattcagaaatattaaattatttttccaatacgataaaattagataaatgttatggattttcttatcattcacaacaaggaaaaactcttggatggtaaactgaatggactttcaagggttgaaaaatggaatgttttctgaagcagaccgattttatacaagcccctcaattcgcattagtaaaaccgatgtctccttgcataatatggattccaaatatgttataatgtctattgacatgaagaacttagaaaccttggtacatattaagatgacgtggacgcaaggaggtgccaaggtgggaggctgaagtcttaaactttcggcagataaagataaacaaactccaaaacaaaacaaaacaaaaagaaaacaaagacaagggaaaaggttcgtgttagaagaaaaagtcaacagcttaaagcttaaaaagtcggtgaatgaatgggtcagctctctccactttcattatctctctatgctctatctctccaatcataaaacttgctattccaattaaacttatacactatccattagtattttatgtagtattcttattaagatattttaacgtggtccatcattctacttaataagtttttctcttcttttaaatttattggcagcagtttgagaaaacgattagattgattaagaatgcaacgaatgtcaaatcccaaaccattatcttataccagttatattatgagtgcttcatatttatatattaacttgccaaagttttgaagattatactatgaaggctactcaaagggacattgattcctagaagatgattttatgatgttaagccgttgactttggtaactaaatcatttgacctttgatgtttctgccccctttagcaaatagaaacttaataagaaaattttcattgaaatttagcatcccaaagaaaggtgtagaaaagttatagtgtaatgtgattggtgaggtgcatgttcgacactcttcaaatgttgattgaaacttttttttgtgtgcaaagttgattgaaactttaatattttttcattaatcgcttaaagtgtagtagtgtcaaaatattgagatgtcaagtatagaacatactatcattttcaaaacaattgtgcaatttcagtataatcagtatttaaatcattaataacctcatgtgtaattaactctattatattatcgattttaaaacacaagccccaagacaatgtccctcattctatctcatcaaatgctcaactttttttttttagtaagaacattaattgggtgcattaatgaaggtcacagaaaagaagggttatagagggtaaattaaaggtgattgcacacaaaagtatgtctttcagtttttcacagaggaagctcatgacactcaccaaagcagcacgaatgaagttcaagttcttaattaggcttcacatactctacatcatctcctcaaaatttatatcatttcatatgttcgatcttgttttcatgtgactctctcctcttctctaccgtgagtctcttcaatttcctaaccctttgttaacgatcatatataccttgtttctcgccgtactatttcatcccaaattttacttttaccacttgcgataatatatcatgaagtctcttcttctccttgcctttttcctctctttcttctttggctctctcttggctaggcatttaccaacatcctcccatccaagtatgtatctatgcacatctttcttactccagctctttcactatcttcaagatctctaacttgttcatgtctgcgtgcatgtgcaggtcatcatcatgtaggaatgaccggggcattgaagcgtcagaggaggaggccggacacggtgcaggtggctgggtctaggttgccagattgctcacacgcgtgtggctcgtgttctccatgccgtcttgtgatggttagctttgtgtgtgcatccgtcgaagaggctgagacttgtccaatggcttataaatgcatgtgcaacaataagtcctaccctgtcccttgatcagcctcttctacacttattctatgcattcaaccgttttgttttccttttgcttctccgggacatgaccatgtgtacgtatacaatgcatctttaattagtttctttcttattattaataggaatcttaaacacagtttgatccgagattaattaatcagaaaatatatggatatcaaaaaatgaaagccactcacctatttgggctctctcgctgtattatggtccatgaggccgtatttaagacagcaacaacaaaagttgtagacagaattatatttaaaaggcaacaacaaaagtacgtatacgttgttaccaccaaactttggaggctcgctaataataaccacactacccatttgttacacaccctttattttcaaccatatcatctcaccttcgttaaatgttcccacaattagctcagtattttactatatacatacacacacattccctccacaggatcaaacaaacacacgagctttctcctctacaacaaaataaaataaaattaatggcttcttcacttatcacctccgcagtcattgtcgtggttttaagcctagtgcttggatctgtagagcaagtgagtggactacgtcacgttcccaagtcccctaagaccactgatgtcaaacaccctgactttcttgtaaccattgagcccaaaccaactattctcattcccggtgttggaaggttcttgcttcctcccaaatgcaagaagccgttctacccttacaatcctgtcaccggagctccacttactggtgggggaatcccatcatataatggtggacaaggggccggacctcacacccaactccctggtggcgatgatacgcttgtcccaaaccccggatttgaagcgccaaccccgaccattggagctggcaccggaagcaacggccaagttccaccagtgccactaccctgagtattattaatctgtcaacaaataagcatatcttagatgcaaacatgtctgttttggtgtcttgagtcttggttagataagtaacccgctactttactagccgtttcgtttgccatctctttttctctctgtgtctctctctatttgctacaaaaagagagaatcttgtttcatgtttttcagtttgtctttagatgaattcattttcacataccattatattaaaataaaggaaatgttccgcagtaacatgtaaagactcctccaattagcagtagatactagatactatactagtaatgacaattaaataaatgcagaaaaaaaagaagtaaaacactatcaaaagttgaagttttgatgaatataccaaatcagattgaatgtaaccaaatcgctcatgttcctcagacaaaactgtgtaccaatcatgaccatatcccacgctaaccaatttcttataagtcatcttagtagtagcagtaaaaatatagccatggaaaggtatcactgatgatgcaaggagacattgaaagaacaaaatataccgcctggtttagcattgcgtagcccactgatacgaatggtgcaaaagtttcacaccgacgatggatcagtagaccaaatcaacgcactcaatatcttgaggataatgaaaccacataaaggaaacgaaaagaaaagaaaatcaacaaaaccgaaaagccatggttctgggtcttcataaagtctgtgatgtctttgagttgttttgttaatggacaaagaggcaatggaggttgatagtgtcagtgttgatgccccggagggaatgtcccaacgttaactgtggattgataatcccagagtttaagagcagcaatttttagaaattaaaggcacaagaatagctcaatattaaaagatatgcaaaaacaattctaccgctattcattctacaatctactattaacacaagggttcatgagttggtgattagtcctcaccactactgtttcaagttcaacagtgtagccagacaaaaatcgacaatgctcctaaaagaacagagtgactggtatatatcagagaaagatgaaacattccacaagtacaatgatagtatgagaaagagagagagactagacacacatggaagattggacaataatagtattacattattcagaatgtggcggataagtgttgtgaatggcttacccgcagaagaaacaaagcaataaagtgaaagaattcacatattatagtgtgtaatctacggggatgtagaaggagaagccactcgatcggcttctatcatcgactttatgtagtactctcccgctttgtacgacgacctcaccattggtcctgatgctacgtatctgaatccctgtttacaagattccatattagcctactttcccattgcaattctcagctaataaaacttgaaaacaaggaagagaccattaccatttccatgccaagaaggcgatacctctcgaaggcatctggtgtcacgtactcagctactggcatgtggcgtttagatggtcgcatatattggccaaatgtcataacgtcaacccctgctgctctcaccttctccattgtcttaaccacttgatcaggggtctctccacatcccagcattacagaagtctttgttaaggtgcctgcaggtgcatactccttagccatcctaagcacatccaatgactgcttaaagttagcacgatggtcccgcacaaaactctgaagctcttcaactgtctcaatgttgtgagctaagacatcaagccctgacttggaaaccttctcaacacatccaccatctccgcggaaatcaggaactacatcatcaaacaacaaaacaaattaaaaaccaaaactcatgatgatcaatcccaccagatcattatattacctagtgcttcaatcaacatctccggcttcaagaatttcaatctctgaacagtttcagcaaaatgaccactcccttgatcaggtaaatcatctcgatctacactggtgatcacaacataatcaaccccccaggaagcaattgcttcagccacattgttaggttcatttggatcaggcggtggaggtgtacgcgatgtcttcacattacaaaacctaaaatagaagccctttcagagaaaagagagaatcaagctgggcaaattcggtagatgatgatacctgcagccgcgtgtacatgtatccccaaggatcataatcgtagcggtggcggttccagtttcaccaccagaccagcactcaccgagattgggacatttcgcttcctcgcagacggtgtgaagcttaaggtctctcaatttcttcttgatctggacatatctctcgccgccgggaattgattccttcatccatttaggtttcgggagaggtttctttttggttccaacttccaccgaataggtatcgccgtggatgaaatcggttagggaaggcgactcattcgccagccgagctcgaagagcctcgagactcttgggagattgcgttacggtgaccggagttacagccgaggaagaggagaagcatctcgacgccggacggaggaatctatagagcaaggcggagcgcgaatgcatctcaaacgtcctgagaaaaagtcccgattttggaggaatctcaccggtgacggtaatgagtttaaggtgacgatgaaccctcttcttctacaagaaggtctcatttgggcctattgtttataaactaaagcccattatattccttatcataaataaatgtaggcccattaaaagcttctttgtcgtcttctctgtttcgtctgcccgtcaaattttgaaaacacaagtttagatttgcttgtaagaactaagaagaatcgcattcacacagtgacgctctctctcactcacttgcaaaaaaacattcccttttctcttaagataacataaagttctcttactcacctttttccttcgtctgtcgaatcatattcttggctgctaagttttgcttttgaattttcaacgactctgttcactcacatatctctcttagtgtctactggattcggaatgagatcgatgagatctgggagagacaacaacatctgcttcctgggttttctctcctttgcccttatctcccttccctccttgtcacttgctcttaccaatcctgacgatggtaagcccctaattctctctgtttttcccttttgtgtaatggtaatgttagtatagctaatcgtaccctgattgtttgctttagttgcggctattaacagtctcttccttgcactggagtctcctcttctccccggttgggttgcatctggaggtgacccatgtggtgagagctggcaaggtgttctatgtaatgcttcccaagtagaaacaatgtaaaaaacgacacctcccatcttcttcttcttacttttctttatcattcttctaacaacactctcaccctttttcagaattctcatcagtgccaatcttggaggagagcttggtgttggcttaaacatgtttacctctcttaaagcaatgtactttatcctctcttgcgtttatgacttttgcttctttaatctgcttctctccttatttttaccttttgatgttttgtctcagggattttagcaacaatcacattggaggaagtatcccatccacgttgcctgtttcattgcagaacttgtatgtttcccattttccaactcgcaaatcccctcttttttcttattcaacatcttgtattacaatctttacattttcacaggtttctttcaggtaacaactttacaggaaccatcccagaatctctttcctccttaaaatctttgtctgtcatgtaagtctctgctctctctgtcatcacattcattctctaccggtgataagcgtttaagacttctttggtcttacaggtccttgaacaataaccttttgtctggcaagatacccgatgtctttcaagaccttggccttatgatcaatatgtaggtctgctttctaaatcagctgtgttaagattgttttctgtatatatgtgtaaccgaacattcgacatatgcgtagagatttgtctagcaacaatctgagtggaccattacctccttccatgcagaatctttcgactcttacatccttgtgagtttctcctttgcattccatatacatatcagtctgtgttgagtaggtctcattcagttcgttgttctgatttctcatcctttcaggcttttgcagaacaatcatctttcaggagagcttgatgttcttcaagatcttcccctcaaggacttgtacaaattctttgccatcccatcttcttttcctgtcaactgttatatatcttgccacttgcttactctcattcttattaactctacaggaacgttgagaacaacctcttcaatggacctataccagaaaagttgttgagtataccaaatttcatgtaagctgcaacagttttcattgctcgttccaactttacatctacaaattctgctactttttcttgtcaaagtatcagtccgctgatgtgacaaactatgatgcagaaaaggcggtaatctgtttaacgtcactattgctccatcgccttcacctgaaacacctccaagtccaacatcacctaagcggccattttttggaccaccatctcccaatgcatcagctggtcatggtcaggcacacgtgagatcacccccttctgatcatcacccatcccgaccaactcctcaagggaaagaagactcatttaccagtaaaagaattatttggatatccattcttggggctttttcatttgtggttttggccttggtatgtctactttgtgggagaaaatgtctcagaaaaagagaagacagtgaacaactatccaaaccgcacctaactagtgaatacgggagggcaagggagggttctcgctcaaatgcttctatgcttcctccatccaatacattcaataaaggtgaaatctcatatcttgatttcttcacttttagatttcaagaaagtcacatgtttgttttctcttcttcaatgaaattcaaacaaaagacaaggaggctagaccaaaagagagagtaggaggtgcttcgaagctgcatggtggggcagaaagaagcgtaggaagtgaatcaaagcaggagagtcatgagatagacatgaatggcaatgctatggatttgatgcatccctcatcaattccacctatcaaaagggtcatcgcaaaggcgactgaacctgctgaagcatctctaaaaaggacaaccagtaaatcccatggtcccttgacagctgtgaagcatttcacggtcgcatctctacaacaacacacaaatagcttttcccacgaaaaccttattggaacaggcatgcttgggagtgtctacagggcagagcttccaggtggaaaggtatatatgcattacattcattctttctttatgtgtattcaatttccgcaactgataagttagtttactttcttggatagctcttcgctgtgaggaagttggataagaagtctcccaatcatgaagaagaaggcaaatttttggagctagtgaataatatagatagaatacggcatgccaatattgtccaactcgtgggtttctgttctgagcacagtcaaaggcttctgatccatgagtattgtaggaacggtacactgcacgatttgctgcatattgatgacaggttgaagattgaactatcatggaatgtccgtgttaggattgcactagaagctgcaaaagctctggagtatctgcatgagatctgtgatccacctagtatccaccgaaatttcaagtctgcaaatattctccttgatgacgatataagggtgcatgtctcagactgcggcttggctcctctaatctcctcaggtgccgtaagtcaggtaagcaagactcctgagaaatctgatttgcttgtctcatagcatttgtatatgttccactccaagctagtttgtgcttgttttagttatcgggtcaactcttagcggcctacggatatggagctccagagtttgaatatgggatctatacaatgaaatgtgatgtctacagttttggagtagttatgttagaactcttgacaggtcgcaagtcatatgacaagtgagtggaaatgaggtcttattcatatgtatttgtggtttgaacttttgttcttaaaaagaaatggaaacgttatgcaggaaacgggatagaggagagcaatttctggtgagatgggcaatcccacagcttcacgacattgatgcattagcgaagatggtcgacccatccctcaagggtgactatccagccaagtcgctgtcacactttgctgatgtgatatcacgttgtgttcaggtaagcatcactagaaaagaatacaaattttcttacaccaatgtgaactacagtgtgtattaacatctatgtgttgggacagtcggaaccagagtacaggccactaatgtcagaagtggttcaagacctctcagacatgatccagagagaacatcggagaaatgactcaaatggggataatcagtatacgggaagaagatagtttaaggagattgtctcttatacaaaacaagtggtattattagtattctttagaaagtcgaaaccattgttctttaacgagccttgcttgtattattatatatgtagagtgtgtgagtgtgacacaggcacacagcttactctgctttggccttttagtctatccacaacacccccaatgtatttccaccggattaggattagcaatctctgagtttttccaaaaatccatagtactgctacttcaaattttgaatcttttttctttctaaatagtattttatcatattcttcataatatgattcatctctttagttttgtcaaccaataatgttttgtttctcgtttcagtgtgatgatgattgtgaattagataaagcaactacggtaaaaccactataaattaaaactatgcagaaaataataaattataccggtctcgagtcggattagtgtaaaattaacaaaattctagataaaagtatggtatcaataacatcataaattaataatcacataattagatctatatttaagttaatatataatctatggttttaattttttttaagtattgaattttcgttagagtatttctcaaacttttattgaatcaaccaattgttttgtctctaaatttaattgaattatgttgtgtttttaaactatcctatgatagtatatcgtttataacttcgtaatacaattagccattatttttttgcaaattttcaactttttggtatgcatcatgttcattccaatagtctactatagttgaagttattaatcataaacttaaatttatgtatatcatttgtataaatgatacaattattgtgatttactgccaaatgatttttttgaaatattaaatttacaattctgatattacaaaaattataacatccaaattgaattatttcaactcatatttttctaaaattttaaaaaattaaaacaaacatctttataaagtaatggtgctttttttatagaaaatttatcatcactataaattaataaaatattatggtcccatcattattattaatttttgtagattttcattttactaatgttaaaatgttggtttgttggttatctccggattagaaaaccgggtataacccagacgcgccaaacacttccttattactctaaaacgcgcacccaattgcttcatctccaatcgctctctctctctctctctctctctcgctcggtgtgatccgtgtagagagattggatttgctgagtaacggtgcaatgtctcgctaccagtctcattcctttgatgacggagaaattaatccttttgcggtaagcttgattcaatctcatcatcatcatcatcatctggggatctactttttattcgattttgttgaatcgcattgtttctgatctgatttctcacattcctgttgtaacgtgtacgtagtgttactcgcaattcttgggaatgacttttcggtttcaatgcacaaggaagaaacgtagttgatcgattgattgatttacgcatacttttacgctttcttgtgttcgtatgattgttgggctttgtgaagtgagtgtctctgggaagggtgataacaagtttcagtatgtaattgctttatgttttcgctcattctatgtaatgctttccaattacccagggatctataccctaatttcaattggtcatagcctcaattgtttattaatctcacttacatctttttccatttccagtttagtgcttacatgtggccattgatactttttactgatcttggatatggtgtaatggtttacttacttgtgtttgaaccttcagaatcctacaagtgtcccagctgcaacgtcaaagctttctcctcttccccctgagccgtacgaccgtggtgccacaatggatattcctcttgactctggaaaggtactttccacatccacagaagcctacgtaccaagtatcttctcagaataatccctgagacaactttatgattgccaacttctaggatctgaaagctaaggagaaggaactccgggaaaaggaggctgaattgaagaggcgggagcaggtaagctgtgattggatttgaaaccaactaatgtcacataccctgatgtcatttctcaaatggttagcagtaggtttttcattttatccgaaccaacaatagttaattttcatctgattgcatatcatttgtaagtattatatgggtatttagtctgtcgcctcactctcttattatctattctggaaagtttagccacagtggtttgtagctacagcctttcaaacatatgtctttcggttttctgaaatctgttgtgttattttccaggaaatcaagcggaaagaagatgctatagcacagggtatctttgtcaatattatcttttgtagaaacctgacatttcgttccatgtgaaatgctcatgctgtcatctttattttggtagccggaattgtgatagaagagaaaaactggccaccgttttttcctctcatccatcatgacatttcaaatgagatacccatccatctgcagagaatccaatatgttgctttcacatcaatgctgggtatgtgttttctctttcaaatgatcaacgcatctgcagttgcaacagaggtggatttcttgatatattagtaaacaatcttaatctctgtttggtaggtcttgtggtgtgcctgttatggaacattgtcgcagttactactgcgtggattaagggagaaggtaagtcttggaacagttaaaatttaccaagtagactgaacctgtatgatgctaatctgctgacttatgtattttggctgtaggtccaacaatatggtttctagctattatctatttcatatcaggggttcctggagcgtatgttatgtggtatcgccctctttatcgtgccatgaggtattcatgccacttaagatttttcctttaaaatatcttatctgctactgcgtcgtgtgttcctttatttagagggaaaacaaaaagagtattccagatagcatcgtagttaagagtcaaaactttcattgagatgtgtgttgatttggttgtgtgcaggactgatagtgctctgaagtttgggtggtttttcttcacgtatctggtgagttttccatttggtttcagtgaactttttttaatggctttgacacatcaaaaggtggaagtgagtaaaagcttaaaatatgattgcagtttcacatagcgttttgtgtgtttgcggcggtggctcctccaattatcttcaagggaaaatcgctgacgtaagtaacaaattagtttctaaatcacacaaaaggaaagaggtggaatcatcatatgttgttgtgttatgcagaggaatattgccggcgatcgacgtattgagtgggaatatcttggtcggggtaagttgaaagcttaggtagcgaataacttaaacagttgtggactttgagtaaggctaacttttggtgaggtggtggcagatattttacttcattgggtttgggttcttctgtctggagtcactcgtcagcatctgggttattcaggttccctcctttgctgaatcatttattcatgtagataagttaaaaaggaagaagtggttaacaagttgttgttgttgttgtgtgtgtgtgtgggaacagcaagtgtacatgtacttcagggggagcgggaaagcagcagagatgaagcaggaggccacaagacgagcaatgatggcagctctctgaccaatgaccacatacacacaccttttaacccatctccaattttttcccatttaacatacaaacaaacagtgaacgttagatcctcttgaaggggattgattatactccgctactcacttcatttttgttttcctcccgatttcatttaactaagattccagtgaactcaacttcttacttttttttggtaaaaggtgaagtcaacttcttacttactttttcttattaatcatctttcaaagaagctccaaattgtgaaatcctaaatatgcaagtaaacagtccactcagagacgccgcttccaacgcatacgtgacaactaacgtatgggtgaccttaacaataggcatcatttcgttgttaaaataatggctacgaacgagaaagtcaatgggtgtagttaatgaagaaatgggcttctgtagcaataaatagtcaaacagttgagagtgataagaagatgttgcacaagtggtgattataattcaatgtcgaatttgaatactcaaaagtcaatgcaagtcagctgtatctgtgtgtgacacgcggccccgatccgaacggttagataacgcccaaactgctatttaagacacaccactaggcctctttgttccaacaagacctcaaataaaaacacaacaacaacattcaagaaatggccatcttctgtttccttgtagaccagagaaagaaagtccgggggaggaagccagcggccgggttgtgctcaagatgcggaggaggagcagttgttgccgacatgagaacctccacaagattctgtggggtccctttttaccgcaaagcttggaaagctatcgtctgtcatatctgcggtgctgtcctcaaatcataccactgagtctgatgaaccaacaacgttttttgttttaattcattcgttttttttttccaacaagctacttgccattgtatgtcgcttgattgcctactttagactcttaagtcttagctaatgtttttgtttttcatttatctctctgtttctgactaatgcaagtgatccttttacttacaagtctcttcaaaacatgtttggtaagaacaccacttaataggaaaaagcagaaaggcacatgaacgtgatcccccaacttgctatacagctttcaccattcaatgctcttctctctctcccgttctttagatccctcaggacagttatattgggcccaagtttatgatccaagaaggcccaagttttgtattcattgtccattatcaaatagtataccctaaaattattttacaactttcatcacctccattaattctgctgctgcaaattctatcgaactggtgagttttgttaatctctttcctcgttcgtccttgtctgtatatcagatcgatctctattaccgttttagcttgttcttgatctttgtcaacataaaaacaatcaaacaaagtttcttctatgagttctggtctgaacgaagatttcctcgattgtatcgtgcgtttagaggagacacatgttcaacaaggcttcgatgagggttacgaagaaggtcttgtgtccggtcgtgaagacgctcgtcatctgggtttgaaactcgggttcgagacaggcgagctgattggattctacagaggttgctctgctctttggaattcagctctccgtattgatcctacacgcttctctcctcagctccataagcatctcaatgatttccatgtcttgctcgataaaatcccgcttttggatcccgaggacgaagctaaagacgggatcaaggatgatctcagagtcaaattcagcatcatttgtgcatctctcggcttttccaagaaacaatttgagtataaaggatacccgaatccttcctccaatctcgacttttaagacctccctccatcaaaacactcttgtattgtatgtatggctttcaaagtttctctcgtttcctcaaagtttgtatttttaagagaagtgtgtgtgtagacaatctatgttttattggcttgtccttttttctggacatgtgaatgctgaccacaagtctaaatctggtggataacttcttttttagccttataatgaacaaacaaactcacatctgtagatatatatttgtataggtggtcggaggagatgttgagagaaatgcttggttgttgcaaggtttacatatctgaagcgcggaataagacggccctcgaagccattgagagagctttaaagccttttccaccagctgcaattgtcaacaagtttgaagatgcggcttatggcagggttggttacactgttgtatcctcgcttgctaacgggtcgtcttcttccttgaagaatgcggtgtttgctatggttaagactgctctcgacactatcaatcttgagttgcactgtggatctcatccccgccttggagtggttgaccacatatgctttcaccccttatctcaaacctctatagaacaagtttcttccgtcgccaattcccttgcaatggatatcggctccattcttcgaggtcagtacctaatagaagacctcagtcataaacatgtgaattcctgaattttaaaagatacttatcaagctaagagcagaacattgttgctatgctgctgttgatgtgtactttgtgataagccattgaacatggaagtctatgagcaatgctctgctcttataaaaatgactagccatagaacatgaagtttgtagcaatgctctgctctctgctgttatcaagataagaacagagcattgtttgtctgctgtactttgtgataggcagagtgatgttctgtttttactatctcattatctctaggccatagaatatggaagtctttgtagcaatgatctgctctctgctcttatcaagataagaacagagtattgcttgtatggtgtagttgttgtgtacgttgtaataggcaaagtgatgccctgtgtttaaaatctcatcttcgtctaggccatagaacttggaagtctttgtagcaatctctatattgatatgtggactggactgagatatatgacccaccttggtgcagttcctacatatctctatggagcagcagaaaaggagcagtgcaccctggattcgatcagaagaaagctggggtacttcaaggcaaacagggagggacatgaatgggcaggtgggtttgacctggagatggtgccactgaagccagacgcagggccacaagaggtgagcaaagccaaaggggttgtagcggttggggcgtgtgggtgggtaagtaactataacgtgcctgtcatgtcaaacgatctcaaggcagtgaggagaatagcgaggaagacgagcgagagaggagggggcttggcttcagtgcagacaatggcgctggtgcacggggaaggagtcatagaggttgcctgtaacttgttgaatccaagccaagtggggggagatgaagtacagggactgatcgagaggcttggcagagaggaaggtctgcttgtgggaaaagggtattatacggactatacacctgaccagatcgttgaaagatatatggacttgctcaacaattcataaatttcaaagtaaaaaaagtaaaaacagtatgatgttgtcattcttagaacgtattattaccgacatcgatcatttatcttcattttgtgtttagatgtgatatacattgccatgagtgacaattgaaattagcaaagattaaataaaaagtgaaatgataaaatgatggtacgttcattgagaggccaaaacatcagatctcatcattggtgtttttcctcaacaactgtgagagatttgttttgtgtagcctcgtcttttgccgtggttcttaaagctgttgttttcttagcattttgccttgttttgcatatatctatatggcaatgcatgcaagtcattaactaatgtatagtgaactattggtagcatcgtgaccatgtggtaattaacaatctttgtccttcaaatttatatatatggaggttgtggtctatatgatttgttaaagtgaaaagacaactggttttctattaatttggtcgtaggtgaaattcgagggtcaaaagtctctaaaaacaacgtggatgaggtggagtttggtgcggctcgttattgacttgagttcttcttggtcatttttttgggtttgcaacaaggggaaggaggttaaaagaacatttatctttttctgttttatcactaattattgtgttgttttatttgatataatcaatcaataggttaaaagaacaagaataaattaaaaaattcgtcaaaaacatcaaaacgagaactaatttgaaacacaatttaacttctaaacgacaactaatttgaaacggaaggagtatacgttacatttagacaaaaaaaatgtaatttatgacatgcctacacacattgacgtagacaattaaaggttaggtgtgtccttgtatatgtgtatacatgtacatacatatgtatgggcacattggagttgggccgcaatggagaataaggaccagatgcgactatcatacacctaactcttaagaaaaaaagcattatttgtgtacataaatggtagacccatgaaacctgtagagctcaaaagtcacaagtaaaagagagaaaagaaagaagagaagaggtaattacatgtgggtttagagaacaactttacttaatctcttctcttttatcatcaaccaaccatatatggacaattacaagaacacatctatgtatgaacgttaacgtagataatattataaaatattattctaaaaattaaaagattcacaattcccatgcctcacgacttgtatttttctttggccacctaatttgcatccatcatctctctgtctctatagagagtttctttcaaatcccctaaaacctagaaaaacaccaaagtctctctctctttttgttttactccaaaagccttttacctttgagatttttctatataattgtcagatccttcgttactactgatgctagctcctttagggctttttctcgtttactcatgtcaaattaccttcttgtcccttggtgtttagggctctgatcctatataataatacttcataggaaggagaaggagcccttcgtcgtggtttacttggtcccgatcggagatggagagagaatgtgggtcgaaggagttgttcagcaaagaggagctacaagaaataagtggagtccatgtgggagacgattacgtcgaggtcatgtgtggctgcaccagccaccgttacggagacgccgttgcgaggcttaagatattttcagatggagaacttcaaatcacctgccaatgcactcctgcttgtctcgaaggttcctcttcttctctctcacatctttctatatgcatgttccatgtgaatgtgtatggattcatgatagtgtcaagaatgcaatgtaactgttctttggcctcggtgaactatgaggctgcttgtatttgctagatgtgatatgtttcatgcagtcttttagagtgtgggataaccttacattgtaatgtatctccattttatatcacaagttcgagtttctttcaaagtgatctgattgacagctttcattctatgatggtagacaagttgacgcctgctgccttcgagaagcattctgagagagaaacctctagaaactggaggaacaatgtttgggtgttcattgaaggagacaaggttccgctttcaaagacagtgttgctcagatactacaacaaagcattgaagaactctaacgtatcgaaagtcattcatcgggatgagtttgttgggtgcagcacatgcgggaaggagaggaggttcagattgaggagcagaggggaatgccggatgcaccatgatgcaattgctgagcctaattggaagtgttgcgattacccatacgacaagataacatgcgaggaggaggaagaaagagggagcaggaaagtgttcagaggttgcactcgctcaccgtcctgcaaaggctgcacttcttgcgtctgcttcggctgcaagctctgccgtttctctgattgtaactgccagacttgcctcgatttcaccaccaatgccaaacccatttgacttcatttctctaacttatttaattcttctgcaaaaacttgtaatgtatgctctgcattttctttaatcagtagcttgttacacctgttatgcgagtggagagaccaagtagggatcacatactggaaaaaaaaccgacttggggcttggaaaactaacttagcaccactacgaggacatgaatctaatctaaattcaaccatataacctcggcaaatacacacaaggcaggagatcgataacaagaagcaagcagtgactgtaatagtatgctgaataaactatgtcaagaataaaagcatgagacaagagcagctacaaacatttggattagccaatatgtacttggaaggtggacgacatacatggagaaatacctccaacaaaaattggtatccaaaccagacaaatagaatggaaggaaatagctcgaaagcatatatcaacatacgtagtgagacaatgatttgcttaaatcctgtctgtttcaaacataggatattatgaaacacaaaactgtcaagaatttatccattgcagacatcatcagatctcaaaagtgatgcaaattattttcaaaatgaaacacaagaccagtcacaatctgctaaaagggaaaacaaagtgcatgagaatgagaggtctctccataaaaggtcttcctggtgacaatgaaactcattgtgtactctccacaggcgtctgcaaaaaaaactatgtataagggaaggaacccgaagcctctaggcaatggaagaagagcaagagctgaagagcaagagtaagtacctctttttttcccccagtggcgagcttgtatccactgtagaaaagtaagccccagccagacagagaaataagcacaaactgcagattggtcaggtaacagaaggaatcaattcaacaaaaaatcacagctttcattaacaaaaacacagtgtcacaaacacatgattgatacatacatgctcctctttccagtttcctgggttcgtgggctgtttccagaagtcaaccttggtagatccatggtgatctgcacagtacacagacaaatccacaaaatgctcaaaaactcaattttttgtatacagtgattcaatttggaacctgacaacgccaatgatatacaaaatcttcacaaagttgtaacatttggttcatctaaaattcgtgaaaacacaaattagacataaaatgtgcgaaataagctatacgccaccaaaattgataccgaaaaaaatcgtaaatatcgaaaagagaaggaagagggagagagaatttaccagcggcgccggcgaggcaacgacgctgaccaatagaagcggctccagaggaaatacgagcagatgggatctgagctaagctcatggcacggcgagcgaaggacgccatcgatctcgacttttgatttagggttttcttgaggatctgagaggctccctaatgttttccaggagacgagattgattgatgaaggaagagagaatcaagtgaccataaagaaatgtcttttctgattctaaacgacgccgtattgtgtgcgttttgtttgggtaacacctaaaagcctccttctccgtcagaggcttttgttttgtggacttttgttcacactcttggcatttttcatctctctgtttctcaattctgtatgtactaagaaaacagatctttagttgtatttttgaattccacttccatgtttgagtatttcaacatcaacattatcaataggtaaaaaaaaaaagatcgatagaaataaaaaaaaaagccttaataatcgctagtgcttgagttttgttcatcatatgtagaacatggtcggctcaaacattattaagatccaatgcaaagagattcgaagtaaaacaccgaaaaagtcttttgaatgcaagagatgtgaagaacctggagatgtgtttgaactttgattccatactgtgcgttggtttcgggatgggcatggtaatacccaaaacccttcaaagtttataaaaggttttaatcgtcagaacaagctacgagaaagccgatgtttattatgaaacagtatctcctaaacgaaagagactaaagactgtgaaggaagttgctaagtttattgaagacaataaacaatttaaagacatgaagattgaagaggtttcttttgtcgcacccaaacggctgaaaagaaaaaaatataagtaaggatgttgtagttaccgataacaaaacttgaaaagatcaacaagttaaggtttattctgtctctttagtttccttaacttgttgatttttcaagttttaatatcaacaactataacatcattatttagaactttttccttttcagctgtttgggtgcggtaaaagaaacctcttcaatcttcatgtctttgaattgttcattgtcttcaataaacttagtgactttcttcacagtatttagtctctttcgtttaggagctaatgtttcatattaaacatcggctttctcgcagcttgttctgacgatcaaaaccctcttcaaaccttgaggggtgttgggtataccatgtccatcctgaaaccaacgcacaataggggaatcaaagttcacaaccacatctctagatttttcacatctcttgcattcaaaagacttttttcggagttttactttgattcttttcgtactcttcttgtgactctctatatctcactttgaaacactttcaacattgtgcagtgtatgagtcaattaacgttgtcattggttttcgctacacacatagatcaaatagagattaagattatgacaaaacgaattttcatgcaatgataaaaataaaaaattgtcaatatcttacgtgatgtaccttgagtagttgttttcaccatatttcaagttttgagggagatgaagagatttttttttgtggtttggctttatggttgaaatgacgaaggaaaaattatctcctataaatttcgtttttactcaataaactctcttttgcttctctgttgcagctgatgggttattagaagacatatcatcatcttcttcttccgacgaagagtcttcttcaccttcttctctaattggagtctccatttcatcttcgtcgcttgaagatatcttcagcggaatttctatcgtttctaagacatggatcgatttagggtttatgaatagaatttagacattgaaactaaaaggttttgctttgctctttaccacttgtttagggttcctttatatatagaacaaagcgtctctctcttttcatttattttcctctttttttcatgacgtttcgatttcccatttgagaggactgaatattctctttcttggtaaacgcttattcttaaatcttaatagtagtatataaatgatattactgtttccaaagtcgttcaaataactgggccacgctttggctgagtaataatatcaggtttgaaattactgtttcatgtctttaatgttcatgtagtctctcgctgttttgaacttgtgcattactctcttttcttgtattcctagtccatgtcatcaataaatgtttctagagcggacgaagagtacttatcttgcaatgtgacatgattgagttttaacaagtccatgagagctgcaaggaagtgtggtttcggtcatatagaagatatggtcaaatccactcgggagaggaggacactacacacttcttgactctgtttcttgcaatcaaagcatattgaaaaagagataactaaacccaatatccaagaaagaaacaagtggaaattaccatcaaaagtgcttatgtgtactggttattaccatcttgttccatctgatacagagaacctaagactcttacgagagtcgcaacatttattaagcctcaaaatactgtaatttttgcttttaaaaaactgagtcgcaaagctttgacaggggaagacacagtcctagtgtttaagaagatttgtatcgaaagtctgtttgtgttgaatcaggaagcagcatttcaagctcctctcctgcatctgtgtacatcccaaaatatgatcagagaacagaaacatatcagatcaggtctttaaatgttaatacacacacaatctttatacctctaactcggaaatcattctcaaaaggtcatggcatttctcgagcatcaacttctcttgtacaaccacttccgctagttgggaagcaagtggaacaataccctccatctgctactggaacattataggttattacaccgcttagatacacgactatcatgtcacatttgtcgcagagccagaaaaacctaccgtgggagcataatcatccacagttgaaatgatagcatcagtgactgcttctgcattcttaattatactgacagctgattccaagttcacctgaaaaaaccttaggagttgttggaaaatagagacaaagaatatttgttttgagttcaaatagttaacagatcagaggagcatgatttaatttaccttcgcgccttctttgaggggaagcctggaaagaacagaatgcagggaatctctgattatggacagagatgaaaggtgttgtatttccatgtcctcccaagcttcaagatgcttaacctgtttaagatatatttcgtatcaaccctgtttatatttgcttatatcctccattgcttggaataagtaaatgggtttggacctgacacttacttgagaaagaaacacataattcagcttcatctccaggtttttcttctgcagtttgattctctcttgcagaaccaaattatttaacttgataagagtatcccatgcacagagtagttgattctgcaaaagttgttcacttttattttatttcatgcctcaaaggatgaagaaagcaaagatctcatgattatgtgaaagtcaataaagtgacaagcatgagaagaagtgatgatacaatcattaccttttcttgggaggctacgttcttgtttacatcacaggctctagcattgacaaacctccattgaagcaaccggttattcataagcttcagctgatgagcagattctgtgtcacatgtctttggttttagtggtgaagtaaagggcgatgacttgttcttgctcctgaagaaatcgaaaccaaggttgattagtttacccacgccttttcctcttggaggcttcagttttgaacttggaactgtcaccgcctgagtgtccaatgaccttcctggtgaaagagcccactgagacatcgaacttccatacctggacactgaattattcctctgcaatctattctcaatgcccttagagctattagttctctgtgaatcatcttgtgaccttagtttggtcttgttgttgcctttgctcggtttagctgttaaatcatgcagatacttagaagagaccttgataccgggtttatggttccaggatgaacgatttgtactaagacttgaagcacaggacacatcactcaactctgagtctgtttcatcgttgaaggactcatatagcagagagcatgagtttctccttgatgatgctctgtacaatgcacattcatcaacagaaaatctgccaggaagtatgacgttatcctcatcattgatccacggtgaaggcatacgattttcttttgtgtcaacttctatgctactttggtttggtaacccgaaacaaacccgtgtgccatctgacatcctatcatgctttttcaagcctagatgaccttttaccccgttgttgttctgatcatctctcgatgaattagaagtggagtttctgcggttaggagaagaagatgcagacggcgaagagagaaaacgtgaactaacctcgcgggactttcctcttcttgttttgagtagttcatgctcacagctcttcattgttactctgcttcctgagagaaagagagagaaggaagcttgtcaatcttataagatgatacatagaatctttatttaactttcaaaaaaagaaacaatcttttgaaatagatgagttcgttgccccctatatggtcgccaacattatagggtttattgttattcagatcaagtttgaagcaaaaatcataatgccgcagagaaaatgtgtgaatatcagagaatatctgatgcttcattgaattttgaatatcacattcacaaaatacagtaagtgatggtgctagagcatacaaaactcttgcaagtgtctctgtaaccaaatgtggaagatatagctgtctagaagtggaagtaaaactatggaccctaagatatcaatgaaaattgcattgttgcataaaaggagaagtgtaatcaacgtatctctcccacaaaggtttgtacttctctatcccgatcttcaaccatggctttaagttcccattgaagtgaagaacagctcctttctctatcacacgagcatccacattcgtgtatcccaatcccaggatatgccaggacgcctctagtgcctctgttaacccgtaaaatgtcagaagtcctggaggtagtgttcccagtttccataaggtccggtccacgtttttttcttgccagtagtggtatatgccggtcacatttctcttcctccactcaactaaatcaaagacgttcattccaaacgcccacccacacgcatctggatcaaagtgggagcgtatgagaggatgagaatagttcaagtacttgtggtagcggtggaaggtctccatgcaggtctcaacagccccgttcacatttttgtttaaatcgatcgaaaagagagatgaaagatccttctgaactacaacatcatcatcaagaaagaccaccttcttcagcgcaggaaacacttcagggatgtagaacctaagatggttgagcatggaaagatacttggggttcctgaatttgattggagtgcgcccatcatcgttgtgtccagagaaataatagctttgcgtatcagagtcttgcagctgcttgaggaccggaacataggaagcattcagccatgagaaatcctcgaacttctgaacctccacagtgactcctctgaggttgtccatattaatggcgaaccaagccttcattgcagcatagttgatctcattagtcacaagatgaaacacaactttctcaggggccttggaattgagagcagtagaattaaccacaacagaagtagcaataatgttatcggaaaacacacagaaatggtagagactgttatccgtgagtttcgaatcaacacgactcctttccttaagagttctctgtaagtctaaattctgaaaccattcggtagtgagacgaacaccaagacagtaaagactcttaggcacttcctcagcagcaatctgtccatacttggaactcttctcgctaacggaactcatttgttcttcaagagcctgaatcgaggccttaagcctcataatcatagtagcactatcatagtgaagctgctgagcttgatataacaaaacagccatgtcacgaatagtagactcagattccaagacagtcaagggacttctcctagtagcagcactcgataaaagcaactgagagttacggatctgagcacttaagtcccaagcaaactgaagattcttactttctttagcaatgacaacaaaagctttagcaagagcaatctgatcattaacttgacgagcaacggaagtaggactcaacatttcctcagtcatattcataccctctacaaatttgtcattacggtaacgtcgctgcacaaaagaaagggttcgaatttagcaattgaaatcgaacaaaagaagagatctttgagattgaatataccttaggaatagagggtctaggttcaatatgaccagctttggagagaatgagaaagaagagcaggagggcaataccagagagaacccaccataccacattcgagatcttcctccgtccagctctccggaaactatcccctcctctccttctcatagttactgtactcgcagagctgtgtaaaacccagatcttataaatgaatgatgatggtggaagtattcggatctgagaattttgtcgggagaagcaaaaatagctcaaccgaccatcttctttctcttcgctgcaaaaaacctcgaattcacccttctttgagaatcaagtaactatttttttttgtaagagagtgttaaaagacatatctaccctcttttggctttcaatttctctaagctagtttggactttggaactatataaattttggtcttcaagccaaaaaactacataacaaagccaaaaacttcatccacactaatccgagccaattttccccactttggagtagctctgggcatgtcggtattcaggtcaggttcggatcaaatttttcggattggagtttttcgggtttagaaattttggattttttttctttccatatttagaaattttggatatgttgggttatacgtacaattttgaattgggttcggtttgggttcacttctaatacaagtaattcgggtattggttaaaaacccatacataaccaaaattattttgggtttgagtattacttacccaaacattgtccaattatacccaaacatatattaaaatatccataaaaccccaaagatctaaaattataacaaatttttccttaagaaaataatataaaacaagaagtaaaccttgttttgagctcgttccataactcaaatcattaaacaagtcacaaattcaagttattagtgcatatatgtcctcatatgtatatatatgttcaaataataaaaagtactcacatgtatcgggttcggttcggataatacccgatacccacatttatttgaaaacagaatatgatcgggtaattagccgaaaccgaagtataacaagtttggatatttcaggtcgggttcagttcggttctacggattcggatattacgcccagacctaccctggaacatattaaatgtaatattttttccttttttagtgtttaacataatagctcttttattcatgcttaatcttggagctattttgtactatttttgacatttgcttcgtaatcacaatcatcaaattttattttcataagtaagaagctttttcgagacttaaaactcttaagtttttgatcgaagtgcttcaatcatctttgctaacacttcatgaagaaaaccactttttcgcgaatagaactcgaattctataacctgcaaagctttccaactgctcctcgaatatcttcttatcctctaagtcaaggctactcaatccttgttgaggagtaagttcatcaacaccaaaacgctctagtgatctaacaagagaagaattgggaaaagtatctttgtttttaccaagctcaaggttcatagacataactttcttcgatttcacaggtgattcttcaatatctccccaaacaaacttagacaattgaaaagccctgagatcatgaagtctgatatgttcatcaccattcttggctttcacaagattgttctcatactttctctttaaactcgcaagcattttcataaattgaaccttaattaaagacatcaaactaatagttttcttgttaaaaactattaatatcttcaaaagcacttacctcaatatcgtttttgtaatcgataagagtttgtaaaggcacaatctcatagtcttcatgcatatataacataaaaagtttagttatgaattttatgaattgtaacatgcatgtatagaagtgaatgaggtatttattccattcttcttattagctttatcatatacagtattccaaataaaatcagaaatgaaaatcaaaatcgaatccaacagttgttcgaattccaaatatatataataataaaaaatctccagggaacgcggaacataatgtcgcttaaagtctcgagttttgagagaaagtcaaaccctaaacaaatctgctgtttatttactttaaaaaaaaaaaaaaaagaatatacctaaatttacttgggcgttactccaatttcctaaatacctcactgtcttttctttttttcttttttctttaaattttgttttgtgtgtcgccgacctctctctcacgtaccctaaagtagctttgatagtttccatattgcatattctttcacattcgcagcctctcttccaaagctctcagctttgttttcttttggatctgaggtttgagaaatcatcaacatgagtttccatagcttttaccagagagcttctagcttattcaaggcttacccttctacttccaagattcttcttctcagcactttcaggtctctccttattctcctttagatctccttcaccattctacacttcttcttcttcttcttcttcttcttattcttcttttagctgtagaatctatataactcttttgtttccaattctctttatagatgctttgactgttttcttagtatttttagtcttgtgatgtttttgaccactcctatgcacgtgtccgaatttttcgcttgtcctcttttggcctcttccctagctgtgatgcatgatataatgcataccatctctataagcttcatacctttttcgactcagatctatgttttttttaagtaacgtgggtctaacaattattttggtttgtgtctttttatgtattgttgtccagtggtggtggtggtgtactggtgtattcagactcgaatccattgaaacgtatattacacgcagacgctactcttgactcagatggcaacccaataaggaagaagaaggtggtcgttcttggcagtggatggagcggctacagcttcttgagttacttgaacaaccctaactatgatgttcaagttgtctctcctcgtaactttttcctcttcactcctctcttgccaagtgtcaccaatggtactgtcgaagcccgtagcattgttgaacccattcgtggtcttatgcgcaagaaaggatttgagtacaaagaagcagagtgtgtcaagattgatgcatcgaacaagaaaatccactgccggtccaaggaagggtcaagtcttaagggcacaacagagtttgacatggattatgacattctcatcttagctgttggtgctaagcctaacacattcaacacccctggagttgaggaacatgcctatttcctcaaagaagcagaggatgctctaaacattcgtcattcagtcatcgactgtttcgagagagcctctcttccgaatctaactgaagaagagaggaaaaagattctgcatttcgttgtggttggtggaggaccaactggagtcgagttctctgcagagcttcatgatttcctagtccaggatgtggctaagatttacccaaaggtccaagagttcacaaaaatcactcttcttgaagcaggcgaccacattctcaacatgtaagttccacccatcaagcttcattaactttggctaaatctactgcttttccaatgttggttcaattctacttcaggtttgacaagagaatcactgcttttgctgaggaaaagttccagcgagatggtattgatctgaagacaggttcaatggttgtgggagtgactgctgatgagatatccacaaaggaaagagaaactggcaagattgtctccgaaccttatggtatggttgtgtggtcaacaggaattggttcacgtcctgtcatcaaagactttatgcagcagattggtcaggttagattacacttgatcacatgaagaaatcatttgactaaccaaatcatttgctagtgtcccacctaactagattgagtatggttacagggacagagacgtgtcttggctaccgacgaatggcttagagtagagggatgtgacggtgtctatgctttaggtgacactgcaacgatcaaccaacgcagagtcatggtatcatctctcttgacattgttcctttgtgtcacatctcagttgatgaatgaatctttaaccttctgttttgtcttgatgttgttgaacaaacaggaagatatagctgcgattttcaacaaagcagacaagggaaacacaggaactttgaagaagaaagatttcaatagtgtggttaaagacatttgccagaggtaccctcaggtggagctctacttgaagaagaataagctgaagaacattgcaaacttgctcaagagtgcaaatggtgaggacacacaagtgaatatcgaaaagtttaagcaagctctctctgaggttgattcacagatgaagaaccttccagcaactgcacaggtaagcttgttatagatcaaaacaagatgaaatcaatccaccacacagattttgatgttttgattcttatacaggttgcatcacaacaagggaagtaccttgcaaagtgcttcaacaaaatggagaaatgtgagaagaagccagagggaccattgaggttcagaggagagggtcgacatcggttccagccattcaggtacagacattttggatcgtttgctccactgggaggggaacagacagcagctgaactgccaggagattgggtctccattggacacagcagccagtggctttggtactctgtctacgccagcaaactggtgagctggcgcacaaggatgctcgtcatctctgattggactcgacgctttgtctttggccgtgactctagcagcatctaagccattcttctccatcatttttttgttctccttttttctacggtttcctttaaatcttcccgctagtttgttgtcttttaaaatcagatgatgatgactatacatgtcattcctatattttctcaatcacatgaacttttgattcttgaacaaggacaagcatatttctaatttaattcataacaaagagttcccttctcatacatgactcttcctctcccctcgatcgctacatcttcgatctcaacttcttcgatcgataagccttaaaaggatttctatggtaaatttaagctcaagtcagagcgattcaccaaaacccctagaagaagcaatttgaaaagtagggttgaaggatttgaccgttggtggaatccaggccattagatttggggactcttggaccttttctcagtcgtaaaacatatggcccattaaacttttaagaagacccaaacattcggcccatcatcgtttagatactccgtcggagtcttcttcttcgtcatcgtcccaaaaccaaccagaacggctctgtgatcggaaccgccgtatacatcaattcaactacgtatgtgccttcgtcccttagcttagccagattcatcactggggatttcatcagcagccgtacaattatgccctctggttgcagtatcagagctctctggatcatcaacaatcaagacactgttgttttctccaggtttcaaatttcttctataaacccaaatctcactcattccaatttctactcttaatttgtatgcaaaatcaggaggtttccggtcgtcgagaagcaatggtgctccgcttacaagacggagaacgaaaacactggattagatcttcctagacttcccactgatcaacaaatctccgattcttttactcgaagaaagagacggtacaacactttctcttgtttagcttaattagattttctggaaatgtaaaattgaatttcgaatccgaattagggaaggctctactcgtggatatggtatacgtgttgctcaatccaccaaaggatcggattcttgggttgatgatcccatcactcgtcatattatcagcctttgcttaaccgaagaagatgatgatgatgatgatgaaaggaacattctctggcctattgctctgcataccaaagcgctttactctatcctcgtcttgcctttggttgagccaaaggagatgaaggattacgtcaagctttgtaggagatctgattgtggaccagctgttggtgaagatttgagtttatcatctctcttgcttaacatttcatccattacagggtacttatagctccttaagggcaatgcttttgatttaagagtgatgttcaactccttgatggatgcacttgtcttgtcactcatgttgtagggcttttatggtggctcatgcatttggtgacatcatttctggtgatacagtggaacctgaggttgttgtaagtgtgtcaccatcagttggggggttgtttgattcactaactggaagcattggtatctcatcgagggctaaacctgtagctgcacctgttgcatcatctaacccgtctggagctgcaataactggagctacagcatcggatgctcccaaagcagggtcaagattactggatagagatttacttagaaactttattgctactgctatgccgtttggttagtattttccctctttcatatatggtatattctgttacctggtagactttgtttcctgattgatgtgctatcaaaccctgaaatcttttgatcacttctgcaggtaccccattagacctcagcttgtctaatatatctgctatgaaagcgaatggtttttcctctgctgatcctcctccccaagaacttaagcaaccagcatggaagccatacctgtacaaaggaaagcaaaggctattgttcacaattcatgagaccgttagcgctgcaatgtacgaccgcgatgagattcctgataatgtatctgttgcgggacagataaactgtcgggcagaactagaagggctgcctgatgtgtcgtttcctctagcagggctgagtacagcccatatcgaagctatatctttccatccatgtgcccaagttccagcacatgggattgacaagcagaacattgttttccagcctcccttgggtaactttgttctcatgcgataccaggcaggttgtggactcggaccaccagtgaaagggttctatcagctatcaatggtttcagaagacgagggtgcattcctcttcaaggtgcacctcatggaaggttacaaggctcctctgtcaatggaattttgcactattactatgccctttccacggagacggatagtggcatttgatgggactccgtcagctgggactgttttaaccacagaacactctgttgagtggaggattctgggcagcggacgtagtctttctgggaaaagccttgaggcaactttccctgggacaatcaagtttagtccattgcagagcagaagaaaaggggatggggatgatgaagagagtgaggatgagagcgctgagaatgtggtgaacgtggaggacttcttggtgcagaaaatgaacaaggatctcccagcagctgagttggaggaaccgttctgctggcaagcctatgactatgccaaggtatgtatgtctttggcttccttttgaaatcttttggacttggttgttgttcaaatctatcttctggtttacaggtctcgttcaagattgtcggggcatctgtatctcgaatgtcaatcgacacaaaatcagtaagctttcgcaacttgcaatgattagttaacagtgttagcccatattatcgacttattatggcctccttttgttttactaggtcaatatctacccaaccacaaagtcaccggttgagttttctgctcaggtaagacactgccaacaatatatagtgtataaatattgaagtgcacaggaaacgtttgaaccggattggataaaactctaaaggcgctctacatgatatgtgcgtaaacaggtgacttcaggggattatatattgtggaacacattggggaaagctccatcagcagccgtcgtgtgatttccccaagtcgcagcctcactggtattgtattttcccatcccaaggaagtgatttatttgtttgagtttgaaagcattaaacgtatgaatgagcagtttgatttttacagcggaagtgtatctgtacattattgttgtttcttgagagataaagaaagatgaatgttgttttagttgcaaatctgtctggaatggaacatgtgataataaaactcgtaaggtggttgtgttcatgaagttgccactgtttcataattagtctacaagcctaagaaagaaattgctctatatagagaatgctatctagatatagtatatatccagctcataaaggagattataatccaaggtttgcagcaatatgaggtctgtattttatgaaattacaaaattagaagaaaaatatcaatcaatttaaagattgttgttgccacgtcaatgacactgtctctgtagttccaatgagcttggaataaccaccgacagatctcattcatagggagcaagctgccattggaggttaattccatttttttcataataaaggttaactgtccaaactcgaaaccctgatttatttagttttcaataaatgttttcatgccttttaagagtgtgtgctaagctaacagatgagctgttattaccttgaaaactctaatctatcttaatttaataagttcttaaatatctttccaactttttttacgctttaagaaaagaaaaaaaatcctatttcttgaaacgtaatgttaatggaaggagtcaagttgtcttttgaaaattggattacctcattagaaaattccaccaatttggtcaaatagagacgatgagatttctaagaagtctctccggttcagatctggtcatctaaagcccttcttccgagatctacgactttcttcctcaagtcgttgtctgaattctctttttttccgaaaacagacaccacctgagtctgctgtctgaagcctcggcggagggagatgatgaagaatcttccggaggttggtaatggcggtggctcgggttttccggcggtctctgtcggaaataagaagaataagtatcagagaatggactccgacgcggaggaatcgcagaatcatcgtgaagcagaggctagaaacagtagaaccagaaaatacgttatggcttgtgccttttttgcatccttgaacaatgttcttctcggctacggtcggttttacttatataatcggattcttcttcttcttctttactttgttgacttacaaaaaggtatgtgtgctctgtttttggtatttgtcagatgttggggtaatgagcggtgcggtgttgttcatacagcaggatctcaaaataacggaggtgcagacggaagtgctcattggtagccttagcatcatctcactctttggcagcttagccggcggcagaacctctgactctatcggtagaaaatggaccatggccttggctgctctcgtcttccagactggtgctgccgtgatggctgtcgctccgtctttcgaggttttgatgatagggagaactttagccggcattgggattgggcttggtgtcatgatcgctcctgtctacatcgccgagatatcccccaccgtagctagaggatttttcacttcgttccctgagatcttcataaatctagggatcttgctgggctatgtttcgaactacgctttctcggggctttccgtgcatatcagctggaggatcatgcttgcagttgggattcttccttcggtgttcataggatttgcgctgtgtgtgatccctgagtcgccgaggtggctggtgatgaaaggccgagtggacagtgcacgagaggtgctcatgaaaacgaatgagcgagatgacgaagcggaagagcggcttgcagagatacaactggcggctgcacatacagaaggcagcgaggacaggcccgtgtggcgtgagcttcttagcccatctcctgttgtacggaaaatgctgattgttggatttggaatccagtgtttccagcagatcacaggaattgacgccacagtctactatagtccagagatcctgaaagaggctgggatacaagacgagaccaaactgctcgctgcaactgtcgctgttggtgtcacgaaaacagtgttcatactatttgccaccttcctgattgatagtgttggccggaaaccgctgctttatgtgagcacaataggaatgactctgtgtctcttttgtctaagctttacgctcacattcctcggccaaggaacgcttgggataaccttggcgcttctctttgtttgtggaaacgttgccttcttctccataggaatgggacctgtttgctgggtcttgacatcagagatctttccattacgattaagagcccaggcatctgcgcttggggcggttgggaacagggtgtgcagcggtctggtggccatgtccttcctctctgtgtcacgtgccatcactgttggaggaaccttcttcgttttctccctcgtgtctgcactctcagttatcttcgtgtatgtgctagtccccgagacaagcgggaagtcactggagcagatagagttgatgtttcagggtgggctggaaagaaaagacggtgaagttgagcttggagatgctgagcgtcttgtgcgcaaggaacaggagttttgaattgatcatgttaaagtagaagaggcagaagtgaaaagatactcttatggtgttctgttcttgcattagatccaaagaacgtaagatagattttgtaagtgcgtttgatgatggtatagacccagtgcatattccaaagaaaccaactgctctgtttttttgttccttgtttcaagaagaaaccatgtgatactcaactcaaaagacaatatatacagaaatgacagaacctttgtgttcacttcatgtttcacactctccttctaacactcataaagttacaggctctccggacagttcggctatatatcaactcaaacttattcaccatcaaacaacaagaagattttgctagtactaaacacacatacactcacaccctctcttaccttgtgcatcctccataacaagagagaaggatttgatggacggagattgttatcgatcaagaagtttaaagctcgtaacctgggaacctggcttcagatgggtcgaccatgtcaaggaagagataggccatgcctgcaacgccttcaaacaaggaataaggactatcacctccatgcatttctccttttgagagtaacttggggcctctatcaagcaggaaactggcaaaggcttttgcacggtatagatactcactccttcccgtagctctgtaaagcgcaagaaaaacatatgcgttcccacttattccatgacagatccccacgcgcttgagcaatccacggttccaaaccacctctgctgcagctgcactcgcttccagaaactctctctccccaaaaacctgagttttgttttcatttcccagagatcaactctctctcaataatgtattgaaagcaaataaaacaacacacacacaaagatttcgactaaaaaggcaccatcacctcagccgccttcccaagtgtgagggcaatcccaggggctccatgacaccaatgcacaagaatatctttcttcttatcctcttcactagcagggtaatttccacttggaaaccgattcttgatcatatacttaagggttcccttcacatcttctgcctcgtcaggcttcagctgaacatccatcaatacgtgcataataccagcaagtccatgtgctgcaccccagtaccttttgccataccattcaaacataagcggtgagcttcctttcttagccattgatcttccttccttgataatctcctgagcaacttcgcgctgcacactgagtctgagtcattaagaaactgaacgagactcatcaatagctctatcatcctaaagaattgcacttacgatggtatctgaagacaaagtttctttgccgatgtacttgttgataaacagacaagcccatagataaccaactcttccatacaaaagctcgttaggaagatcactagatagtcttatctgtaaaaaatcctcaattcaattacacaaccaagagaaacaaaaactggaccaaaaacaaagctgagaagaagcacaccagacgaaattgtcccaaatagtaattgagcaaatcttcctcaccagaaagcttagctgcaacagcgccaagaccacaaacaccagctcggccacagagaaaagtaacatccctaccaaaaaagtctcatagttaaccaacaattcaaagcaacttgtttcttctatagaactaagctattagacaagggagaagaaaaagaagataccctgaggaagcagaagcagtatcacaagctttgacgatttccaagcagagggaaagatcgttggcgttgccagtaacctgataagctctaaagagtaaaaacgcagctccaagagttccagagtaaagagtgaagtcttcaacagtctgtccactaaaaccccaagtttcaatcactacctgagagataccaacaataacaacttagtgaccatttcagagtaacctaaccaatcacaaggaagaagagtagatttgcgcttacggtttctttgagatccaaagcggaccgcttgagctgctgcgagagagacgaatacggcatagcaagcagattcctaagcgtatctcctccagatacactttccttctccttcacgaaatcaggcatcacgttatcgaagaaccgacccgccattgtcgtctctttccgttaaagctcaaaatcgattttgtgttctagaagaaagactaaacgacatcatttttagacgaccggttcggtgagttggttacacgtttttggtcaacgtggcatttttataatgaaatcatcagatctacgcaaaactttgaaagacgacagcgtttaataatctccttctcttgtcttgcttccttgtgaatcaaaaaccagcgatcaaaagtcttcttcttgtgaatctgtgatctcaaaagctcctttaaccatggcgacttttgatgatggagatttcccagctcaaacccattctccgtctgaacacgaagactttggtggctacgataatttctccgaagcacagcaacctccgactcaacatcaatccggtggattctcttctttcaatggagatcctgcttccccaaatggatatggatttggtgcttcttcacctaaccatgacttttcctcgccttttgaatcttccgttaacgatgctaacggaaacggcggcggcagcggtggtgatgcgatcttcgcttccgatggtccgattcttccagatccaaatgagatgagagaggagggtttccaacgccgtgagtggcgccggtcagtgttctaattctcgctttttcatttcaattcatcgcttgttatggaatagggctagatctcaagcttgtgactatggtagattactagatcttaggtggaatttgaatcattttagctttgatttgattgtgcgatcctccacatttgatcaactattagaaagatgtgacctttttgtcattgtttccgcatttgttactgaaactgaaagtaatgtgttttatgactgagttactaaggaaattgaagtaggtcagatttcaattgcaattcatctgtgatctgctttggaataagaaataacctgagtagtatatgtgttgtaggcttgtagctattatcttcttctgtgatgtctccattctgtattagattagagacttgaaccgccacggtttttagttcatcatatacgaaagaatctctgcgatctgtactggaataggagagaatctgaatagtgtatgtgttgtagctatcatcttcttctgtgatgtgtcaattctgtatcagatagaatggaaccaccgtgctttttgttttatgtatatgaaagaatctctgtgatctgatttggaataagaaagaacctgaatagtgtatgtgttgtagctatcatcttcttctctggtgtttgaattctgtatcagattagactggaaccaccatgcttttcttgttcgacataattaaactgatattttggcacgcattggtgcagtttgaacaccattcaccttgaggagaaggaaaagaaagagaaggagatgcggaatcagatcataactgaagcagaagatttcaagaaagccttctatgagaaaagagacaagaccattgagaccaacaagactgataaccgtgaaaaggagaaggtaagtagtgatagaattcctattcacagccatttgggattttttggatgtattggaaacttgtgtgagttttgcctctcttgcagctatactgggctaaccaagagaagttccacaaagaagttgacaagcattactggaaagcaattgcagagctaatccctcgtgaggttcccaacattgagaaaaagagagggaaaaaggatccggacaagaaaccatcagtgaatgttattcagggtcctaaacctgggaagccaactgatctagggagaatgaggcagatattcttgaagctcaagacaaatcccccacctcacatgatgccgcctcctcctccagccaaagatgccaaagatgggaaggatgcgaaagatggcaaagatgcaaaaactgggaaagatgggaaggatgcaaaaggagggaaagacgctaaggacttaaaagatgggaaacctgcagatccaaaggtgacagaggaaaaacgtccttcacctgccaaagacgcaagtgttgaaacagcgaaacctgatgctgctgcctcgggagagggagagaaacctgtagctgtgactgaggccgagggaaccaaggcggagtgaagggtctttagtattactgttgggggattatttgatattgatgaagtcacaatagctgcgggcgaaaataagaagaggtaagttatgtgcacatagaagctcttatgggcgctgtctgtgagcacaacatttcctcttctggggagagaattttagtccttttgtttttggttattattttttattaccattatatttgttctgcaaaatttggttattgtcttggatgatgttcaccttaaatcattttggttccacgtattttacatttataagacttgagagaagtaaaggtttgttggatgaatcatttgattgtattgtgtgatgtgggcatgaggtagttgaggagtgtcatggcatgtgaactatctttctttacattattttcgtagtgacttgataatggggcacgtggtggtcaggtccagttgtttcgtctctttccaggcaagcaatgtatgtataatgtatgtaggaacatgtaagaaagtgaatgataaacacattaattttaaggtatattattattttgcaagagtagcttagttgtgttgtcattagagagagtggggcatgcaaaagagttgagctaaaaaaggaatgagattgcatattacattattacatcttttgtaaattcttatatagtaatgtcccacaaacaacattatagatgatacacacatccctatggagaaggaaaaaaatgaaaagggacaacatagaatgttagtagtcacacacacaatgaaaagctcttaatcccctaactttggagatggctcactcattgtcttctctgtgttcctctctcccacaacaaaatttttttgaagagaggctaattagagaacaggggagaagttgaggcgagaggtgtaagtagctttgggaacccagttactggggatgacgtcggtggcggagagtgtcttattgttggacaaagttgtgagcttcacggagaatggtcccttgagtggtccttcgacgatgcaccagttcgctccccatatgtgcttcatcgatatccactccttagatcccgccttcataaatcaacatacaaatgaagtaatattaagtatacattttaaagaaaatgtgggagagactaatgagaaatattacttgacgaatgtgcatagagccaatgtctccttcaccgtcttcatactcaatgagaagcgataaccaataatcagttgatcctgcgttcacatgaaacgctatgttcttccctctgtatttgcatgccgttctgttttgcaaaaaacaaacaagtgcaagtgtgtcagagatccatatgtgtgtttgtgtttatgtgtagtcaaagctcaaaatatgggaccatcgataaaaaacaagaacgccgttaaagtttctttatttgtttactcctcccaatgtaagaaaaaaccatttaaatgtactcattatttgttcgttagcatatagtagtcaaataaaataataagatagcgcgaagaggtaccggcggtagaggatgtttaataggccacggttgcggatgacaccgttatggccgggaatagccatatgtccaaaggcggcgccactgaggtcgaaatgagtgtgttttgctttagcagatggtcctgacggtgactggtcggtggcaataatggtgactgctctcttagagcaaatggtcttgtcgagacacctgaccttgtagcatgcaccgcagccttcaccacctttgaacagaatcggactcaccgctccgactctagccttaaacggcttcacgtccaccaacgatccgtaaccacaagctcctcctgcggtttcattcataattaagcccttgcattattattgatttcgcagtaaacttttggtctgttacagtaaaaaccaaacaaattgtgagtaaaaaagtaagagatgtttaccgctgctgccgtctccctcggcacttccgtaccaggttgcggtggcgggaagccaacgagtggctgccacttgttgattggagtgagtcaacggtggagtagagccagagccacttattagaaggtggaggaagacgcatagtgtcggtaggatgaccggaaagagctgcattttgaccgaagagactagccaacaaaaaaactgacactaaccgagaaaaaaagtggagaagtgagaaagaattgttggttaagttggttaaatagagagggaaggaggaggaatggttaagtctgcaaaaaggaaaagtcaagtcttttgcatcagataagaaaatgacgataatgtcctagagccattcttcttatttacgtagtgtgccattttatgagggggggatgggacctactgacagttaggggccttgatttagcacgatcccgtagggtaaagggtgtgtgtgtgtgtgtgtttatgcaattataagattccatcgtttttatttttaaagccaatgttgttggttgggacaagattcttccgttactcttacacttgttctttctttctctttttttttttctttcttaaatactactatatgaccatggcgtcttgtttaacattgttatatcggttgtctttatggattcgattggtgacacaaaccagtaaaagatcaaatgtaaagaaaaagcaggtaaaaaaataaaaaatgagaatgattagagttgtaagcctagtgcggattgatagaagttaccgatcaaaacatatgttttgtttgtttcaatatagataaaacaaagagttttttattcattttattagtagtagaatgtagtgaattatttgaagatgtgaggatatatgacctcataatctaagattagcaaaagtgacaattgtaaataatcttggatttgtttggtatttgaaaatggattaattttttataattgtaaatggatttttttttcagtcaattcacgagttaccaatttattttgacatcatcagattcaaaactatttaacttaactaataaaatatagaaaatgtgaaaaaacgattttcaaatttgtgagaaaaaacataaactttcaaaatatcatttatatcccaaagttttgtttgatcttttagtaaaatagttaaattttattgatttgtatggattaggcatgtcgtaaagttaatctggttaggctagattagttaatttttgttgaaatttgcttattctaatatttcagatgagtttattgctgatattataataactttattttttgcatcgaattgaaagtcggtgggaagaaaaataaataatcgccaaaatgtttagccaaagaccatattcggcctcctaagtaattatcttttctcattataactacctctttcgttttccatacgtctttgctgtctggaaaaatcaagaaaagtttaaaagtattcgaggctttttgctaggattaagaattgtgtgtgttttttttgaaaattgtatttcgatctgagggattttgattccttcactaaattaaatgaccacataaagaaagatgttgttgttttggctagatgtagactgttaactcgaagttttttttttgctactcatgtaaatatcatttatgtgaaaagttaggttttataacaatgttaaacccttacatatgattcctcggaaaaaaaaaattaaaacaaggagattaaaaaagttttgggagagatcttggtagatatcattgcagccaaaacgccattaactttcaataattgcgtctgattcttctagaggtgatgatgttcttgatatctccatcgatgcacttgaagatagtgacggacgacagttggataattgcgtctgttaactggaagttaactccataatactttttttaaccggtaacttaacctcatacctaattcacctaattcgaccaaatcaacaaaatttaaatattttactaaaaatgaaccaaaattttaaaatttaaataacagtttgaaaaatgctctttcgttcaaaattttaaagcttatgttttttcacgatatttttcctaataaaatatgtctacagtttttctttggaagattaagaccacatttgttttgctcatggaaaacaacacaacctctttttctttttttcttttttttggacaaaaacaacacaacctttgtaaaataaaagatttaataaaagtgtatctgatctttatatgataagatttggaaatacagaatcttgatggccaatgctttgctcacagcgcataaatcatttcagcattcgaagatactagtattattcttttaactgtttccgaattttcgtactttttttttaaatcaacactcaacaaccaccaaccatgcttagtgcattttgttttgtttttgtagattcggagaacataaaaaatgttttaaaacctaattttgcaacatataagttttttaagaaaataataattttgatagaccgcacatgactctcgccacaatccttactttagattattcgaccattcttatactttatttatctttctaagaaaaagcttacaagaaaattattctttatagatacaactttggaaggaattacttctagagtttaaacttcagcttacaaagtttgatggcataatgctggttaaagcgtagtcccaaaattatgtgatatgactcatttgtaatgttgtacggtatacatgtgaactatttatgtatttattaaagtttatcttaagaactgataatttctatcgtttcctatttaaatacgttgattgctgcttgttaagtgttgtacctaattaacctgtttttatcccacttctgatttttttttaaaaataaaaatgtttcttacaaagttttgatattgctacttctacatccgcagattgccagagagtttggtctaaatggggacatattcatttcaagttcatgaagctcttggtcaaaacctagccaatcatttggtttcaagatcatgttcacaaaaatccatggaatcagtgatataatgagagcaatatcgatcgtgttttcccaccattggatgatcaaaccttgcagttcaagggtcaagaaccgataaaccacattttatttcctataaacctaacaaattcataggaccctcatggagctgtagaatctaactaattttaataaggtaaaaatctatagataagcatcggagatgaatgtagatataatgtgaggcctgaattacacaaaatcaagtgaaatgtatttagttaactacttaataatcatcatgaatactggatacatgtgtgcattattaaagactagagaaatatattattgacaacttcaattaaaaaacagagaatagttattcaaatgagaatgctttagctaaaagtgtgaaagtcaaattgtattattgagaatgacaacaagcacaagatgttacgtaattcatgaaattacaaaatcacatgagagtatcaataaaaacagttcatatacgaatcttacagttcacaaatctcattacattctcaattaattccttccttcgtatatttacacaataagactttatccaatcttttcccatgtgccccgtaaagccaatacgattactcatcgaataccattggtgttccattattttatttgcttataacgaatttgtgatgatgagcagtgatgctatggttggttaacaattaaatagtagacgagttttgagattttttatatgtaattaaaggcaattccgaccaagatatgactaaccctgtcctgacagaactagaaccatttcataccaactagcctgcagaatataaatcttgataattttggtcaacaatagagtggagagagatttacatacatcacatagtctttaatatgtaagaacatcccaaatatatgtattcaacatttacaagagataaatagtgaaagaaagagatgcaataagaagccaaagtaaatgcacacatggaaagagcagactctgctttgccattttcttctacgagtttctttgttttcacctctcaccggtttgccctttcattaatctaactgtccaagctcccggtttggctccatacatgggttctccaacaacgtatggaggcggctgacgagcatcctgcaggagtgcaactgtgcttacattgtattcatcgtcactatcataatgtcggtgagggtgaggtccaagagctttgagcaacatggctattaaaactgatagaccctgccaataaacaaaggaacaatgtgaagcgttgaaaccaaacaatttagaagcaccgtaaagtagaatctttttgctattagttaagatacctggacacagacaatagagagacctatccacttgcaaatcttgaagtttgactcgatgaacttagagaactggtggaaagcaccacttggatcctctggaaagtcctgatgaaagcttctaaaagattagaatcttgggcgtgacaatagagagccactcaagatttttcaaaagaaaagagatagagaaactatacctttttccagtcacggtttagaaagatatcggcaactacaccgccttcaaccatagttagcaagactatgaatcccatatactgaacccagtcgatgagccaataaacagatgcattatacacataaaaaaagaaacacaagaaagaattcaggaaggaatgatgaaactaccaaagaaaaacaggctaacgtagtgatgctacaattcatcaatagagttgcaggaacaacttataaaaaaaacagaagtttaccaagtaaaggcaacatccattcacggtttcagcagctatgtgcccggcacaagtgacaacacagagaatggccccgagaccaagaaatgaataaatgaacctgaagctcataagaagattggttcagaaattttcatcagcaatggcatacttcatatttcataacaatgataacttccccctcacacaaaaacaagatatgccactttccagtgccatcttacaagaatcctgaagctatctcttccatagcctaactacttctagacacctcaagcttacagaatttatgatctttccacgggaaaaacatagtttcaccccaacaagatgtgtcactcatttccagtgccatcaaatttgaaagacaaatcttacaagaatcttaaaactgtctcttccaaagcctaacaacagcttctagcttccacacacctcaaatcttacagaaatctatgatcttgtctctgcctaaattgctcagtaccgttctccaaccactcggaatttaaacaaagatacaaacgcccaaaaagccagaaagtgatcaaacacacaaaaagatgaaactttcaacataccacggaacagggtgatcagaatcagcaaaaggaagatttcccatttgttcttgccattgcctaatcagccaaacagcgtagagaatcatagcaatcccaaccatcccaattagagaattcacgagctttaacatggactgtaaacaacttctcacgatcctcaccatctttaataacccaaaaaaaacctagacgaagagaccagagacaaccaacaacaaattctcttcgtctgttgggtctaggaagaagagaaatcgataaagataataacttttgtaaatcctgttgctccagatgtcttctcctttctaagcaaatcgtaaagttgtaatttttttgatacttgttttccttttttgagctaagaagatatctattgacaaaaaaaaaatcacacttgatgccaaaaaaagaaaaacaattattttggattaccacataattgaattggtccatggtagtaacttgaaaggtcaagtggcttggctatatgaagaagaggagactctctggtcagagacggcgatgattctaggccgatgggtttccttcagttgcggaaacacgccggtgactaattgttccgaacgacgacgacatacggagtttcgtcgtctctcctctgctagtacttgtcgaccttctctcatatgctcttgtctcaaaagcaaatcctcccaagaaactactcaggtgcgtctccttccattgattagggatgaagttttattttttcgctagttttgacggagattctaattccaagtccggtgctttatagattgaacagttggggaatggagaagggttctcagttttggcatcagagattccatgggaggatgataacatatggagcacatttgctctttacatgttctctctgcatattcctctcagttttgggggtttatccattgttgccaacatactccaccggcaggttcttgatcctcagacccaagtgagtctcctttcattttgtctggaaggtttacatttactattaagaggagactgttggatatctagttgaattgtacacttcagagataagcaaagggcagaagattatacttgcagtttgcaatttagttttcttcctatgtgagatgcaatttcgttacggttcatgagtgatgatctgtatgcttttgattctgcaaagttgatttttagtgttgaatttcatggtgtggttacaatatacaggtgctatcacttgtggttctccaaatggtagaacttgcagggacagtcttgctgctgaggaccacagcgaagcctcagtgcaaatcaatcaactttctaaagggtaataacgaaacaagggaaggaagaaactgggtggttggctcagcattgggtttgggatgtcttgtgggctttatcttcgtcacgtcgcttgtagctgatcaactctttggccctaaggtctccccaatcgatctactacaccattctctgctaagatgattatcattttaacatgttgtttgatctcaggctgtacatgaatcagaattggagaagataatggtgagcggggaagtggcgagaagcggatgttttgctctctactgcgtagtagctcccatccttgaggagatagtgtacagacgctttctcctgacctccttagcgtcgagaatggaatggtggaaggcactagtgatcagctcaggagtatttgctgcaggtcacttctcaggtgaggattttgtgcagctgtttgggataggttgcggtctcgggttatgttacagctggtcagggaacttagcctcatcagtgctcgtccactccttgtacaatgcattgacacttctcttctcttagccacgttcagatgacaaggaaaatttccccaccgaactctctttgttaaagacaagacaacgtataaactataaaccactacacttgttccaagcattgttcaaacgatcaaagaagatgggcaacaaagggcaagcatgatgaagatgatgattaaagatcaaattcttaaattttggaagccgtccttcaccttcacatcctctctatggttgatatataagagcttttctcctataactcactaggtccataccaagatatttttgcctgcacatcgagcttttcttacaacaataatcgaagaatctaaaccaaacgacttcgtcagtgctcgtccactccttgtacaatggcttgacacttgtccttacgctactcttttagccacgccgtaacagagaaggaaaatggttccaacgaatctttcgttgtcaagacaagacagcgaataaatagagtgtaaaacatagatgatctgttccttaaagctttagagaaagagtcgtctttatgaaagaaagtgtgttgactaaaccaacaaaacaaaaggtaaataagagcttatttaacaagtaaaaaaggttaggctttattccaatttccaagtatatgtcacggcttagtttatgcaagaattgtaataatacaaaatcaaaacttgttaatggggaaaaagggaagcaccaaccaataggaattggtggtccattacgtgatgaggattgcacagctggcaattgtcaccgcaaacatcaaacggcccttcttccgccacgtgtacaaaaccattttggatccgacgcacaagatgattcatttaactggcaaaattcacttatgtttgttcaaattttcaacataggaaggaaagaagatatatcttttaataaaagcaatggcaaaattaggaaaaaagaattttgggaatcataaaacagcagagatagcttaacttaggtgtaaggttccaattagtctattaataacatttcacagctaatttatatttacatataaatcccttctatattacagagagagagagagacaaggacacaaacaaaacttttgaagacatctctcacctcccgagagaagagagaatcgaagaaagaagaagatgggagcatttgaggatcaggtgaagatgagggcgttggagctgaaacatctgttcaagaaaggcatcaaagttgtcggcaaatcttgtaagaagggttggtccaaagtcaagaaccttcgtcgttagattcttcattcttggcctcttccattacatcctctccctaataatctctcttttgtctttgtttttgtttatttttttgaactctcatactaaagagttttgtcttcttactttttttatgggtttcatatttatttatctctaagtctttcttaattgttgttttcttcattatctttgttttctcctccttggatttgtggaggatgtcaatacatcttctttgatggatatgagatctactaattatgatgctagaatttacagattcttttttaccattcattttaaagaaaaaaataacatattggagaattacctaaatgattctctttcaaatttcagctttactttaaagataagcctacatgaaccctagatttttcctttgcattaacatgaaccccatattttttaaatttgaacaaaagggaaaaacaaaaagaggaaaaagaataatgaaaagcttatggttatttattttaaatggctgttttatcaaaaagttgagctttaatgggccggtatgggcctttttcccaattagaaattcggtcgagctttgatgggccgatatatgggccctttcccaacgcttaacgccacagttgcaatatataatgtttgctagggtttcaaaggaagaagaagatataaacaaactcttggtggcggtgagaaaaaaccatcagggctcatgatcgatattctctgaactagagaagccagtgagcgattcagtttccattattactatcaaagcttcgtactttttgttttcgtcgcatgatgtcttgtagttttcttgttaattgatagaattctattcattgaattaagtaaagttgtgcttttttagctttttctctttgtgctttgcaaagtcttaacctttcttatgttttgttagtatttgtgaacttgggtttagataaagagccagtgatgattgaaaaagattgtctacattgtttgatgtaccactgaaatgaattctttaattagtctgaggctcattgctccttcaattttcctgtctgagatttgtatctctctttgccattgttgcagctttaaggcctatgatgattcaaattttgcctacattgtttgataaaccaatgatataacttgtacaaaatgttttctgaggcctttagtgttgtttacttagagaatttgattatgatttttgacggtgtgaggctggtgatgatgtttcatatctttgcctacattgcctgatcaaagctatttttggctttgaacaagtgagtgaatgataaacttctgaagcctcatgagtttactattgttaattttgcctaggaggagtgctagttttgttgtagtgtagagattttatatgctctatgttgttgtctccaacgaaatccgtgaacttgtttaaatcttaccatcttagttatttcgtagtcgtttggttgtcatacctgaaatctgtagcaatatctataataaacgaactcgtatgtcaaatcatggaaaatggtttagaatgaatcttttgcttgtggaaatactggatttggtttcgaccacacaaagaaactctaattccttgttcatgatttggtaatacttccatctctttgtcttaacaatatgtagaggaagaaggatcacaactgagaattcaagccttggcctctcctctcctactggaattttatttggatgtgtcatgtttccatttaacttgtattgtatgttgggtaaatttcttgtatttagaagagccacaagaaaatttggttctgactaatgattgtatgctattttgaacttgttccaaccacattgtaatttggggctcagttccatgatttccctatcattttacttggaacattatctgcttttcccactatttaacaaatgtcttgagtgttgttgaccatacgccatttctcacatccaaaacacaatgacataaacatgacagacggggctctagcagtgaatcaatctataagattagctcacgttctctaagcccaataacatacaaatcaaggcccaatctaataagtgtaatccaacgtgactcagaagtcagaacatccttgctagttactatagttgctacttgctgcgtgtccatttgtcatttgtaaaattgtccttgtacgccaagctaacctttatttgcttaacaagtaggaagatagattttagcttgacctccaaggcagttctacaaatgacaaatggaaaggaagagtcaaacttggtggtttatgatcaactttgttatctttcgtttactttgaatacatgcaacataatccataaaatcgataaaattttcatggtaatatactaatattggaagttagagtttactgatgtataaacaaagagtgtttaatatgtgtgtttagaaattttatttatgcatgatagccataacaatataatttatacaagatactagacgtaagagaattactaatttactaagttgaagatttgatagtaaaaactgagccgccatcatcatccccttgtcgtttgaagtctcttgcccataaacgacaaagactttttgttactcctcgtgtgattttatctttaaaacattggaaaaaaatgctgaattgtgaaatcgaatcaccggtttaagcactcattaaagacattaaaccaaggaactaattgtaccggagtcggttaaacagtttcaagtgtttgttataaaaagccgtgttcggtgattctgtattcatgagattataaacatggcgttttacctctcttcttagtcctctatctttctctgcttcttgttgcattcttgttcttgcgtagtaacacgatcattcatatattcatattcatctacgaagtttttcgattgtgtcagttgtgtgttttgttgattattgtgtgtagttttttcattttgatcttgctgcataaagaaagggcctatgatggattcaaattagctgacatcgtttgagaaacccaatgatgacgaacttcttacaataatatattctgaggcctatagttttttttgtttttccttataaaatcatattcgtatttgagaaggctttgtgttcataatcttttttgcttacaatatttccattgtacatgtttaattgcatttacttatatgaattatggattaatcaaagactggtaagtacgtttaatttttttttgtagtgggagactcaaaccggatttctctaattcgaatccggttaagtgtcgtcgtatagtggacttggacagagacagagaagacctagggtttgttttgtcgtgtgtctgggaattgtggtctctctttggcttgagcatgaagcatcttctccgacaacaattcagtaatttcttctggatccttccttgcagacgttccttcgttcatttccccaaaaccattccttcgccggagctcattaatgacactctcaagcgtcggatccagagagtccaagattcgtcagtctccatcactccgttgctccgagaatggtgccaacgcggaaatcaaacgggactttcaaaactcaggagcatcattacctctcttcacagatccaatcgcttctctcacgctctccaggttagagatttcaaaaacaagcaaaattgggacttgtacaaatttgttaatcttaggtttttttttttgtgctattaggtatcggattggatgattgaacaaaaagcctataagctgagttcaatggattttgagcgacgacttttcttggctgctaaagttggtggtgtggaagaagcggctaagttcttcgagactgttcctgtagaaaagagagatatttatttgtacaacgctctcttgagctgctgcaaaacacacagctctttgggcatagctgagactacttttcagaagatgagataacttggttttgctgataacaatcctcaattctatagcaccatgctctgtctctaccatcaggctgaagatcacgacatggtggtgaagcttcttggcgagatggacgagaaaaagatgcaaccccaaggactatgctttgtcaagctcttgacttcttactctatggcatctgttgtagatgtacaaggtgtggagaagtttttgagcaagtgggaggtgatgattcaggacaaatggaccacattctactttccaggattggtctacatacgagcaggatttatggaaaagggtttagctttgcttcgtaggtcagagacatttgttgatgacggctgtagagaaatcatatatggatgtctcatgactgtttattgtaacgagaatctaacagaggatgtttaccgtctctggaacttggctaaggactatgggatatcctttgacagttccagatgttctgatatcgtcaaggcgtttacgaagaagggtgatctcgatggggttatggaagagtggaatgagtgtcccaatcttgatctgatggactttggtctccaacatagatgcgtgaaggaggaggctgagaaggttgttgatatgcttgggaagaaggagagcaaatgggagagtttggctcacaaggttaatactttggtggaggatgaagatgctaaagaagaggagaggaggaagagagtggcagaggccatggaagggaggctgcatgaccgctggaacccaaagaacagcatggctctctccgcttttgcctgcgtgcaatatgtggagggtcggagagacatggagagtacagccgacattctgagacttctgaataagcgagagcaagtgtcgcatgcaatggacaaaaaccgattgagcctgaagatggtggaggcaatgagaggaggaggatacgttggtggagatgattaacatatcaattacaattttagttactctgtttgttatctagtttagcattaatctattaggcgtttctgaggaaacacattacacatcaatgatagcttcacattggttggtggagagactaaagtataaaatcaatttgtaactctcattgctatatagttaacattaatctattattagttaactcatttaagacaagcttaagcccaaaaaatgcttgtggatgaaacgaacttgcatttatccaaatggttataagacttcattgtttggaatgtgtcactttctagattcgtacttctctttcctcaacgtatcgaccttttcccattgcatcgactatcttccaactcagtccagcaccgttcatgtcgtacagtagctgatcgtatgaaatgtgtcctcgctcgcttaacagtctcaaaatctttctcaaaccctccatgtctctttgaccctccagataatccacacagctcatcagcacaacctggtgtggtctccaccctggcttgctcacctctattgctctcttccatttctccaccgccttctccattttacccgccatcttgtacccaagagctaaacgctcccatgtgcttgtatcctccactctccacttctggaccaatatatttactacttcctctgccttctccatcattcctttcttgcagtaacccgttattaacaagtgtgggatccgaatatcgaaaagggagtgtccagcttcccactcttccataattttctccacctcctctatgtcatccatcttcaagagtgcactgatcacgcttatgtatccagtgttgtagaacccgtccagctccttgtacaagctccagagacggtacacctcttctttcttacctgcagctccatagaatgacatgagaacctcataggcatgctttcttttctgagcattcaccatctgctctgatttacgcagcatctctagagccttttcagttaatccagcctttatgtagccattcgctgtatcggcgtaagtgcgccagtccaaatgaagcccctggtcagcctcacaacgcataagaaacttctccatcccctctacatcagatacaaccgaataagcatgcaaccgcgtgttcactgtgaagatgtctggcttcacagtctcatcctccatttcgcgcagcagcttctcaaccattgtgtatttcccagtccggacatagagattcagcatcacattgtagggaagacaacctttaaggaagccaagctctttcatctcctgaaacacttgctcagctttgtgcaacaccttcttgctcgcatagcagttcaagagagcaccgtagagatggtagttcctcctctccataggaatagtttcgaaaaacttctctgcttctcccaaaccaccaactttagcaatcaaatcaagccgaatcgcaacatctccttcagagatctcatgaactctatgctcactcatccaatctgatatctaacatcatcacaataacaacaagaagagaaaagataccatttttaagatttggattcgtattatcacagagtaacaacaacaaaaaagatgaacttttttttgaaagtaagcaacagaggaatccagaaatgagagacctggagagcgtgagagaaacggctgaactttcgaagcatcttgatgatgctatggagctccgaagtcttaaccagattcccttgatcaagccatccatccaacactttgataatcgaagcagagggatctccggatctcgcgacccgacgctgcagagtgtcgtaagggtccaacggcgatggtgtggtcttgccggagtggaaaaggaagctccttctgagaatgtaatttggctttggaagaacaagacgaagaagaagaagatgcttcatacttgggccgtgatacagatttcaaaacagagaagctaaggtttaaggtttaaggtttaacattttgcaagttggaggaaaaaaatcaaacctttgggatagattttgtaacgaattcaacttctgtttactcgtcaagcttactcaagtatagggtttagagcagagtactgacacggcgtcgtttaggctataatatgggttaggttcaatgtcaatttctcaaaaccccatattaatgatacttttgtaatgattccgaaattgtctctcgtcctataactttcatcttactaaaaaagaaacagaaatacccccacaaaaaatggaagtaatggaaaaagaaaagagaagagaagagaagagaagagaagagaggaagaatcagagaaacaatggagatttctccttactgtctgctttctcttcttcccattttcctcctctctggtttctccctttcatgtaattctctcctcaatttcttgatgatttgttttctttttcttactatgttcatgttcattataaaaagagagaccattgttaaaaagttaatgaatttgaatgtgcagatgatgaatttgatggtcacgcagcaacaagcagagctcttcttcagacaaggacaagtaaagatcatccttcctaattgatgattctaatatcgtttagaatatatatgtagacacattaatctttaagtatggatcttctgttttctttgttggtattgaaacagcctgcaaagaagattttgctaacaagaactacacaatcataacaagcagatgcaaaggaccaaattatccggcaaatgtgtgttgctccgccttcaaggactttgcttgcccttttgcagaagttcttaacgacgaaaagaacgattgtgcctccacaatgttcagctacatcaacctttacggtcgttatcctcctggaatctttgccaacatgtgtaaagagggcaaagaaggtcttgactgcactgatgtcacccagtccgcatccgcaacttctgattctatcccacgtgcctccacaactgcatctctcgcggttctttctaccttcctcgttctgtgtcttttgttcttatcgtcttgaagtcttaataacacatctcagaacttgttttatgggtaaaaacacatttatatatgcctcttggtcttatgtatacaactccctttcttataaacttctcgaaacacttaaagatatacatatgaaggtctaacaaaagcataacagaatctaagttttaaaaggggcactgccatattacaaaatttgattcttgggtttattacacgaatgatttgatcatcattactcaataaggttgatttacttttctcaccgcgcctaaatgcgtggactgttcactagcaccattacgaagaaacagaggttaagatacatataaccccaggccaaaaggtcaagctccgctcaacaaagctcccactcccaagtcccatcaaatcaaatattttcttttcctgcaacccatacaacagaatgcttcttagttcaacaactacaagatgttcttcagacaagttttgcttatacatggcgaccagagatctccaaacaataccaaatacaatgccccccaattgaataagcttcctcaacaatttagctgagcagagtgattagggaaaaatgaaatacacatatcccccacaacaagaacaaaactaaaagtttctcagacaaagacagttgagccaagtgactagacactcggactattgcataaaacaatgtactaaatctactgatgatgattccttgcaaaaggagagctcagatcgaagcattctgagaacactgctgtaaatcatagttctaaacaagtttaagctcaggacttagaagatcgatagcaatcaacaccattcattctcctccaaatcaatcctaccaaaaagacttaaactttaagtttcctagttacctttggagaagccaccactggtgagaagcctctcaacatacttccccatgatatcaacctcaagattcactttctgcccaatcttcttagtcggaatcactacattctgttgcgtataagcaatcatcatgaaattgaaacagctctcttcatcaaacacatcaacaaccgtcaagctagtcccatcaacagccacaaatcctttaggcacaatgtatttcaacaaacccttgtcagctttcaccttcacccacaaagaatcaccctctacctccattgattcaatcactcccgtcccatccacgtgtccctgaaccacgtgtccacccatcctgctcactggctgcaacgcacgctccagattcaccggagatcctttctttaactcctccaacgatgtttttctcagcgtctccggtgctaaccctactgtgaactcctctgcgttaaactccgtcaccgttaaacaagtaccgttcacggcgatactgtcaccgagcttcacgtcctctaacaccactctcgctccgattttgaggtcgaatcctccgtgatcggccattcccaagtccttgacttcacccatttcctccacgattccagtaaacacggaccggatgctgagattttgcctccggtgatgcgttcttgatcttccacatgatgtcttgagagaaagcttcgatgacttagagacgcaatcaaatctgagattagtcactgattctccagttctgaaggattgtggaagacatactttggggataaggttgatacaatgagtacgagccgccatcatttctcaagaaccaaactttttggcctcacagtttctcaagaaccaaactttagagattttaggttgtgaacaaatgaacggggcaaaattggaataaatacgaagttagaggatcaaaatacaaaaatttgaaaatcggttactttgactcaaagcttcaagctttttgagaaaaaagcaaaatgggaaggttaaatttactatctcttatataaaggttttgagtttggttatatgcccatatgagaggcaagaacaaaaaagaatctgtattctcatggtctatgggaacacatttctatggacttcttgtcaagaagatggcgtccagtgattcgactcaatctgcaagactgttcaatcattaatctctgaatggagtcttgctcccatgggactattccaaagtcatcgttgaaaccttccatgccttctatcagaaactgccacactagtgttcctgcaccagaccgcttcctcttggctgatttgtaaataacatcaaagatggttctgtagaaccgatcccgctgcgatggatcgtagtccttgttcagattcgagagtccaaactcggtgaacagaacaggcttcttcagttccttgtccccatcttcaatgtgagatagcatccattttacaacgaacttgagtttttcttcaaacccttgatcgtgaaacctgccaaagtttcaaactttgtggtttacaaacaagatttccacacatttgttcacacagttcttaacagaggcttaccagtgatcagggtagatatgaaccgaggcaaaatcgatgtttggcgaatcagagtttcgaacaaaatctgacccaagctcagaggcccaccgttcggggttaactgtcagcttttttgggctactgggaccgtagaacccttccaagccaacagttagaagatgcttgttgtcaattgatttaatgaatgctgtcatttcgttaatccagtcctttaaatccacataccagaaaaagaaaccacaagagtaacattactaattttctcaacaattactaatgatccaatgctggacaagaaaaccaccaaaatgaaggagaactcacttgtagagtatccccagagacatcagacatgcagcgaggctcgtttatcaactcccatgcaaaaattgttgggtcgtttctgtactcaatcccggttaaagagtttttacgggtcagcagcacctggcatatgaaaatgagagtaattacaagctcaacatcaattacacaaccatgaaaaatcaaagcctataagtgaagaaaagcttttgtgcggaaacttatccaagtctaccggtcaagcgagaacaaagtttctgaattcagtatctaattcaactatgatgatcaagactaacacatccatcttcacatagaaaagaaataagattaaaaaaaacataccgtgagataattcttgaagtatctgcggatagatgggtcaaagaagaaggaatcattggatgagctgaggcctacaccttcctgccatgcccaattgacgtactgagttttccctccataagcttgtaagttattcactaagctcagaagcaacctaacaccatgtgttttggcctctgcgattacatgatctaaggcctgaccacattaatataaactttgttaagagagagagaggagatcagattataaggagaccgaacacataaagtggctaacgatgaacattgtccaagcttcagactgagaacaggataagtaaaaatcaaactgaatgaacaataagccttgaaatatgcattgcaaacgataacaaatgcaggaagaagtaagtagttgaactgctcaggaagagagatattaatggatgatgcattcccctactagtctatatcttatcatcttcgttgacattctgattaaaataagttgaacgaagactaaatatgtcggcaaaaagataccttgaaaactcgttcatcgaatctaccaggagagatctgaagagcattgtagcctccatcattaaaagcccatgttctacaaacagtgagacccattttagctccagcttcaagcatagcactaacgcgatgtctactatgatcattcacagcatggtccatgaaccaataagagttccaaccattcacatacagagccttaccatcgaccacaaactgtgtcccattccgtttcacgaatgctaactcgccctccgttttgagaccgaaccacaaatctccaaaggagagatagataaaagccacacatgtaaggaaacctagaattggtatcactggcccgttccctgtaggagccgccatgcctcttcttcctcttattagattctgatatttcacaatcgcttgtaatctcgccagtttcttccgattcctcaccaattaatccaaatctcacccagatagagaaataaaaattaatccttttgagagaaatgtaatcaaagtttcaacctttattgacacagtgacacccaaaagatcaaaatgtgtccacgtttcggacgatgtgaagaaaatctcagaaaacccagattttattataagaaaacaaaagaactcagaattgaaaatgtctccttttacactttgagcccaaaaaaagagaacttgatgaatacacacataacagatctctctctctatcgctatgtggagactggtttcaagtacattaagttcaagaggtggcggcaagaaggctcaggatctatcattcacaatttacaactagatagatattgtgatccccagtaaaagaagagagatatgagaatgatgaatgatgaatgatgaatgatgaatgatgaagaaggaagaagaaaggtagcaagtaagaatcaggatacacgcactttgatgtgtgtgtgtgtgtgttgtgttgtggttaagtatgcgttaatttcggatgggcttttacggtagaacgttggtatcattaacccaccagatctgccacacaagggacttaaatttctcatttggtatttaatccaatccataatactaatactacagaagagaagagtgaagacagtgaaaagtaaataatacttgttgtcaaaaacattttttcgtagttatttattccaaaacaaaataactaatgtatggttatgtatgtacaaagaattaattttaatttaattccaaaatataataaattttgacgaactagggtaagtgaaaaaaaaaagttgggttcggtttcacaataaaatgtcatgttctacatgtttgttggatttgaaaccttgactaatttattgaaggtcatgttacaatacaacggtagagtgcaaacatataagagagagagttgttcaatctcgagtaagttgattataacatgagcttccattattgtaagttgtacttattagttatttgatcaaaggaacgtgtccttagccccaccaaactagtataccatcatgttttctttttctcttttgttatttgttttaaaaaaaatttcgtttacgttttcaattatttttttattttttagtttaatccaatagggacgtaaaactaggaaaacattttttgaagagtaaagagacgttcatgttcgattagacaatgatcctagcaattacacatctacgtatagatagctgatatgctaagaaaaataagtaatcttctgactaatctaattttattgtgatttggagagaaaaaaaaaaacttgctgccaacaacatgtgtaaccctgccctctgaggggctccaccgcttaatgcgtcatggaataccttcatatgaagatcaataattaaaaatagctattaatgtcagtgcatgtataattgtatattaagtatgtgttgttgaacacggttcattcaaatttaaaactgagacaaagataaaaataaatctttgtctaggagtttttcctaaacaatctctacaaaaatatagaccacatgttgagtgtcattaggactcagattctcacaagtcatgtgagtaatttaacttattttcctctttagatttgacaaatgttcaaccatgtgaatcccacataaaatagtactttcttactataaaatctaacattttcaacaacaaaaataaaatctaacattttatatatttgcttaagttaatttctgttaaatctatcttatgttggtaaattaatatttcataatatcacaaaatcaatgccaatatttgggttttttttttcctttatatatttgtatcaaattggagatgctctaagggaagtaccaaaagaaaaacactgtcggtgactattattcccatattaaagaaatcattgtggacggttttatataattggctttcatggagaataatattcaaagtgtaaaatttgttatcagcattctaatacagtgttttaattatatgaaaatgagcatgtaatgatttattttaaagttaaaattacaaaagtatggcactaatttcgcgccactttgcagcttactcatacatataaggtgatcaaagtggaggagttcatcaaatcacgactttagttatgacttatgaccattcacgttcaccacttctctttctataagtagagagaatttatattttggacgaatttggcgactctaaagtattatctaacaccagaaaggtaacaaaatgttcatttagcattcttcaacaacagtttcgctcattagagatcattcttcgacaatcgagtatatcaatttcataagattgatttataagacaaaattttataatttaaaagctagtaaaatattatgtatttctctatgcatgctttgatcacaattgctcagtttaaactgtaacactcaaacgcaccacagattgattttgtaagttttcggatacgtttatgtatcctttaatcaccttatttaaccttctacacccgtgtacgacacggattaacccctagttaagacatgatgtacataacgttagctaactaaaattgcgtttagatctcatgcacaaaagaaattgatggagtttaatttaatttgtgacccaataggcccaaaaaggccatcaattagagactcatattaatctttggtaggcacatagacatcacttgttgaataacctacacaatgtttgactaggatgatcatcaactcagccaactttggttatttcaaggaatcatcaacagaattttcctattttttttaaaaaaactaaaatataataataatttatttgtataacctttgcttaaattaatcttttggttttcataaaagaaaattttgtcttctcataaaatatgtattttattaattccaatacacttgttgatgttgtaagaaaacttcttaagcaaaaacaatgtgaaagcagccttattagtatttttcttgttaaacaatagaaaagaagcttattcaacgaattttttagagctttcgtgaatcttggaataatttagttagatttactcattatattataaaatcaaagaagttcagcgcttacaatttcaatttatttgtcagatgcagaattgatcaataacacaaaatgagaaggtattgccaagtgttcatcatactcacattgcaagtaactatcaaatgatctatattcgaccggactaagtagttatgcatatataaaaatccaatgtgtgacgtaaatagctatggaagaagtccaataagttttaaattaaagtaaaacttttatacgagtacatttgatttcttacgtaagacatagacagtgtcagtgtgtccgaaatcaaaaccccgaatcatctacaagtattcaccattctggtctagtgtctataatatcaaaaccaaacaaatttggggtaaattaaaaaaaaaaaccatacataattaaaacgaccaagtatcattatcttaattggtaaaaactttaggtaaaacttaaaggtcgccggttcgagtgatgcttggtacgaaactaatattacatggtgtggttttgggtctggaggattatggcattcggcccaaaatctcttagtattcaaaaaaaaaaaaaaatttaaacgaataaatggctaaatagttacatgtagtagtactactacaccaaagtttaaatcaaagttttacaccaaaaaaaagaaaaaaatctggattaaagtaaaccccaattaattaatcatgcgtgggattgactcattttgacatcatagtatgtgtttagaaacgttttttttagcaaatttctagtcatcaagagtaagtaacattagatagagcgtaaggaaaaaaaaaatacattaggattattatgattatggcattcggcccaaaacctcttagtattcaaaaaaaaaaaaaaaaatttaaaacgaataaatggctaaatagttacatgtagtagtactactacttggtttgcataatctgaatcaaagttttacaccaaaaaaaaagaaaaaaatctggattaaagtaaaccccaattaattaatcatgcgtgggattgactcattttgacatcatagtatgtgtttagaaacgttttttttagcaaatttctagtcatcaagagtaagtaacattagatggagcgtaaggaaaaaaaaaatacattaggattattatgattatggcattcggcccaaaacctcttagtattcaaaaaaaaaaaaaaatttaaaacgaataaatggctaaatagttacatgtagtagtactactacttggtttgcataatctgaatcaaagttttacaccaaaaaaaaagaaaaaaatctggattaaagtaaaccccaattaattaatcatgcgtgggattgactcattttgacatcatagtatgtgtttagaaacgttttttttagcaaatttctaatcatcaagagtaagtaacattagatggagcgtaaggaaaaaaaaatacattaggattattatgattatggcattcggcccaaaatctcttagtattcaaaaaaaaaaaaaaaaaatttaaaacgaataaatggctaaatagttacatgtagtagtactactacttggtttgcataatctgaatcaaagttttacaccaaaaaaaagaaaaaaatctggattaaagtaaaccccaattaattaatcatgcgtggaattgactcattttgacatcatagtatgtgtttagaaacgttttttttagcaaatttctagtcatcaagagtaagtaacattagatagagcgtaaggaaaaaaaaaatacattaggattattatgattatggcattcggcccaaaatctcttagtattcaaaaaaaaaaaaaaaaaatttaaaacgaataaatggctaaatagttacatgtagtagtactactacttggtttgcataatctgaatcaaagttttacaccaaaaaaaagaaaaaaatctggattaaagtaaaccccaattaattaatcatgcgtggaattgactcattttgacatcatagtatgtgtttagaaacgttttttttagcaaatttctagtcatcaagagtaagtaacattagatggagcgtaaggaaaaaaaaaatacattagaattattatgattatggcattcggcccaaaatctcttagtattcaaaaaaaaaaaaaaaaatttaaaacgaataaatggctaaatagttacatatagtagtactactacttggtttgcataatctgaatcaaagttttacaccaaaaaaaagaaaaaaatctggattaaagtaaaccccaattaattaatcatgcgtgggattgactcatttttacatcatagtatgtgtttagaaacgttttttttagcaaatttctagtcatcaagagtaagtaacattagatggagcgtaaggaaaaaaaaaatacattaggattattatgattatggcattcggcccaaaatctcttagtattcaaaaaaaaaaaaaaaaaatttaaaacgaataaatagctaaatagttacatgtagtagtactactacttggtttgcataatctgaatcaaagttttacaccaaaaaaaagaaaaaaatctggattaaagtaaaccccaattaattaatcatgcgtgggattgactcattttgacatcatagtatgtgtttagaaacattttttttagcaaatttctagtcatcaagagtaagtaacattagatggagcgtaaggaaaaaaaaaatacattaggattattatgattatggcattcggcccaaaatctcttagtattcaaaaaaaaaaaaaaaaaatttaaaacgaataaatagctaaatagttacatgtagtagtactactacttggtttgcataatctgaatcaaagttttacaccaaaaaaaagaaaaaaatctggattaaagtaaaccccaattaattaatcatgcgtgggattgactcattttgacatcatagtatgtgtttagaaacgttttttttagcaaatttctagtcatcaagagtaagtaacattagatggagcgtaaggaaaaaaaaaatacattaggattattatgattatggcattcggcccaaaatctcttagtattcaaaaaaaaaaaaaaaaaaatttaaaacgaataaatagctaaatagttacatgtagtagtactactacttggtttgcataatctgaatcaaagttttacaccaaaaaaaagaaaaacatctggattaaagtaaaccccaattaattaatcatgcgtgggattgactcattttgacatcatagtatgtgtttagaaacgttttttagcaaatttctaatcatcaagagtaagtaacattagatggagcgtaaggaaaaaaaaatacattaggattattatgattatggcattcggcccaaaatctcttagtattcaaaaaaaaaaaaaaaaaatttaaaacgaataaatagctaaatagttacatgtagtagtactactacttggtttgcataatctgaatcaaagttttacaccaaaaaaaaaaaaaacatctggattaaagtaaaccccaattaattaatcatgcgtgggattgactcattttgacatcatagtatgtgtttagaaacgttttttttagcaaatttctagtcatcaagagtaagtaacattagatggagcataaagaaaaaaaaaatacattaggattattatgattatggcattcggcccaaaatctcttagtattcaaaaaaaaaaaaaaaaattttaaacgaataaatggctaaatagttacatgtagtagtactactacttggtttgcataatctgaatcaaagttttacaccaaaaaaaaaaaaaacatctggattaaagtaaaccccaattaattaatcatgcgtgggattgactcattttgacatcatagtatgtatttagaaactttttttttaacaaatttctagtcataagagtaaggaacattagatgagcataaggaaaaaaaaaatacattaggacaaatgttaatttggaatctcttaaatttagatttttttaaaaatgtctatctgtttttcttctagataaaagtgtttcatattatccatatatattacttttaaagaaatctttttataaatagaatagtatttttgtagagtatatccggatatgttctgcgaaagaagaagaagctcacgagattagtcatgctgacatgggaactagctgtcttgagcaatcattcatctctcagatcttacacgtcctccaatcacagtttcacacgtcaccattcgcggcgccatgtatctgcttctctgatttctgataggtcccattttattctctcccacctactatataaactcccatttttcctttgtttttcttcaacccaaacaaaaaaacattttttctctataaatcctttattattgttataaaaactccgatggatcggcaaaattccgatgacatcatgagatttctcgatggaatggctagctccgacgacgttcttttcggttttcttgacgaaggaaaccagtcaccggaagatttctccgtaaacctcaacgccggcgaagatgacggtgacgaagacgacaataataacaattctgaagataacaaagctttttggcaggaacacgaacaacttcttcaggtaattttttctcaaatataaactctattatcaaaacaaaattatatagttatttgtcatttttagccaaataatttggtgtctaaatttgttatattattttgaattgtgtaggggacactgtataggacaagttccattgagacaaagattagacaagctacaaaagaagcgttgaaacaagttaaatctaagggtctttattgtgtttgccggcgaccagtggacggcggttgccggagttgcttacgtggcgaaatctctagacacctaagagatgtcgccggctacgattgcgtcatctctaaatctaaatggagaagttgtcaagacatccctgcaggtacaaactaactacctcatatatttttatattcattattattaaaagactggttctgaaatattcagccatcgttatcatttctcaaatggaagataattatttttaaattggacaaatattattatgtccacaagaacacgaaagacttttttagacccattcttttatttgttacttgtggatcaagcaaatatcagattttgtcatcacattaagtcatatgattttatctagtatatctatatgatctctctatctatatatatgaatgtttggactaactcatattttattttaatataaaacaggggaacacgaatttatagagattgtggaccgatcgggttcaaagaaaagcgagatgcgagtggtgattgagttatcatttagggcagagtttgagattgcaaaaggcagtgaagagtacaaaagacttatcagtcgattgcctgaggtttacgtcgggaaaaccgagaggcttcgatctctgataaagatattgtgcatagcgggaaagaaatgcttgagagacaagaaaatgcatatggctccttggagaaaacacaagtacatgcaagccaagtggcttggcacatgtgatcgatctagctccttggaagcttcggtttccgaggccatggagccagaaaattgggtgccggtggcgaagcctagggtttctatgttgaactatgatggtctcttaggtggtttctctgccggtccggccactgtagcggtcgtgtgatatttttgtactatgtttttttgatgacttgtaattattaagtgattagggtgagtcatgagtgttaattatggtttctgatttgaacttagcaagaaatggtctcagcggctgtgattcgagcctctacattgtgtagtaagggacgaagatgctgttttgtgtcattggtgctggaagaaattagacatttgtgatttttttttatattgactgtatacgagtgattaacattaaaatttaacagaaataatatacattttgagtttcgagttatctgaaagttttatatttaactaaagtaaaaaaaaaaaaattgatttgtaagaaaaaaaaaaaacaataagagcaatacgaaaaacggtagaagtatatgataatcgttttgttttttgtatcactagctagtttttttaaaaatatggtaaattttatattcttgccctcccagttaccaccaatcaaaaaccaagaaatatcaaatatcgccatatatactaattaacaaaaatactaaaccgtattaaactggatttgagttcgggagatataggttaagaagtaattttgcggggacattggaacgtggtcatatattgagctatatattgagttctatctgatgtgatgttatagtttatgggctttctaagcccattccaactctcatttagtatgatattatcttctttgagcttatatgttcaagcccgcaaggatttgttattgggttccttcccaaaagacctcatactagttagagttggacttggcttatatattagaaacccttttttctaaacttccgatgtgggacctttggtttgtacccaacaatctccccttcaaaccaaagaccacgaacttgggcctctcttttgaggcaccttcttatcgtgtcatgtttgagagattttcccacaccgatcatagcccaagtcctaggtccactttttcaaactaggctctaataccatttaatgggctttctaagcccatttcaactcctatttagtgtgatattgtcctctttgagcttatatgttcaagcccgcaaggatttgttattgggttccttcccaaaatgtctcatactagttggagttggacttgacttatatattagaaactctttttctaaacttccgatgtgggaactttgatttgtacccaacaatagttttcgagaaaaaatatatcgttttctcatcttattttttgcttatatatatatatatatatatatatatatatattgatgaaattttaaatttatagatcaagagatgaagcgtttatgtacaatggagagaaaccaatttgaaaaggaaaactaaagcaaaacaaaaattaatggattccccaagcttgaaaccatctctggagaagtaatgtcaatcatgggacgtcttgatatctaagtgatatcacacgttgtcaaattgttttctctgttacgtgagtcaaccaaccaaccgtgcgatgagaagtaccatgttttcgttcgtttctatccctctccacacaatataaattgatgtttagaatgccaaaatgaagcaagatatgattgagcttgtcccgaggtttgtttagcagctgaagagtagttacccgagcaaagatacttttatatttcttttgtataagcatgtgaatattattctgaaattttgtattggtatttaacatgtttcatattagtatttattcacggaaatatttaatatatacactttaaagtacatccaataaactatggcgttacattttaccaagaaaaaaatcgaaattctttcaaaaatattacactatttcatagcaataactcatatcattactatttatttaatttaaatttatttgttttgaactgccatctgcctaattaactctaaaattaatagcgagtcaaactctaattcaatatttttaatcctttattaaattcaaaatggaactgatcacattaaaaaaaaaacgtcaatctatttgtgaaaatgatgacaatctttaaacataatgagattgattcaaagaaaactaaatagaattttttttatgaatttgaaccccaaatgagagagtatcatttcgaaggcttaaatctttgaaaacgaacttccacaatttaatgaaacttttaaaacacataacaagtttcttataatggtgcaatgtagctaatgtggccactacgaccgctattgtatcaccattttatttggattttggacatgatgatatgagtcgtaaaaagataatgaaattaaaaattataatttgatcggaagatacaaaaaataaatagaaaacaaaacacaccaaatcatcaaaacagagaaaataaacggaaacattaagaagaaaaaaaagaagagggttcatatctaattcgtaaaccggtaacaatgtgaatggacatcacaacttcgtcggtatgggttatcccgttgatccggttcaccacgtcggttatctggtaagtttttcttcaatgcttcgtagcttatatatctcgatgcttgtagaatcctacggctgctcacatccaaacctatctcatgttcatgatctctttttcttcaccgttgatgcattttccactcaactggtcacattttatcgttcgagatgagaccaacactgggaataaaaccactgagataataacggcgaagattaagagcttcatataaattttcattgagagagtcaagtggacagtgaatgatttgattaattagagccttaggtttgtaattaagcacgtcgttaatactctacagttttatagtggtgtttttttttgtggtctccaggttcactttctatggcaacgtattcatatctgataacttgtaactccttggttcatcaaatatttatatctaacgtattaatcttgattctttagtcaattcacataattaatcggtcaaaacttaataatgacttcaacatatgacataacattgatgttcgagcgaaagttactaaaattgaatacccattaaaataaagttactaaaagggtatggaagtaatgctatcaaatcataagtgggaagttactaaaatagaatacccattaacaatttgttaaaaactaaacgtgtgtatttaacaaaattgagggggcaacacaatttgtagttattttggatttggatttagtataattctaacaaatattaattggtgatttaacaaaattttatttgaacatagtgtatgtataaaattttgaaagataaaactactttgagattaatagtaagaaactaggtgttaaacatctttcttaaatattaaacaaaaaggatctgattaataacacaacatagtattaagttttttagctagtaaaaagatagattagcagtacataaatagttaaaagtgatacaaaataacacattaaaaaaatattgaaaacatatttttatataatttttgtgattaattacaatgaaaggtgtagattccgtatacttcagcggtgcaaaattatattttgaaatgtgatatgcagctgtagatgatgctaatgttagtgtttacttccaactccaagtatgattgaaacttgatggagatatataatcctttatattctgaccaataagtcttaaaatggaatagtgagttattttttctttatttttgttattctttgtcataatatatgatgtttttatcacacaaaatgtagaaaattatgatgagaaaacatgtaaaaatacgtttctatcaaatattaaatatttaaattgtcaacatttgcatatgcataaaatctcagtctatttaaattgttttattttgtttaaaatcattttaaaaaaattcttcaatttaatgtttttgcccacaagaaaaagggaaataagaaagattacgtaacaaaagaagatttaatctcagagacagagagagctcaaactcaagagagatcgtcttcgagattgaaactttagagcatttttatcagtagtctctcaatgatacccaataaaaaaaatataataaaaaaagaaaaagtaaaagagaaggaagaaaaagtaggagaaaaagagaattaagtttctcccaggaaaaaatttgagaaactattctcattcaatttggacagatattatcctactataagtttaactattaaactagattttaacccgcggtataccgcggggacaacttattttttaaattagtatatataaaagtttgcaaattaaatctatttatttttattttatagtttacaattgttattaagtaacgtcctaccaaacccgtctcgccaaatccgtcccgtaaaaaaaacccgcggtacaccgctaatttaaatatataattaaaataaatattttacggaattgcaattgtattttggtttgtcaaacaaatatttgtttaaaatagttaccaaaatctagttcaaattttggagaaaaaagatttattggatagataaagaatgtatctaggtgggttttgctcattttaagggattgcaattatatttttgtttgtcaaacattttttgttttaaatagttgctgaatatatttagaatatttttagtttgttaatcaatttatcgctggaaaaaaatcaataattaatagttaatggcaaccattgtaaataactcccaactctaggatttattttacaaaatgactgcaaaaatgtatatatagataacaattaatatatctgtcttaattaaaatattaatattttttttttttgagaaactttactcacttatactgatgatggagatggtcttacaaaaagtaaaactccgacattccaagtttccacctttgttctctccaaacatatattatactaatagattagagaagaactctataaagtttttaactttctccccaaacgaggaatctcaaagtcaattgctgttctgtgattccagagtgtttgtttctctgtcataatctcttctagttgcggtttgttgggctctcactttctctttcagccgatttgatctttcgtttcttgtggtttgacttcacttgaagcaagctcttttattgatcttattgtctcctttatgttctgatgattccgcattgtgaaatcactagagattttggggttgtgatatgaataatctggggaattttggggtttggggattcgggttcttctccttatctatttggtttgcggttctgcaacaagctaatggactcagacccataagggagactgctcggtcctggggcgatgaggtttgtgttgttttgatatgatcgtttcaaattgttttcaatgttccttgattttgtgtatcagctaagtctttgattagtttgctgttcatgtgttcgttgacttgattaagttgcaatagtagaatttctgatagctcagaatctaggatgggaattagattatgcagttttcgtctctctatttgccgccgagttttcgatagaatgggaaggctgagactgttttgtgatcttgcagtggctctttggcaaaaaagaaaaaggtggagcaggaccgttttctgcgtggaatataacaggaacatatagaggtttcgtggcattgtattgttgattttctttctgcttcaatatcataaccttgaagctcatttccgtgatgtatttatgttacaggcacatggaagtttctagatactgtaaatagctcttcaaagtttccagatttcagaaaagaaagtggtaactctgtcattgagttagtgacaagtccaacaaaaattactggtgtgcattatgttcaggtgaatagtcgctcttcatagtcttttgcatcatggagatcgtgctttttgatcttagtaaaaactttgcaaaatcagaacttgtgttaactttgaatgtgaacagggtgcagttgttttccatgacgtatttgacaatgaacacaatgtgggtggtgcccaaattaaagttgaaggtgtatatatttggccctttagacagctccgtcttgttgctaacaggtataactacatttttttttaaaatctatttaactgctttcaagatccagtattggtagtgttctctaatgtctgtacgtttaatgattgatcagcggaaagaagagtgattcaggactagaagacgattatcttctctccaacccctatcatctggtaatgcctgatgtgatccactttgccacaagatgatggatcatatttctgattcttcgttatctttatttgatgcgttaaaatgtttggagagctgataagtgtcaacttttctgctgttggacagctcggtattttttcctcccaagtatttcaagaatctccaagagacagaatattgaaacagaaaacttgtgagtaggatctggatttgtttccatatgttttactcttctgctacatctgaccttcatttatgttgcattccagctccaatatatgagatggagaagcactgcaatatcgaaatagctgcccaaatatcccaaagcacttctagtgaaaacagtatgtatgccttctaacacttggcgttgaaatgatgatgctggctcagttcttgccttcttagctaattttagtctgactttgagaacgagttttacttattttggtagatggggacaaagatcgttatcaaattgaaggattgatggaaagtcctgcagtagatgatgaagtagattgtttttcgccattgtcgctgaatgcaacctccataaacgtcgaagtctactataacaaggctgtgaactatacattgatggtcacttttgtatcctttgttccaatctcttttccattccatcagaaaatgacaaacacatggcagttttagcggattccttaacttgttattgtacctaggtctcgttcctccaggttcttttattgatccggcaaatggagcacagtaacacacaatccgtaagattctcattgtttgtttatctgatctttctaagagaagagactggatgctaacttttggatgactcttcttgtatacaagggtgccgcaaaggtctctatagtaatgatcgggcaacaagccatcatggattcttatttatgccttttacatctcacagctgggattttagttggtatgtattttaaatataatctcgctattcttcacaatgtgccctctttgttttgataattatcttcatagcttttcatactctgtctaagaacatttctcaatgattgtgatggaaattctcataactgtctatttcttaccatgtcatgcttttctcaatcattctattttattctcatgcagaatccctgtttaacgcttttgcaacagctgcgttcttcaaatttgtagtgttttcgatatttgagatgagatatcttctgtccatatggaaagcgaccaggccttcaaccagcggtgagggctgggaaacaatgaggcgtgagctctcctttttgtacagccgtttctgtgagtacttgatttcttttgtgtttgttcatcatcaagtaaatgcttagaaattctcacagatgtttaaagtttctctcattgtaatgattttcaacagatggaatccttcttggaggcatattattaatgtacgagttccacaactacatgcggccgatcctcctactcatgtactcattttggattccccagatagttgcaaacgttgttcgtgattctcgaaagcctctgcacccatattatatactagggatgactgttacacgacttgctataccgttgtatgtttttggttgcccgaagaacttcatgcgtgtagagcccagcaaggcctggtgtgtaagcctgtgtgcattcatggggtttcaagctggtgttcttcttcttcagcattatttcgggtctcgttgctttgtccctcgaaaggttcgttggtctgatgactttgtagattgatagtaaattgcttagttgtctttagttcatgtgtttgcttctgatttggcagttgctacctgagaaatacagctactacagaagactcgatcataatgtaaaccgaagcagggactgcgtaatctgcatgaccacgattgatctcagacaccgtattaatgattgcatggtaacgccgtgtgagcatatattccactcgggatgcttacagagatggatggatataaagatggagtgcccaacatgtcgtcgcccacttcctccagcttaacctttggttccttaggaatcgtctattaactgcactcacattttattgtaggtaacagcttcttgaatcatgctctaggttctggctattaaactgatctttacactgaaacatctttgggttcttctttggtttcaggtcttggaaagatattagatgaaaacagagcatagatagaatttgtcggaggagtagacattagattaactgtgtaataagtcaatctctttactgcatattcattgcccattctttcaataaaatcctccaacatataaacaatcatttacatacactaaaattacttttgggtcaaaccttttaacaataccaaacctacacatatttttgttccttcgtccttgatgatatgagagattgctctcttatacttaccatgtgatacgaaatacaaagtaggaaccagagatgtgttagatacattcaataataaatcatcgtagaccacaaattacgcgttacttgagaggcaatcattgtctcccaagtgtctctttcttttttcctcacaaacactatacagagactttttaattactgcgtgaagattacgaagagcataacgagatgcgttgtttggcgagtaactcgttaagcttcttcatgagcttaggatcagagcatatatactcttccattgactttctcagattcctcagtgtctctgtgtcatcttcacacgtttctctgttgagcagcttcgtgaacagttctttccacagatccaccttccagtatctgagcaaataacttagtgattcaatatccaaacaataatttttttttgtttgagagacaaaacaagcaaatgaagttgaattattcttttgagaccttttaaatgaagttctcggcatattaatgtagccaccgtccagagattgcttcttctcgatctccatgtagacgttgtgcagcatcatgtggacgattacacatagtccataagtgtccacctatatataacacatgttacaatggactcgaatggttaaaagtctaatcatgcaaagaaaaattcttgctgaagcagtgtgattttaaagacttgcctgaaacttccaaggtttatcctccttcatctccacgcaacggaagcctgaggtacgacaatctcctgtaaactcggtggttctaggaaacaagctcaagtctattcctctaccccagtcaacaagacagagaccctgaggtagaaatgaaaagttgcatcagattgtggacacacacaaatcagagtactagtagttgtataagggatttaccttcttgctccaagaacctgttttctcatgaaagcctgtctcagttaggttttctctgcaagtaatccgtgaggtatgtcagtctctgccacgatcgttaacatacaagtacatggcttcatgaccaaaaagtctttatctacaatctaatcagcaatattggagcggaataaacttacggagggtatcggatcagcagattgtctggcttgaaatcaccatgaatgattccaacactgtgcaaagtctccagcatgttcagcatttctattgtgtaatacatgcacaaaacttcttccatggactttccaacaacgacatacgagtttatgacgtccttaaatcacaaaaagaaggcaaatgaagcaaagaactatgtttgcattttgtatattcagtccgtgagagtcctaagataccacctacctggagtgtcccgtgtgataaataatcgcagacaagtatactgtagtctgaatacacgtgcactctctgagccaatccaaaacttgatctctaacatagcatgagagtaattagtacggtgtgaaacacctgtgaactggtaatattaatggaaaagggcatacttggctatctgggatcctgcaatcaagttggcgatacatgtggaattc

SEQ ID NO: 258 - DNA, 93220 bp, Arabidopsis thaliana
gaattcaagtgcttatagtgttgaatttggaaacagtgagtttactgcagctgaaatgaagaagattgcagctgatgagaaactcgctgagattgtaatggctgaccctaagcgtgttaaaaggtaataaaatagtgatgcttcattagacattttgatgttgttgttgttgtgacttgactgttttgatttaaccatctcgttagaatcttggcgaaccgcgtatctgctgcacgttcaaaggagcggaagacgcgatacatggcagagttggaacacaaggtgcagacacttcagactgaagctactacattatcggctcagctcacacatttgcaggtgcgagacaaaacaacaaactatcatgtttgaataagtctgtagtcttatattgtttcctttggtggctcagagagattctatggggttgacaaaccagaacagtgagctgaagtttcgtcttcaagctatggagcagcaagcacaactccgcgatggtatgcacattatcaaaagtattcattctcaaaattagggttgctgagtcgctttaggattgttttgtattcgaactcgatggaaccaagtcagtgtcttgtccttatccgaatgctttgttttactttccatagacgattttcttctaccgtaagaactttcccttttcggtttccccagccttgagtaggaacaatgtttgtgtattctatgtatggaaaaacctgaaccttgtccttgattatttagctcatggccgcaagattgcacccgaattttatccatccttaccgctaaatatgtctcttgtttaacttactctattaaaagatttgatctctccggagaatttagctaccacgtttcttgattttttgtaagttctcctagagaggtaacattttgatattccttgtttggcagctctgtcagagaaactgaatgaagaagtccagcggttgaaactggtgataggggagccgaaccgcaggcaaagtgggagcagcagcagcgaatcaaagatgtcactaaacccggagatgtttcagcagcttagcataagtcagttacaacaccaacagatgcagcattccaatcagtgtagcacaatgaaagcaaagcacacttcaaacgactagggtaagtaaaactgcgatccgcagttgtctagttacatatatgataagaatcttttgtgcagagttctgtttttggaagttttaaagaaacatatataaagattatgtccgggaaatttgatcatatttcctgaaacatacacacatatatatagtggtaatggaggactttctttctggaccaggtgatcttatgttgttttggtcatatatttacacagttaggattttatttccctttggattttggataatctatgagacaatttttaaggtttataaatattactggatctaaatcgttttaacagagtcaaatgctgtgaaattgcttctctcgcttagactacttctctccagcttcatctcctcctgtagtctttatggatttttattacagtaggatctttcaacatgttcttgaatcttattaaagtaaaatagaatgatggattggatacaactgggagtgatggcttacataaaataaatttcaaaagagagtttcaggcccattgcttttctgaaaaaatggattgtgaagaaaatgaagttgaaaacaatgatgaagaagctcaacgaaaagaacatgccaatcagttcacatatatataggaaggggtcttgtacccaatccagcatctgaacgtaaagatgctcaaaggcggttacaaaacatcagttcacatatcttgatcgtattcgtctctcggggttacaaacttctttcacatattctaatagcctttatgttcacagtccatgtttgtagtcattattgaattcttctcgccaatcaaatattgaattctaagcgtctaaaggttgatttgaaacaaaacttactttattaaaatatgtaaaatgaaaagggtacatatcaaaagagcataaacgaatagattatctaaggttgaccaacaaaacaaatgacatgcacattgctttcacataactccaatcgtcgtctctatcttcttctccttctgattctgaatctgaataatatggatatgattcttctgtcatcacaaatggagcattgaatgattgagtatgtttaaatcgttaacactaagatcatctagtggtctgcaaaggtgtacacgctacaagaagcttcaatcaccaaaaccatgggttacatgatcaatgcactctttttatttaaggtaattttaacaagttatgtttgtcaaaccattcaaaatgtttcttatttcgccaaaccacgtaataaaaattcaattaatttgccaaatcacataactatcccaatgtgaagtcaaagtccacaagatttagatacaaaataaggcgcaatagttattagggtatctggtcagtaacaactgatatgggaactggtgcaccttcaaaaagaaaatcaatagaacaaaaataaaagcacacacaaaaacgtgtacggaatgggacgaaaacgatagattctgcaaaaaaatcgatagctactctcatccaattggctatcacccatcctttacagctttccttctggtccattcattcatattccaccaagttcattatacttatatttcttaaggctccaacagaaaaaaaaaactaaataaaaacttgttattgataggttaaattaatataactgaacattctaagtttatgtaacctttatgtttcttgttaaaattaaatctactaaccaatatgtaagaaaattttgcaccaagtaaatagagtctacaagtaattaaagaaaaaaaagaaatgttttctatcaacgggctaatataaaacaaacggcatttaaagtaaactagaatttaacccgtgatacactacggggcaaatatttttcatatataataaaattaaattttatggttttatatttagtattaaagatatataattttatattaatattgtaattaaaaaaattagtgatgataaaataataaaataaatatttaacctgtgttatatcaatccaaacccgtctcgctgtatttcatatcaatccaaacccatcctgctatacttctcgtctcataaaatttaaatttttttatgtttaaatattaataatgttttataaagttaaaatatatcaataatattttttaaaaataacaattgtttttggctttagtgtaatgccattctttgtaaattcttactttactaacacaaaagtactttaaaaaggtacttcaaattttttaatatatataatgttaatttttggtaaaaattattataaataaatatttagtttaatcataatttgggattaatatacttgttttttgactaactattttttattttaataacctaaatttagtcattttgtgaatattatttgaatcaacaatatcaacttaatacatgtacaatttatttatcccagaaaaaagaacaaaattattttgtacaattgcaaatttaaaacgaaaaatatggattgagaaataatttgggtttcaaatttttattacgtaattaatttttaatgaagatattaaagcatatattgtaatataagatttgattcattttattaactgaaaataaatgatttaaaacgaaaaatcagggtgattaatgttaattggaaagatttaaatgtttttgtgatttttttttagtttcctaaattttagtaacataataggttttatatttagatttaaaaataaatttagtaaaacaataaatgttaatggcatgccattgtaaataagtgtcaagtagatgatttatttgctaaagtggctgcaaaaatgtatatgtagatatacaaaaaacaaacaaaaacaaaattactaaatttatctctcaaagaagtaaaatcatcaagtttataagtcactgcgagtagctccatgttctccatgcatgaaatctttctcggaaaatctcacactgcattatgtgttccatttcgagaacacaaaccattgctcataaaaggattttgagttccaagtgaaaagactcttggcatccatcaaaactatctatgaatccctcaaacaacaacatgcatcttaattagtcctgagaatttatcgtcgcacttccaaggaacacaaagaaaaaatcttgctcatttcccaccggttcatgttggataataacatatgagttatgactgcaccatccgggattcgtgagcttcctcccaagctatgctctccgtctttgcattttaagttcatctttcataatttctcatttaaattacttttatagaggttatgaggataaatatcgacttcagtatgcatgtgtgtgagtgttataggtcatatataatagatattagtggaaatattagtacatgtggatgcagtttattccaaggcaaaagaaataatattatagatggaaaaaataaatatgtgcgttatattaagaagactagttgcttcgtatacaaacaccatttgtggctagtagggaaaggcaaagagggaagctaaataagtgcattgaatttatattaaatgtgtcttttaaatgtagagatatgtatatgtgcatcaagtaattactagagacaatgctttgcttcacctacctcttcttaatattttgctttctcactagagacatcaaattagaaactctttgttcattaattcaatggtcccatatgttacacctaatagtctacagtctagagtctatagactatagtgaagcatttcaagtttgtagtaaatgtttatggctaacgtagatattccggtaatgataatgaataaaatacttcaatatgcttatagaactcaatcaacaatgcaaaggagataaccctctaaaaacttctttttttaaaagagggaataatgaaaattatataggagctaagttgaaaaagatttgatcgataatttgattgcattgagcaagaacaatatctactagttcttattagcgcaagctatcactcagatttattatagcatgcgaaaaataaattaggtttacatttcaacccttaaatgcgaaacaagcatagggtgccacacttaggaatcaacaaactaaaacccaggtttgacataatccacataaaagtgtcattttacgcaaatcattataggtttatagttcagaaaaaaaaaatttggattcaatattcatccaaaggtaacaaaaaaatttgatataaatatatatagatgtttataagctctctctctctctctctttctctttctctcccactccctcatccgatcatggatgttaaagagcggaaaacaacttcttcacaaggaatagtgagtcccatgtcatgattgaacccgaactcttcttctgcctgttgaagcaagctcttgaacttaggatgagtcaagaaggatatgggtacgatgtaccggctcctcttttcgcctacatagaccgggaaatgaccctttggtacgtctacaggcagaccatcctcatcatagcattgattcttggccaagctcgagcatctcttgaggatttgcttcagcattgcggtttgtgttagctttgaagatctcttaaccgccattgctagttattgtttcttgagaggagaagaagaagaagttgaggtgtagatggcggagagaagtgagagatggtgaaagggttatttatggcggagaatgaggatgtggatgtgatgcttacgccaatatttcgatttcttgattattcaaaattattatatatatagtcaatttcgatggattcgtctagtactgaatatagaaagaaaaaatataaacataacgtaatgtcgattaactttggaagagtgtaatgtcgttaactcaactactagttctagaatttaacatttcatggatgctactaggttttagaccatatgtgttttattgatctttgggggatttactaaacacttcctgtcatataatcagatcctactaaaactatgttaattaatacaactatattaaagccctaataaagaatgagatctaccatcaaagaaagttcaacaaaaccatcaattatattttatataaaacaacaaacccatcaattatttgagagtaaatgatatcattctaatttttgaagatccatatagtgtgtataactataaagtataaactatcaactacttttggtcctccctcttctctctctaatttatagtattttataatagaaataagaaaaaggatatatgtatcatttgctaacaactagatttcatatataatgaagtaagaagatatatatatatatgtactaaaagtacaaagtgcgtgtactttacctaaaaattgcactctatttcgttacgtgcatagctgaatagtaaacaccaaagcatgcaattttattaatcacatttaccttatatgatatagccttttgttgtccaatacccattcaaacacattgaataaacaaaacccaaacacatagattctctttaatatcataatattactaaccatgtaccatgttctattatggtaattgatgtcttgtagaaaccctgtacaaaaatatattagactttatccaatacccaaaaaaacatgcactgctttcttgttgatcaagaaacagcaaactgtatctttgttcaatactcttcaacgttcgtctgatctccattagtcttcacattaaatgttgtcttgaatccttttaaacttttgaccatttagatctcatgattacgtcaacaggcaatagagagagagaaagagagagacccttttggctgtagaactcgtcattgtcaagtcgaaaaggcttgcatgttctgtgaaggagattagtcataacaaatgattttgaaaatgagaaaaaaatcagagtcgttaggatagttttgcctagagctaaagactaagacatgtctgatatgtaaaccacatgaactccatgttactcttgtcctacctcttctttcccttgagctgtcttgtctcttacaaaactttccgttttcttacacaactgttaaaaagaacagagtcgttctcagagttttgtattgccccagacatctcatatcccaaaactcatgtctccttcttttatagaatctttaatttcttcaaccacgtgaaagagaatctattaaaactcttgacttgtcctgtttttcgtacgactctttttttttttccactcaatgaccatttctcttgatcaagacatttcatctcccaaaaaccatgtctatttataatagcaacagctcgaatttatgttcttcaaccacgtggaagctaataaactttccctcaactgtcttctttcttataactctgtttttttctctgttcataaacacatttagtttgtatagcttccgaaattctcaatattcaaaactcgttttctacaagtcaataaacgaaagctggttacagtgaagcgaaatgcgcaatataaatgtaaggtcttttcatcacatggtggttgcaggaaattaaccacgaacgtggacccttgtgcatgcatagacaagaaactgcgaataatagtaagatgatactattgcaagttataatcaacttaatatgaacatgtaatcgtacgatgattaatacttgaatagtgaaatgaaaatgacaacatcagcaaatcaaacaaaaaaggaaaaaaaacagagtggtacctcgagaatgagactgcacaaagaaagctagaagcttttttcaaccatcggtggtcaattttttctccaaataaagaggcttaatgctttgtgaaaatataccggtaacgcgttgagtttgtcggtttttttcattgaagctgagaaaaccctattcagataggctaactcactctggcccatgacaagaagcccaagaaaaagagctattcaagtcaaagaacagagcactcttctctgcttctttcttgtgaatcttcttcttcttgcttatgtgtacaactgactaaaatgcatcaactcgtgcaaaagtgaagatgagaaataccttttcctcggcttaactcatttcctcggcttgtttcttggatgacaagatatttgtctttcctttggtttttcatcaagaacgaattacccttatagaagattaagaaaaaatcttaaagatcgaacataacttgtggcatgctatcaagaaatgaattttaacattctacatagacagagcattcattattgacatcaaacacagaaatatttggcatccagctaaacatatatttgctttcaacatatattaccaaatctctttctctcttgtttcggttaaagtactaaatcattttgaccaatctttatgcgactttagcaagcaatctctttctttatcggatctcacttgaaagaaaaagctaatcttatgaggatgtacattacatcacatactagccatttaacaccttggtgcttagatagttagatgtcaaacgcttcacactttgacgttcgaattgaagatcgtcaatgggagaccaatctaaatttctaaggattaaattcagatttggttatggacaaagggtctgagtgatatgaagatgaatgcatacatagtattggatagaagatgtttaaccaagtgcaattaattcattaaatgatgggttgttgtaactgtagtttatgtccacattaggagattctttttatttaaaagggataacacatgttcttgtcaatgaagatgtccttatagtccatcacaacggttcatgtccttgtagtccattacaacgtcccagctcataagtaaagtaggtggtcttctcagtgatatgaaaagacatgattaaggtggtctctcaatgatttcaaaggacaggaccacatgactcaaactttctgtggcaagaattgaattccactaaatgtagcctatctgatatgagccatatgtggtttgtgtctcatcatatcaacatcatggagatgatctttagacaaatccatgtgcttgttgatgcatattctgtatacctaccaatggggttatcttcaagtagtgttcttttctataaatacccatcactctttttctttagctctgcaagttctcatacttttttaagtataaagcaaaagactttcagtttcaataatctttctataaaaagatcaacatccatggctatcagaatttctcgagtgctgcaatcatcaaagcaacttctaaaatcgttgtcacactcatcaaacaatgtcgctattcctaaaggacaccttgcggtttacgtaggagagatgatgcagaagaggagattcgtggttccagtgacatacttaagtcacccttgttttcaaaagcttctaagaaaagcagaagaagagtttgggtttgatcacccaatgggtggcctcactattccctgcactgaacaaatcttcatcgatctcgcctctcgccttagcacttcatcgtgattcacactgaccagtagatcaaactctttttctagccgtttcttcaagagatgatctctcccttgaaagtgaaacagagctgtcttttaactgatgtaagattgttttgtttttcctcacgtttcagtgagttgtgattaatattaatcaaaatccatgattccttctattgatgatacttgagtcatcatttgttacttccttctgaaacttggaaagaaccatcgaacaccaaagtactggaagatataactgttgatcttctctgtttcaagatggaagataaaaatatcattttcgttcatattcctggataagaatcaacaaacacatccgtagagctctccagagaaatctgaaattctgatagtagcattgcaatagatgcaaagtttgacatctttgtataccactctccaatgcaaagcgaaaccaggaatctgtctctacaagttatctcctgtctctgtctacattgcaaaagattcaagatatagatattcaatgcaaggttttacatccacaagtcgccacacacactctgtgcaaaacacatacagagatcttgactttttgtctccaactatacagaactcatgccgttttagttttcaggcaccagaaagcttactgtttcttctatagcttttaataggtacatagcatgtcgttttccctagggtcacactcacattcatgctgtctcattcttggtgatgttgactgtgtgtcactattattaatgctgattgtaacaactcagcaactgcgagttagctccacactcctaaggttgcaataaggagtgtctataacactcacctaacagcacatggctttgcctctcttgacttgattgtttgtgaatttggcagaccaagacggaccctccgattcaaatgaagtagctggagtttctaccatcagacaaatccagttaagaagaccggtgtgacaatgagttcgtgattcttcctgttcaacaacttcaaagtcccctgtgctactgcaactgcaatgtcccaccatgtgaactctgcccatacatgtcaccctcttgtaggccaccgagcaatcttcaatcaaaacttcacctcattggtttctatatacagagagagcaccagctttcatctcaaaacaaaccaaaatcataatcagcagctcagaacttggacactaagtcttcttccctgatcaaactttgagagaaatggctatgatgcgaggtattttggctgcaagaaagattctaacaagcaaagcagcttcaacaccaaaaggatttcttgcggtatatgtaggggagagtcagaagaagagatatatggtgccagtttcgttcttgaaccagccttcttttcaagctctgctgagtacagccgaagaagagttcgggtttgatcatcctatgggtggcttgacaatcccttgtcctgaagatacttttgtcgctgcagcttctcagctatgatagtagaaccaaacagatttttttttttttttactagagaattagaaacctatgtatatacaaacctttttcctctttcttgttgaaagagttgttctaaaggagagaaattaaatggaaacacgagagttggtaattgcctcgcatcattttattcatataacaaatctctcaactgcaaactgataagacattagatcatatctgcttctaaaccatttacacacaaaactatagaactcaaaaaggaaaattcatataatcacacatgtctgaacacaagcaaaaactttgaacaaagtacatagatgagatctagacgtataatccaacactaaacacatgtacttgttaatccaacacatttgattttgaccctaaatctccacttggattgtgcataggatttgccaatttctgaaacttcatatccagaaatttgacagctgagttcatctgtaaaaaggtcaaaagctgattaaaaaagtcgaaactttccatggaattgggaagaagaaagcttactgattgtgaagctgtctgaaacagagttttcgtcaagggaactacacaaaacctgttccaccagatacttcagtttcaaagaacaaacctttccaatggaaacagaaaggttttgacttacattcctctgccgccggcgagagcttcctccgatgggtccttccattcgtcgaccctgttaagccaacacagaatcattttgtctccattaaattggaaaatgaatttaactgataaagatagagaatttacacccagccgtaacggcggtcaaagagtagccgtctggaagagcgattagatgcggtggccggcggttccatctctttggtgtaatagtgtcgataacaaaaaaaataagagaacggttcagattatataagcattgggcctattcgtaattaaccggcctatttacgtatacagacataaatttagcccaatcagtgaacagtagtgtttcgggtaaaatcttaagactagcagcaaaccaaattctttgtggtctttgtagttacaggttctttgcaaattatgcggcttgcaacgattgcccgattacaatgtctttatgaacttgtgtgggaagtgtaatattttactctgcttggtgaaatttgcagcaactttaccgtgggaaccaaggataatttagcacaaatgcagtggaaaaaatcatgtcaataatatccaagggactgtctatgatgatgacccacacaaaaatatacaacacagttaatagaattaggacttggcctgagggagtaacttgagagtaaccagaggctactcagattacaccaagctgagatctatcttcgtgtaacaaatttcgtcataatgtgtcttatcttttttcctttataacttacacaaccccagatggaagccttagaacaagctggccaccgaaaacactgcacaagaaagatagatcaaagaggtgaagcgaaaagaccgaagagcttgtgtgggggaagaaagtaaaagtaccttttaacgtagtagtaacagaaatctgccaatatgaatgtttggactatttctgagattataaccatcgatggccatagtccataacccagcactacaagcagtcgtccgtgcgtgtccatcatctgtttcaacacagaagaccaaaccaaatttatgcgttcagtttggaaaaatcacacaaacaaacttgcgaaaatatcatatctaatggggatattgtggagttgaccatttgctccagtgccataagcataggatgttagacatatttgtaaagccattggtttatgcaagagatggaaagaacaacttaaccatgtaatcacaactctctgttgaagataagaacctacctgtaaaacccagtgtgcacagctaaaaaatcttgctactccaagtgcaaaaacataatgagccgtgaagggttcgacaatctgaacacaccaaaaatatcagggattacacttgtttttcagtactcaagtttccgaaagcaacaaccttagaaaacacatacctttgtgttctgcatcactctcaactgtggcagtactgaaacagcttcgaggtaaacacagaatccccaggatattctattcaatatattgtgtgacgttgatggatgaatccatacagctagcacaacacagggcgccagctgcaaaaaaccaaaagaactaaaacttaatattcatgaatccttaaactattgcaccagtagttagatgccaccatgttctaaaaggcatgtaatatgcagataaaataaatttgatactgatggcaaatacaaaggaacactggttataacttataactaagcttcaaatgaataacattaataagcaccatcttcatctgaccttaaagggtacgcttaactaaaaacaaaagactttaagctgcttatataaccaacatgcctagcatgaacagaatctaagtaaaaagatcaaaaccgagaatgactcacttaccacataatagagagcgaagttgtctttttcctccatgtaagtagttttgaggttaaaacggatcatatatataacccagagagttgttcccaaagtagccaagtccagaatggtatgtatatcatattccattacaaaactgcaataaagcctcacagctagaaatatcgccgtaagctcctgagatttcaatgacaatcctgcaaataccccccaaaaaaggtatgtaaatagacttttaatctgtaagaagaatgctgattcaactaaatcaactcctttgggagatttgggtactcaaaagttgaataaagtttacatttttatatctcaacacagatcgaaattctctagttaaagctaagaaccctacagataacgaagtcaaagcaggaaatgaggttataccagcacaagtcttctccttcatgagtttatagataagaacagagattccaatagaatgaacagcttcggcggcaacgaagagattgtcgtgatcgtgaacgatgagtttgaggagaacaagagccgccatgccagatacgacggcaaggaaagctttcacctttggaggctgcctcctcacccatgtcgaaaccgcgtggatcggagtcttcatttttcgattccttcttcttcttctcttttgctttctcggttaagtgacgacaaaagttttttttttacaggtaaactataagataactccatttgtgactcacattaaatgggccgggtcacaaaaaccgttttaggccctataagaaagtatttatctgttttttttttgttggaataaatatttcttgaattaccattttttaattaggatttctttttatatatcataaaaataccaaactaatttttttttggtaaggataaaaataaaaataccaaaatatgctatatttgttaagatttttcttctattttttgggtcaaaaacatcttgtctatattttaaaaacataatgtattatattctctttaatcaattgcacattatattttgagtcttaattaaaatgaatcaaatcaaattttaaaaaaggatttacatatattgttgtctttgtacaaaaagaacaatggtatactcaccaaaaaaaaaagaacaatggtatgaatccctgaaatcgacatacattaggcacaacatgtaattattatatatacaatgagtggaacaaggtgaagtgagtgtcttttttatggtaggctactgagataagcttccttgttctcatgtcctaaccaccaatcactcatatctctcacaaacccgatcagaacagaattttaaagacatgtcctgttcatactaatctttaacaacaataataaggtgaatagaaaagaaatcgatctttaatagttacattcatttgttaaagtatcatttctacaaattttacttgtttttgtgggattgaaatgtgtactataggaaagtggcgagtgcttagcaaagaaatcaacacctaaaaacaaattgtatgagcgaatatgatataggtctcattggtaatacaaaacagtacaataaatttagttataagttttttcggaataatgtaaaactgtaagatagagttgtacgagaaagttgtaaaaaaaaaactgaaagtaaaacttataataacgcttttgataaagttttgtgatcagtagctatcaaagttgtacagaactatcgttttgattaaaagttaccattcaaacccataaacgcaaaataaacatgaagaaaccaatgtttaattagttgagtgttaatacaaatatttcagtcaaaattagacaaattatggacccactaattgacgaaatacataagtaaattaccacatattttccttcgttaccccactagctagtacttatgatttttctcgaaatagtggtatcatcatcgatcataataatatcatttatagtcctaacaaaccattatcactctctttatctttctttgtttcattatcttccgagtaatagaaaccattaaacaaaccaaagaaaacagtgagaaggcgatcagcgatgcattaccacggttgcttctgcgcacggtgtagagtatcgacgtctccgttgccggtaatagtcatgatcacggtggctctcgtccttttagccctttcctccgtcgttcaattcgaagttgctgtctcctcaggtaaagagatatacgtactactgtccctgcggtcgctggagatgcgtttgctactactagttctgatctcgtggttagtgttgttgggtttgcgtttatgtaaataaatgatttcgtatatttttaggtattcttgatgtttacgtgaagcaaatatgtgtgacgtgaagcaccgattttggtggatctgacgaacgtgattggttacaatattcaattttaaccttaaccttgatttgttatatttgtatgatcgatcttgctctatcttcaatcatacggcaaaactttctcttgtattccaacaagttaaatttccattttactatacataataatggaatccaaaataatgaaaattaaaatctacggaaccaattagtaaagtttactgcgattttttataattatgtaattaggaaagaagctgtgaattaagagagtaaattatgtcattttgagattaggcagattagagttaaggttcttagggtaaaaggtcaaatccttttacgccatatcgttgaattttatggaagatgtgattaatgatacagttgaagcaaaggaaaataaggaaatttgataatgacgttccaccttcaatcgtataacacttcatatttaattagaaatgaccaattctctgtatccacgttagctttattatctgtataatacactcatcttttacatttcaaatttccaaaaacatctctaagaaaaatgaaatattgtaatcctttggaatttggatattctatggaagaactggatcaaataaaagaataaacacgaaatagtgatctttatacataagaaactgagttcatttttatggtttctatactatatctaatatacattatgtatttatgtcattatttttttattttctaagcaaaaaactcaaagtaaaaaacctatgaatttactatggtattaatagttaatccgatataaatatgtcgttggatatacatattttgaatagtagaatttggcttgataatagtcgatataaaaccatttggtcgaaataacgtgttagaaattttacatcttattatataaagtacgattttaaaagttactaactcacgagataaaaatatttaaatggagtatttttcttccaacaaaaaaatgaggtattaaaagtccaaaagtaaatagattgagtatttttcgtctatttttcttgttataatttaacgttgtttatagataccgtaacgtccgttaacgaccgttaaaacagaggtttgaatctaccaataatttaaaaataaggtattttttgaccgaatataattaactgaagtatttttcttccaaccaaaaaaaattagatattaaacgtccaaataaaaaataaatgaggtatttttcgggttttttcctttttttagaattttctatgtttatcataaaaataccaaactatgctatatttgttaaaggtttttcttcttctttttttgggtcaaaaacatcttgtctatctttttaatcaaatgcacattatattttgagtctttattaaactgaatcaaatcaaattaaaaaaaaggattaatattgttgtctttgtacaaaaaaaaacaatggtatgaatccttggaaatgagtggaacaaagagaagtgagagtctttttcatggtaggccattaagataagcttccttgttctcatgtcctaaccaccaatcactcatatctctcacacacaaagccgacccgaattttaaagatctgtcctgtttttggatagagttcaagctaatcttttttttttttgcaattaacaacaataaggtgaataagaaagaaatcatttgttaaagtatcatttctacaaatttcacttgtcttttggttgaattgagaactccatgtgtattgtgtgtatgagacgatagctagcgaaagctaagcaaaggaagactaagaaaatacttaattaacaaagtgaagatgatataaacgcaaaataacattagaaatcgcttgagcactctaaggaaaggagaggtcgagaaatatgcgggtgggatcgatccaaatgtaatttgcatcgagacaacatcaaggatagaagatctttgtaatttgtcctaagaaaaacgcaaaataaatatgatgaaaccaaatacttaatcagcttagtatcaatacgaatatcccttgaaattagagaaactatggtctgactaatccacaaaacacatatgtaaattaccacataaattccttcgttaccccactagctagtacttatgtttttttctaaaaacagtgagtggtatcatcatcgaccataataatatcatttatagtgtacctaacaaaccattatctctcgctttatctttctttgtttcactatcttccgaggaataaaaagctagcatttgacaaatcaataagtaaaccattaaacaaaccaaagaaaacagtgagagggcgatgcattaccacggctgctgctgcggacggtgtagagtatcgacgtctccgttgccggtaatagtcatgatcacggtggccctcgtcctcttagccctttcctccgtcgttaaattcgaagttgctgtctcctcaggcgaagatgtgctgagttggctcctcctagccgcggttccattggctctgctcttcgccgtgagatgtctctcttgtcttgaaacgtcaaagcgatctacttactactgtccctgcggtcgctggagatgcgtttgctactactagttctgatctcgtggttagtgttgttgggtttgcgtttatgtaaataaatgatttcgtatatttttaggtattcttgatgtttacgtgaagcaaatatgtgtgacgtgaagcaccgatttaggtggatttgacgaacgtgattggttacaatattcaattttaaccttaaccttgatttattatatttgtatgatcgattatgctctatcttcaatcatacggcaaaactctcctgtgttccaaaaagttaaatttccattttactatacaaaataatggaatctaaaataatgaatatcaaaatctacggaaccgaatagtaaatgtttattgcgatattttataattatgtaattaggaaaggaaagaagctgtgaattaacagagtaaattatgtcaatttgagattaggcagattagagttaaggtgcttagggtaaaaggtcaaatccttttacgtcatcgttgaattttatggaagatgtggttaatgataacagttgaagcaaaggaaaataaggaaatttgataatgacgctccacctacaatcgtctaggtgtagcccattggccattacgaaagagagaagcaactaataatatttaattagaaatgaccaattctctgtatccacgttagctttattatctgtatatacactcatcttttacatttcaaatttccaaaaacataactctgaaggaaaatgaaattatgtaactatttggaatttggatattttatggatgaactggatcaagtaaaagaataaacacgaaatagtaatctttgtacataagaaactgagttcatgtttatggtttctatactatatctaatatacattatggcactatattttattttctaagcaaagaactcgaagttaataacctactaatttgctatggtattaatgattaatccgagttggatatacgtatttttaatagaatttggcttagtcgatataaaactatttggtcgaaataacgtgttagaaattctacactttctataaaaagaaatttaaagtacatactgcttaagaaaatagaccaaactactaatctttaaattacagatggtattggtaatgaatttgaacaaaaacattaatataatctttcatctgtcggtcaaacatataatattataacctaaagtcggtttctataagtttccctcagcacataaaagaaccaagaagaccttctctcatcatcattattataggaagttaggaactatggcttatgaagagagaagatcatcgatcctggattcattctcgctatcgccactaccatacccagttcttttgatcctagccgttgcttcagtgttcttgttgagttcatggtacttcagcttggaagaagcagccgaatcagcggaagagcagataaattttgcgcttctcttgattcctctgtttcttatagtcttggtccggtggttatcttccatggagaaccctgatgcgcttctcgggatgttttcaagcagtcgtcggacaacttacgtgagtcccggagccggaggtgacggtggaagctcgccgtggggagtggcggcgttgatagttttgttgcttgtattgcttcagtatcaatcaagtttcttggagatgtggtctggttaatgatattgataggtttttttgattttcacgtgttttgttttgtcgtctagtagcacgatgatgtaaaaatttggtcattacttacgaattacgaggtttaaaatctcgtgacggtactacatgttatccaatatcggcttgtctcttggttacacgttgcccaatactttgataattcatactttgagcaagaagtatggcgttgatatttttcaaaaactgcattttcaagaatgcatttacgataaagtttttaaaagaccctatgaattgaattgtattgaatacatcctcaatcaatgcatgatattcatatagttgtcacctccattttacgaatcgtgattaatcgtcatacacaaatgatccaccaaaccgcatgtgatggcactatatggctcaagagcgtagcctcacaacagttttagttcgtgtttataaccttttagttcaaatgtttatatgttgaagaggaaaaaccatttgtgattttgagagagattcatcaggtgataaatttgagttctatatatgtctttggatttcgtattatgatattttgacaacttttgttttctaaacttttatgttcaaatttgtcttcagatatttgttttagacatttgtttaaataattatgcttaaacagtgtgctcaattctttttgtacctttttaaaaacatgttttattatgattaacggacatggttgttaatagacataatcactatttgttcacaatcgaaatggtcaatattggtctagtccattttgatagttttaggtttgattggtagcttcttatcaaaacagtaaaatatataccgtttaaaagatccaatgaaacttgatcggtggtgaaatcaatgtttggacaaaaaggagaaaataatggatcattctcacccaaactatggtggttaccagagagccactttgcgtgagctttcaaaacaaattttttctcgatatttaaacttttaactttaaacatatatatatatatatatatatatatattaataaatgaataacaaagatctctacaagagtaagagtagtattacaattaaccattagaagctattcttgttgcttgacaattggaatgaaatatttggaaccaaactgtaagataaaatgtctttaagatggaaagttcacagaaaagtggccatacggttcatgttgaaagctgaccgcaaagtgatcacttcatgtggaaagttggaggaagtgggctgcgacgttgttacacttgaaccctataggggaaagagtggactggtataaggctatttggtttaaaggaaggattctcaagcatgcttttattgcttgggttaataagagacacatgctccatactaaagacaggctgaacagctggatacttagtgttccatccctatgccttctccggcaagtatagtgactaattgttgaccacagaaaaatttatacctacaaattaggcccttaggaatacttttaccaaattattatatgttcaatcttagaaattagtagtactaattagttaaacgtctcgacggaaacagtgttaatgaaatgattattcatcgaccattttgggcacctgatcttaggattggactacagcgcgtggcaacgagacgtgacataggcgcgtgagaacgaggcttgatgataccatctgtgagtgcgagaaagacaaaattaccctcgagagtaagagagagagcacaaccaccaaccctctcatcgcctctatctcctctgctaccttaagctgagagagtcacagtctcgtctctatctctcctctttgcctttttccactcactacacgccaaacccgacgacatggcagctacctctctcactgcccctccttctttctccggtctccgccgcatttctcccaagctcgacgctgccgccgtctcctcccaccaatccttcttccaccgcgtcaattcctctacccgtctcgtttcttcctcttcttcttctcatcgctcccccagaggtgttgttgccatggctggatccggaaaggttccaactttaaccctcaaactctattgaaatgctagattctcattgtttaggattgagtgtgtgagaaaagttattccttttacttgcatgattggtatcaattagaatccagattctctaaattgtttttggcaataatctcaaatctcctcagtcttcaattgattcaatgcaactttggtttgctttgctacaccacaaatgctagattcagggtttatgattgaggaagaaagttattccttttagaagaataagaatctcaaatctcttcattgcattccttggttagctttggttttgtttcctactccacaattgtattgaatgctagattcaggatttcgagtgtattccacattttaagttgtctaaacacttgctatctctgtctcttatgctgcagtttttcgttggaggaaactggaagtgtgtaagtacatataatgctcattgtcttttcttttcttctgtatgttgtctctcggccctgaaactaatgtctatgttggcatgtgttttagaacgggactaaggactccatcgccaagcttatctccgatctcaacagtgcaaccttggaagcagatgtaggtgagtttctgctactttttccaatgagtcaagctctctatatttggagcattatttccatttctgatttgaaaatggacctcatgttgaccatttgttctaaatgatcgtttttgcgtagatgttgttgtgtcacctccatttgtctacatcgaccaggtcaaatcctcgttgacagaccgtattgacatatcaggtcagaactcttgggttgggaaaggtggagccttcactggtgaaatcaggttacgacttctctttttcacttatactatatctctttttatttgattgaaattttttgacgaaaatattagagcgttgcaactaatccctccttatgactttccggtgtaatatatgaaccttgtctgaatttcaaagttgcccgttttaccatacagcgtggaacagctcaaagaccttggctgcaagtgggtcattcttgggcattccgaacggagacatgtcatcggagaaaaagatgaggtcagtaaaataaaacactttataagcactggtgagttactaagaaagggttgtgaaaacatatttgctctgttctcaacaaaaccatagtttatcgggaagaaagctgcatatgcattgagtgagggtcttggagtgatagcttgtattggggaaaagctagaagagagggaagcaggcaagacgtttgatgtttgcttcgcgcaactgaaggcgtttgctggtaacactcttgtattttctttgattaccctctcctgttcccaaacatgtctgaactcaattaacagcagtaagttatttgtattttcagatgctgtgcctagctgggacaatatagttgttgcatacgagcctgtatgggcaattggaactggtaaagttgcatctcctcagcaagcacaagaagtccatgtagctgtccgcggttggctaaagaagaatgtctctgaggaagttgcttccaaaacgagaatcatatatggaggtgcgttagattagttatctgtcgcaaaatgaaactttatgttgattattgccttctcaattgccaggttctgtcaatggaggcaacagtgcagagcttgccaaagaagaagacattgatggatttcttgttggtggtgcctccttgaaggtaaaagtaaagtttagacctttatggatatgttgttgatgaatagaagtaaagcagctcacactcacctttattgtgactctagggtcctgagtttgcaaccattgtgaactcagtcacgtcgaagaaagttgctgcttgattgagaactatcagtaacggaaatcgctagtctccatggaacagatgagatgagaaataaaagggaggttagcgaccttgttgttgttgttgtgttcttacatcttcttcttgaactaataatggaaaacagaaagaaaaaaaatgattcgtgagctctggtttgacagagagagataaaagggtctttgattaaagatctttgtaactaagctgtgattctttttttcaatttgagtaagcttgactcacgagtttcttctatgtaataatctaaatcaaatctcaagccacactctaagtgctcgatagtcctgacagagagataaaaatcttcgattctcaaacataccacactccaaaccttgagccatagtgcattcatcgcttagataagtcacaactttagtgtgaatcacaactcagtgtaagtcgcaactcgcagcccagtctctcctgaacaacacaagcccaaggagtgtggttctcttgtacttgctcctgatcatatcttcaacttaactatttggagagtccaatactttcctctgtaattgttttgatgaactaaaacattagtataaagatgttaatctactgctaaaaaagttactgatgttagcaacgaaaaacagatctaaaccatttataagttaacttgtttcatgaggagaatatttatgacaagaagtaaagattgtctaaagagtacaatgctggaacaaaaaaagtgtcgtttaaaaccctaaatttcctcaagactgaactttaaacttggaaactctttcaaaacgccgaagctgagtctataacaactggaaggagcaaaacagctctactttagttcttcttgttctttgttttcccagacgatgtcttggccaaagtagttccctgaagataaaaaaacatacccttcaatcagattattcaatcacactgaagaggaggaagaggaggaagagtacaaagagagaagcgaacctcgagccattcatcgagtgatgcctcggtagacctagttcctacttccaccttggaaacctttttggttttctggtaaaagaggagattatcaaaggaatgtttaactgcacaaatgatgaaccagaaaaagagatccaatggtttaccttggtgagacgctgaacttggctgtatgcccatagaccgaggaggaggaggagaccgattccgagtgttaaaaggaaaacagattcgccgctgagaagacctccagattcaactacctctatggttccattgtagaagacactctggtatggctttccttccacatcgtatatgatataacccaccagatcaaatgctccaggctgtgcaacaccaagcaagattagatctttcggagttttttctcaataacaattgtattttaagaatgaacgagaatgatgtattgtctattgtggaatatgtttacctgcaagtactggctgactgcaaagatgtatgggaatgttgcttgaagagacgttgggatggatgcattgttaagtctctgcaatagaatgcaagcatgtgaacaacaaaaaacaataaaatgataacaaatatttagacaaatagtttcctagtcaaatgcttaccaacatggttagattctgaaccaacaacttatgatcataaggaagatgaacgctggccctaattcccatcacacctactctagttttccctgttaagtcacagccaatttggagatatttagttttgacaacaaaacagaaaactcaacacaaagagagctaaagctaaaagaggtattagctaccttcatttttaagaccaacaaggagctcagtctcttctccagctggaaccactgcaggaaacaaagagcattaaaaaccaaatctttaagatcacaacaacggatagataaatacgtaagaaaggaggagtaaacacatacatttggcactgtttttggggaaaacacaaacagtctcaactcctggaaatgaggacaagttcatatccaaatcatggtcatcttcctcaaccgcatcatcagtgttttctcccacaacatcgtcaacaagacttgaatgatcctcggcatccgattgacatctagcaactgatcaaaagaaacaacatgaaaacacatcaggtcactaaagcataacgtcttcttcagaaaatgttacaatttgcaatttttcctctacccaagaacaatggcgagtgtaaagtaagaaaataaagacatgcaacgaagacactattgaagaatctattactaggggattcgatctacgttttaaagtttgtatctttgaaaccacattgctctaggattggcagcaacacacaaaacacagagctacaatgttcgaaggcaaagtattgttaaaggagctcaatttcactcggatcgatgaataaggacataacgttaccagatcctttaagaaaccagatcggaaacagagatcaaatgtgaaatccaatcagaaaacgcgaaggaaacaaaacggatctagatctacaaaatcaatggaaaaacaaaaagagaagagagaggagacctaccttgaagcagaggagatgcaaggagaaggagagcgaggaacaaaaccctaagattcatcatcgcttgattctatcaaatatggtcaacgaatttgcgaatgaatgagaacagtgtctctctcgatgctatttatgcttttgctctttcacactaaattaatttatttctgaaaaaaaaaagataacaacacaaccatagaaaccctcgcaaaacgacagcgttttgtctggtctctcaatttatttcgtgtgattttgttgccttgtatacatcaggggattcacaaattggtttctaacattcttaatttgtgtgctctcattataaatttgtaatcacaagatctcatactaaattttcacatgacatgaaaaatcacaaaataacgggtactaaagaaatcaaacagttccattattttaagaaaaattaaaaaacgagtgtaatggtacattgagggaagaagaatgagcattaaaaatgccatgaacattccactactattacaccaaatctgatcaatcatgtcaacaaacgatccatcaaaagcatgttctggtccagaattaatccccatggactgtgtaccgttcccatttctttgtcgggtcgtaaatctgaacaattataatgcaaaacaataagattcaaagtctagctgagaatgaaaagtgcagagaaaagattatttgagagttacctcccatctggaagcagggaatatatgcttgttcttctcgtaccaatgcctctccacaactttacccgcatgcgacttcattaacaccacattttacaatgctttagaaacaactttccatcatcaaactactctcttttctcatgtgatcgggtcagggaaacatacctcgtctttctctatcgttgcatctgctattgttctcacgtcttcatgcacatcaaagtgaaacagctgttaacaagaacaatgtaggagaagtgagtctcggttacaatttctatataaactgaatttcaaaaagtgtcgacaaggcataccggcccactcttccccctcgctttgttaatgatcagctcatagaaactgtgttgctacatttacaaaaaaataccccatgttatcgttaagtcctatatagtaaagggaggataacttggtaagtttaaagggttctcacatgtggaataataagatcttcctttacatatagtaaattctccactgatgccgtccgaatctcccggaagtcaggggcaagctgctgctgaacagcccgcagaaaattcccaattgggtcacccttgcggacctgtaaaatgggtatatatcataaaggtaagtaaatgatcacacacgtaaggctcaagcagtatgacaaaggtgtagtttgtgcttgcctgaataactcgtctatggccagtcccatcccagtaactgtaagtaatctcaagaggctcgtctgaaaaacaaaaaatagttagacaatcttccttgaatcaagtattacaactgaaattagaaggtaactagaaaatggacaacttttaatctgctcttgttcacgaagccactgcttcttcagcctttcacgttcagcttgttcctccgcctccctctcactgaaacagcaacctcaaaacaccacagctaaagttgagacttactgcaaaagcagacaaggaagataaagataaacaagagagctagagatcacctgtcaggcaggaaattcgtttccactgaggggtccttgccaagttttccgcagcgtaagttccctgtcccagaactctctgcataaatagtgtacatgatagaagttacaaaaaggacaacattagatgatattataaattcctacgcagcaagctatttgcatctcaaatcctccaacaaccaagcaatattccaatctacatttgtagaattaatgtctgtaatacatgatgagattctttattactgcaaaagatggagactatattttgtcaacttccatacattttaaaaaggattttattaaatctgcgaaagatagataaatattttttcaacttttacaaaaaggaaaaaagttatagtggtttaattgaatgacagcatgtatcacacctaatcctaactataccacaattcaccattgatgtaacaacagcatattcaggaatcaagttaaaagcttaagaaaatctaataaaaacagtcgaggtagactaagtcctatctacgagattgatgaatgaatgcacttactgttttctccatcatcttcatcactgccattctcaaaatcttcagcaaaagataagcgggaagatcccttaatctttctcttcttgttacgcttctctagctgcaactcctcttccctgtagttaaaaaaaaaaagtcaatcaagcttaatccaaagaataacaccaataactatgaacaatagacctaaaaacaaaactcactcttgctgtagcttctgcagtttctccttctcttcttcctcgaacttattacgaatattaaccctctacatatatcacatacagaattaaacaccacaatctagatgactgttaaagttggagagtaatacaagccatgactccaattaccttctccacatactcctctcttgtaactaaacccactgtttccttcttgaaagcagtgtcaagaatctaaccaaaaacaaatgaattagtcacagcccaaatagcaagataacatttgtgattcgtaaacacttgagacaccaaaactgcaatacaatctcaagcaatgatgatctaatcttgttctccgatacttctcagaactaatcgttagaattatactaaaccctaaatattgcggaagctactaagtcagagccagaacaagttctaaatctagtttctaccacaatccaccatttctcctctcgaaaccttagaaatcgattacctcgcacgagctggtgccgaattggagaagaccagattggtcattgccggaggcagacttgctcttgagctcttgtatttttttgcgttcggcctctctttgcttctgaagccgccgtatcctcaccgcatcttgagccgtaccaacgtagccgtcacccatacccgacatcttttcttctctcgcttcctttagctcaaaatcggaatcggaaattcactagattcttccgaccgccattgttgagagtggtatgcaatatacgcttgtgttcgttatgggcctttcaaataatattatcggcccaataattgggcttttgtctaaacccaaaaatacttgatcagttctctaaacccttgattggtttgactatttctcaactcaatcaattgatttgtttctattgagcaatcttttcaccatcaaattgtatgaaagttggaataatgatgtcacaatctactaattatgacacttgtaagcattataaatgcaaacttgtaaaaataacctatttattagagatctaatgaatgaattatgggttgtcccctaaaaagtatggaacaaatgataacctttaggacgattagacacaccatctacaaaatcatgctatttaataatgtatccatttgtctgttttaattagttaatcatatattcatatagatcttattacttagttttataaatgcgatcaatgtatacaaacagtcgaaagaccctgttccttaattctaagtaacccctatctatagtcattagttttgttgaaaagctagggatcgtcgggaaacattacaaaatataaaggtttgattacatagtttactttagtagctagctagaaataaatcggatcgatatgaaataatagatatgtttctcggatttgatcacacaatttaaaaactgatgatcatttagatttcgaatggttacaacataacgtatataatgtcgaatatatacaattcacatttgtctatatatgggttaatggttatatgtaaagtagttgagagaagaataacagattgtgtttgagctggcttttctgttaacaggaagtcaggaattgtggctgagggaccttgccagcttcaaaagtgtaatgacataaattagtatctctcttctaccttctaaccaataaccatatattataaatttatcacaaatttcctctctaaccaaattcaacaagacaacaacatacgtatatatacttttacaactatatttcggcataattgttgtaataaccttcgttacttagggcttgattggttctccctctgccacccgcaaacgctgcgtttgcgggtgatagcggttattagcggttgacaccaatcatagaaaccgctagataccgctttggaccgctcgaaatcgccagatttcaaaagctccttcccacaagcgtttgcggttgcgggcggtagcggttaggttaaaaaaaaaaaattaattaattaaaataattatgtcttccacccaaaccttatacttattcttatcagaaaaccctaatcaatgaaaccctattctctcaattatggcatccacccaaactaacaaaaatcaaagtcaaaatcaagaatcaaacgtaagtatgatctatcctttcatccattcattagctagtgtaattctcggaatatttcatggcatcgttgtttttttttattttgtttttttttgagttttttgattgaatacatgttttgatttgttttctcgattagaaaatcatttggtcaaacgagaccacatttgcgttacttcaacgggttattgtggagaaataaacggaagaatccaaagaccccaaaatcagatttctaagtgatgttcaaaaagaaaatattcttaagaatattaacgtttggaaaaaatttgagttggagatgtgttaaaaatcgtttggatatcttgaagaaactttatcatatgtatagaggcaatccggaaaacccgcgagttcaacgttatttacagtttatcacactacttgatgcaatttttggtgatgtaccaaatgcataaagtattaaactttttcttacaaaatttatttatttttgaatttttagttttatttatggttttaattattaagtatgtttaatttttcaaatattatcaatttatcataataatatattgtatttttttttcttttaatagtaatatattatatttattttggttattttttatttaattactatcgcatccgctggtttaccagtcataaaactcccgcaaacgcacccataaccaaacgctcaaccagtcgttcaaaacacttgataacgcttgaaaccgcaaccgcccgtttccgcaaactcccgcaaccgcaaccgcacccgctgcgtttaaaccagtcaggcccttagatcatgcgacttgcatgcatgccaacgccgtacttttagccatagtggtaaaaaacatgacttgttaattcaagccttttagatgtggacgtattaccaactacgttattcttatttcctattactatatatagaacttgtgataaggtatatactttacaattttgtgtcctctattaatgttgtcgaagttgttcaccgacttttcctaaaaatacacacatactagagttaccatcacacataatgtacgtgactactataaaactcgacacgaatatagttttttttttctttttttttgtgtgtgtgtcaaattatggacgtaaaaaaaaacaaattatggacgtatagctagtgattagtgactaggacttcatagtatcctcgggtgaagatcgttgtctcttttatgacacattgacaccaaatactcaaaccaagtcaatactttgtctatgttaaacggtataaaattgttaattgtctttaagaatttccacatatttaggtgatgatgatcaacgtgaactctccctatctgtttctttggcgcaaataaactaaagtttatcctctaaatgctctcatgtgagacgaattaatatggggtcggtggtgcgtagacatacgatttcaattattcatctgcatacgtttctatttatgattttttgtattaacgtgtttattccggatcaatgtattccaagttaaactgaaaaagcaattgactttaaaatttaacatgttttagttacttaaagaaaactgatgcaattgatatccgaaacaaattggaaacataaaatcctaaatctaaaattttcagtttgtttttaaggttaacaatgtttgaaactcgaattcaaactaaagaccaaatcaatgtaattgtatcaatatattcagtttatttaggttctcatcttcgtggcaatggtaccaccaagtatttgaatagtaacttttacaaacaaacacactaaattaattaattcatgaattgataaaataatagccctaacgaacctataaatatacacgtgaggcgatctcatcagtagaatcatatcttctttctcctctactagttacatatcttcaacaaagtgaatctcatgaggatattaccgaaaagcggaggaggtgctctttgcctcctctttgtgtttgctctttgttcggtggctcattcccttagctgtgacgtcaaggttgttggcgatgtcgaagtcattggctactcagaaatcagcaaaatcaagatccccaatgcattctcaggtctagtatatcaatatatgctttataatcttatcaacggtgatcacgtccatatatatatgcatgttgtactaatgctacggtcgataaatgtcccttctataggtctatataatttgattgattatgcatatataaagacactcttctcgtaacttaatataattgaattttctttcgttgcaacgtttgtttgaaataggacttcgagttacgatagaatgcaaggcggccgattcaaaaggccattttgtaacgaggggaagcggagaagtggacgaaacaggaaagtttcatcttaatattcctcatgacattgtcggtgatgacggaactctaaaagaagcttgctatgctcatcttcaaagtgccttcggcaacccttgtccggcccacgatggccttgaggcctccaagatcgtgtttctatcgaaatccggccaaaaccacgttttgggtctcaaaaaaagtcttaaattctcaccagaagtttgcatctcaaagttcttttggcatatgcctaagttccctttacctcctccgcttaatctcccaccgttaacgtttcctaagatcaagaagccttgtcccccaatttacaaaccaccggtggtgatccctaagaagccgtgtccaccaaagattgcacataaacccatctacaagccgccggttcccatctacaagcctccagtgcctatctacaagccaccagtggttatccccaagaaaccgtgtccaccaaagatacacaagcccatctacaagccacccgtgcctatctacaagcctccagtggtgatcccaaagaagacatttcctccacttcacaagccgatctacaagcacccggttcctatctacaaaccaatcttcaagccgccagtggtggtgattccaaagaaaccatgtccaccacttcccaagtttccacacttcccacctaaatacattccacaccctaagttcggaaaatggcctcctttcccttctcatccttgataaagatgcaaaatcctctgtctttcttaatttaagaaaagtgatcgagtgatgccacaaaagaatgttcctttgttgctttgttgaattctacgtagatgtttcatgtttatgtatcgtaaattccagccaatcatatttgtaattttttaccgttaaaataaatctgtaatctcgtttctgttgatgatctttttttcaggatcttcattagcacaaaaagtatcaattcctcttttttttttcttttcttttcaaacatatcaattcctttgaaatatttgatcgtaaaaaaacttttaaaaatgtaaaataaatgggtagggagtagcaggtccggtccaaaggatagagtccaattataacccaaaatcatattatgagaaaaggtccatcaaaaaggaaattcaaaaaaaaagttattctaacatttcaactttatttttttttttgttaaatatgtccaaatatttttaacttctatatattttttcacaaaaaataagtccaatcatttaaaagaaatggccatgaggagaggcggagccgtaaccgggagattgaagtccgtgttgggatcgatatcaatttagagcctagtctacgtataattggcaaaaggaaattgacaatagaacaactagcgagctgccatgcatctctcctgattatttttccgcaacggaagtcatcttgaaaagcaagttaagttttgctcaaaaacaaaagaagattagggtttttgtgtgtaaaattgcggattctttaaatagaaaacaaatctttttatttatactcaaaagaggcatttaagataaaccaaatttttgttagcgaatatgtgtgtgtttttgttaacgagtaaggcatattcgaccaaacacatcgtaaatcttatttctacgtattttttccaaaagatggctcacatttctgcttgtgtaatagttttcattatgtagtcttgtataactttaacactttaacttcaatataatggaatgattttagaaggaaaaaaaacaaaagaatataaactcaatttccttaaatatagggtttgaatctccaagttacctttatcttcaaaccttgtcattatcttataagaaatttcttatgatttctctttttggaaagtcggcgtttccttttctttttttgtgggaagtcgactggcaacttatatgggcttttttcaaaggctattaagaggtaaatcgggattccctgatttaattgaaggaattgtgacacgtttaggcactttttgataatattattctttttgagacacttatgagagagtgaacactttgccatctttttgaaagaaaattggaccaatttatccctaaagtagtgattacgcaataattttaactcattattgttgagatcgtgtgggtgagaaattatcttctttttatcatctctctcttccatattcttttgtttttcatcattttcaattctctctttcaaaatcattgttgttctctataattcttacaaaatcatggtcgttcccattaattttctctcctttccataagaaatcaccaatcttcattataccatatataatctcctcataaactttcgatttgtcgtctcctcataatctcttcataatctccaagtttgagatccacgacaacaaacccaggaagaagatgatcatcatccttgcgattctcagaatcctctaacaataagtttctttgttattgtctctactgattttttctgtttatatcaccgtgaaattctagatattacgatgttacagagattagaggtctttgttcatcgtgaatttacttgcgattaaatcgaacaattagtggattaggctcttatagtttgctagtcatgttttttctgaaaatattgaagttatgggtttaatttatttgaaaactgatagagaagcccaagttgatatatcgaacgttgatggatgtgtttggtaaatctttgttcgtggataaaagtgtgtttgtagctcgctctgcttttgttattggtatgtgcattatggatggcttattatggattgtgaattatggattgttatggtgagatttgtgaatcttttcatgtttgattaataggtgaacaatcccaaaaacaagctatatgtggtgattttgttacaatgatgtccatattaattggtggttacagaacacttgctgcaaaggctacagaacagtggctgaaaagcggtggatagaggacattgacgagtgtccaaaaaatcaagtccaaatggtcacctagtaactcacatgtcgtttcatatcaatggacaaatttagacatgaacagtaatcgtcgataaaaaattgttgagcttttggggttcttcctctatttaacttttagaggttcacttctcttacatctctcatttctcattaatgctttgcttaactcactcattttaacacaagcacaaaaagaaccttcactctctttctctctagtctttggttagtttcttgttttgacacgaagacataaaacgattagtaagagagagaaaagagaaaacattagttgtcaacatttttgtattggatctaaagataaattcttataacaagacatacacacatttgtggatggttataattgttaaatccaacttttaattttactgaaattacagaagatctctacaaggtctcaaaggctcacgttgtatccatgaagctaaagttcatgaaccaaaattagcaaaggctgtccacaacactgactgtcattatgatgtgtgtccacatatccaacgttttatggtagagtttatatagtatagtatgtgaatgtattaaccttgtggatgtaattgtatggttaattttgttcatttaataagattaaccaaattaattggtcatggtttccaaaataatctcgaatcctttgtaaaaaaaaactaatctgcgaaatataagtgaagagaatcagagctagatccacgtttgagaggataacgtcctcttgacggagatatgattgttggagcggcaaaaagatagggtctagaacttcgagagaaagagagaaacgtaacttgcccaagtggttacaattttgatgcggttgttgaaattcgggagaggcttcacgatcatggaatcgaaatcgaaagagagaatgtcgatagcgttgttgtaattttcgaggttacttctgacggaaattctgtgaccggagactttcacatgttttggaatcggatccagcagacaaaggtggatttgagaatatatttgaaaaagatctcgagagagaaagaagaagagaagcaatagattgttgagagataaggaagatgatgataaaccttaagagattcaattttgaatattaagagtgtcctaaaagattggatttttattctggaaagagagatgaagaacaagagaggccaaaattgtttttgtattcctaaaaaaaaagataacgaagagatattactaagcaaaggaagatatagttagagggtagtgatgtcaattcacatcaaaaaagtgtctaatgattgtgaagtgcctaattacggctaaactttcagaaaagtgcctcaacacgtaatattctctttaattgaattgttcaattaatttgaattatacttggttaagcccgtattgttgtgagtgccaatttctgcatcaagagttggcataaaaaaagagaaggagaagatacaaagggcaagggtaagagtgcaaaagaaccttctttcttagtccaaaaatgtctattcttgtaaggcccaaaaatggttcctaaattaaaagattcagcccatttaaaccccaaatcaataataacctcctataatactatttttcctcttaccaaaaaataaaataatacaaattttttgttttattgagaatttctattttgtatttattcattcgatgcattgtttacattattattattattattatcatatatttaaatttgaaatttatgaatattcatttctatagatagtttacagttttatctatcttttactatttacattactttgatttttattagtataaattaaaattttaaaatgaacaatgtaaccattcttttttacacgttctcctttttacttgtcgttttcgacataatatttccgtttcttttgaatactttcctttttgtttgtcttttttaacataatattttcgtttctcttgaatacttctccttttacttgtttttttcgacataatatttccatttcaataccatacttcggtttttttccttcgaaaattccctttttacttgtcattttagacataatttttcagtttctatgtcatatttacgtccttttaattatcaaaatgtaggtaaaaattaagaatacactatattttcattttttaaaaaattcattgaaaatggaaataagtaaaaaagtaaattggggtttgcaacattacagagcaacaacacgtgtcgacctcgggatggacaattcgagagcatttaccgtggtcaaaaactcaacctaaccacggttcaagaaacaatggagatatcgacacgtgtctcaatctaaatacccgatgatattatctcacagatattcgcttcctctataaatatcttctcttcgtcctcaacagcttctccagaaaatctaggtcacacacttttaaaatcctcgttcccaaaatcgaacaacaacaatggcgtcgcatcctaaagttttcttcgacatgaccatcggcggtgcaccagcggggaagatcgtgatggagctttacaccgacaagacaccaaagacggcggagaatttcagagctctatgcaccggagagaaaggcgtcggacgtagcggaaagccacttcacttcaaaggatcttcgtttcaccgcgtgatcccaaatttcatgtgccaaggaggagatttcaccaaaggtaacggaactggtggcgaatcgatctacggagccaaatttgaggatgagaatttcgagaggaagcacacaggacctgggattttgtcgatggctaacgctggtgctaacactaatggatctcagtttttcatctgtacggtgaagactgattggcttgatggtaagcatgtggtgtttggtcaggtggttgaaggcttggacgttgttaaggctattgagaagatcggatcttcttctggaaagccgacgaagcctgttgtgatcgctgattgtggtgagatctcttcttagattccggttgtggtggtgacggtttcaatttctatgtttctagaagtttcttcttagctaattatggactgtgatctttgctctgtttctgcttttgcgtattttcctaattaagcaccattaataataagaaagttttaaggaattgtggcgtttttgtaatactgctattaaagatttttggcgttttgtccaatagaccataaatggatattttctataattagaaaagcattatatccatagggtaatgagatccaaattgttttatatatcgatgcaatacggctggggcctttaggcccaacaaaaattgagcttatgcaagacctaacgtattcacatacctgtaaagttgttatgggcttcattcgtaatctagaaatgtcttaagagtgttgttgttacaagttttctttttggatcttataagggtcaggactaatttattaaaagtagtcgtcgactatgtacaacaaaattcatagttaatcaaatttgactataaaaagtttagtaacatgttgataaattaattaattagcaacgttccgcgtaatgctgcagctagtaagatacgcaggcatgtgctgattttgaatgataaatatgacaatattaaaaaatagagagaggcaaaccaaagaccaaacgtgtcaaagtttatatgatccctcgattttttattattattctcgtttgaatcgttaagagtacagtatagtagttatataatttaaaagtgaaataattaggtgagaaatggttactatggttaccaaatgaaatcaactacacaagtagtctgcgatggtgtgtgatagaaaaattccaaaaataaaattgagcagccgacggcgatatagtgaatgaaagcaaagtgtttctaattgagtaatttctatcgaactaattgactaaaccaaaacgcgtaccggacccggttaagcatcggcaagacccacgaattttcctgagctgtcgtcttgccagaggcaaaaagacagagagaggagagacgagagctcgtcgaaccagatctctttctctttcttctctctaattttgatttttttgaattttcttctgcaaagcaaaatcgcagaagtcgtcgtgtgtccgcgttgcatcgaaccacttgttcgattctctttcgtcatcctctcttatatcatcagcaacaacaacccttgtttcaaatttcttcatttccgccggatttataatcgcagattgattctgatcgatagagatagggttattcaaggagagacctcgattgacttcaattgtcttcctgattcgatagataagatttagggttagcttgacgttgacgttgatataggggaatggagacggacaatgggaaggggttgatactagctgtagcgtcaagtgttttcattggttccagcttcattcttaagaagaaaggtcttaagcgagctggtgctattggcacccgagcaggttctctcttcttctccttctccattacttttacagtttttgcttaccaattttataacttgcgacttctagtctcgtaattgaatcgattttgaacttacccgcttttataatcttgttccatattacacttttgatttgtttattcacttatgtaacgtcttcactcaatcactcaaatggattcaataccagttacaaaatagttttatttgaaacattttcactatcaaaatgatataaaccactagtctcacattggaattggtgttctctcacatggatgatacaggatatggaggctatacttatttattagagccgctttggtgggcagggatggttactagtgagtttttcatttgttattacttcttacttttctccatcttagattgcaataacaagattatctctaacttcaaattttgtttagtgattgttggagaagctgcaaactttgtggcttacatttatgcaccagctgtactcgttactcctctcggtgcattaagtataatcatcaggtatctatgtcatgatcactttgctctgttatgtgttggtgacttgtgtgatattaacctctcatttttttctcttttgctagtgctgttttggcacatttcttattgaaggaaaaacttaagaaaatgggggttctcggatgtgtgtcttgcattgttgggtctgttgttattgttatacacgcacctaaggaacagactcctaattccgttgaggaaatatggaatctggctactcagccaggtacctctctctctctctttcttactcacacacgttgtgccttatcctatctgtagttttttttatctgaaaacacacatttttccttttcttatgtatgtaacagcttttctaatctacgtagccataaccatgtcgattgtccttgctttaattctgcattttgaacccctgtgcggccaaacaaacattctggtttatattggaatctgttcgttaatgggtgctctcactgtaagttggttcatctcagcatactcgagcttttattcaattttatactgcacttgtaactctaatatatcttgttcttggtgtctttaaacaggttatgagcataaaagctattggaattgcgataaaattaacaatggagggagtaagccagatcgggtatccacagacatggctttttgtcatggttgcagtaacttgtgtcgttacacaattgatttacctaaataaggtaagctctctacaacagatttgtttggaaagccttatatatatatatatatattctggagtcaatacgtcagtatgcaagtgtaagtagaacagttatatcgttaatgcccgcaaacaaatacccatcagtagatcattcctcagcttgacctatcccctagggactgaatcgctagatttttccggtcaaaagatatgaaccttaaccatttacacctgtagcattgaaggtctcttttttcccagcaaacatatgaactctagaactcacttggcattgttgactaaggcctaagattgttacttgttatgatttttttgcaggctttggacacattcaacgcagccattgtttctccagtatactatgtaatgttcacaaccctcacaattgttgctagtgcaataatgttcaaggtaggttcaactagaaaacgtttagcttgatttacaaaagattagtaaaaagcaaacactgtaacattgaaactcggttttcacaggactggtctgggcaagacgcagccagcgtagcctctgagttatgtggattcatcactgtgctcacagggacaatgatactccatggcacaagagaagaggaacaacaacaagcttcttcaggtaaaaaaaaaaaaactcttgcattttccatcatcgatcatatctgtttattcttctgctgccattattaagcataatactggtctgatctttgggtgttcagaacatgtaagatggtacgactcgagaaagagcatgaacgaagaacatttggtaagcctgtacagtcctgaatactaggaagaagaagatgcaatatctctaggctctcaatagattgaatgaaatttgccaaaaacaagcctcatgagtcttaaaactggatcaatcaacaaatctgcggtcgggttcatttttgtattgttttatggtcactgtacagacaaaaaagtttgtctagttaaaaaaacttcacattctttagttttgatctttgtgtctctcttcttagtacagtacaggtcttcttcttatctggactcttttgtccaaatttacactgttatatatttatatatgtatctacatttttctaggatgaaatattccttcattgtatctcacttgaatgaaataataaggtaaaagtttgatcagaattgagagaaataacaagaatctctgtttcgtttctttataaatcgatcaacgagagagacagagaacatgaatattaccattttagagaatctgaatgatcgataagtccgttatacgaaggaagacaagacttcttagattcataacaagttagaaatctaccggtgaaatcattgtaggatactaaagtgatagaagtttgttcggtggtagcttgagactttgtctttctttaccaccagtcaccaaaactctatcattttaatctcggacattttagtgagcatctaacataagaaggaagaattgtcttctctttctcttggaaacgatgaagttaagagatatatagacaagtaatgatctactatcttatccaggaaggtgacacgaaagtaagccacatgtactcaccttacattgtctagatatatagacaagtaatgatctactttcttgtaatttaggtgtagaaatagataatttctattctcatacaaattatgaaaaacagactaaaaacatataaattacaacaaaaacaaatttcttgttcttggtattatatatttcttgtgatttggtactacaaataagtcataattactctctcatattagtattcattatagcaaaacataactagatgagaattaaataataatgatttctttcaaattctaatcatttgatttgtttcttactttattttaatataaactgtatgcatatggtaaagaaatgtaacatggatttgactccagatcagtctaaagcctgacctattgagtcactatcttcctattcaattgcaacctttggtcactcttttatattacaatacatgtaaaacctctaacaaaaaacattacaggtaaaccaaaagagattaatggggaagaatttaggattagtagttagtttttatctttgcatcacgttcgcactcggcgaatacttttcagaaactcgtccaatcacaccgaaacaactagtggtcacaaatctccatttcttctttcacgacactctcaccgctccaaacccatcagccatcctcattgccaagcctactcacacaagaggagacaacgactcttctccctcacctttcggttctctttttgctctcgacgaccctctcaccgttggaccagacccgaaatccgagaagatcgggaacgctagagggatgtacgtttcctctggaaaacatgtccccacgttgaccatgtacgtcgacttcgggttcacatcgggcaagtttaacggtagttctatagccgtgttttcgaggaatacgataacggagaaagagagggaggttgcagttgtgggaggccgaggaaggtttaggatggctagaggagtggctcaactcaatacatattacgttaacttgaccaatggggatgctatcgttgagtacaatgtcactctctatcattattaacaacactatatacataaaggtctttctaaatcttaatgtaatcacttcccttggaataatttaatgcatgttcatgatttttatatattaagctgttttggttgccatgccttttaaattgtaagaaataatacattccatgaaaacaaagttagtctatgaaatctccttaaaagcatcttcaactcttttacattttgcatacatattaacaagtgcactcccgtgcaacaaaaaaggtggtccgaatcaattttttttttttttggttgcccactttctatctattactcaaaatcttaatcagtattagtactaaaattgtgttaaatactttgttaaacaatttttattgaaactttttttttgactcttatgcacattacaataatttctcttcaaaaccaaagaatgcacttgcctaccaagatcaagcattttttcagaagcaatccatcaacagtacatccaaatcgtctcgtagatgtaaactactaaaaagcttgacggatcgggaatattatggattcaatttttctatttatctcatacatgtaaactactaaaaaccacacagtttaaaactataaattacatttgaccagaagatcctatcagcaccattacataatttacatagccgagttcggagttattagatccaccaatgcaataacatagagttctcttaagtagtctaattcaaacaattaaattattaggtgaaccattacaccaccacatactgactttgtcacatatgtcccagcatactttttcttttagttaaagatcattttgcagtttggttgaactaacttggactgggtgtgattcatgtatatgtaagttccctataaatagaattatatacgactgcaccaaaaactcattttactctcacaattacaaacactttgttacaatttagaccccaccagaaaaaagcgaaaatggcaaaagaggaatatgtatcaagaatgttggttatgttaataatgataatgccactggttgctcagggatcgagactgcatagttgggctaatcggcttgaggaaacagggaaggacaaggtaacaaaccttcagttctatttccatgacaccttgagcggcaagaatccaaccgcagttaaggtggctcagggcacagacaccgaaaaatccccgacgctgttcggcgctgtgttcatggtcgacgacgctctcaccgagaccgctgatccaaaatccaaactcgttggacgggcgcaaggcctttacggttcttcatgtacgtatattatttcttacaataaccgaaccgaaaatataaaatgggtttgggacatcactaataaccggttttggttggtacaggtaaagaagaagtaggtttgataatggccatgagcttctgtttcgaggacggtccttacaaggacagcaccataagcatgatcgggaagaactccgcgatgaacccaatccgagaaatgcctattgttggcggcacgggaatgttccggatggctcgtggctatgctattgcccggactaattggtttgatcccaaaaccggtgatgccatcgttggctataacgttaccattatgcactagaaaggctttgtatcatataatacggcgacgttttgcaatgtatacacgtaacatttcactacttcttttttttttttttgtcacaatagtgttttattgatattatagagccaaaagtaacataccaataattcataaagactaaaataaacgagcccaaaacacaacaacaatccaaaagcccaaatgaataaacctaaacttaaggaagagaacaaaagattgttgtgcgccgcatagaaaacacgtgtcagtggaaaacatgtttgaaatacacgtagaaactggaagaaaagggagtcgacgtcagaagcttcaattccggccgaaacaccagaaaacttgttcaattggcatagctcactcgtcgcccaaaggattaatggcaaaattctaattgtagcttggatgagaatttgactccactaagtgcaattcttcttcttcttcttctttcaacatctttttaacttttagggttcatcaatctttgaactgcaggcagaagaaaaaaaacagaacaaatctaaatccggtcaagaaaccggagagaaagccggcaaaagacgccagaaaaaagcccgacgaaacaagaaagagaatatcttgctctcgggagataagccagccaccaccgctaaaagtagtcggtcgatgccggaagctgagccagtcaacgcttctaaggaagccagcgatgccggaggagaagccgaccaaacaccgctgataaagccagtcattgtcggtcaaaaaaattgaagctgctttgctctctctgaaagatgaggagagagaagagagagaaaaccattctttttctactactctttttttatatttggagatttagcattgctacgagatgaatattttctataaaaaaaaaatatatttattttctatccaaaaatattttataatccagttattttattttaagacatggcaaaaatcgtaaatacgttgatataagaaggcccatgggctttagacctaagcccaaaagtgaaaaaggatttgtctttgttagtatgatccaaaccaaaaccaaaaccagatccggtttctaaacccatccgacggcatatgatttcttaccggcgaatctcgccggcgcaaaccctttctgacttgtgttcgccgggatccaatcgcaaatcgttaaagtcgcttcccatggtggtttctccctccaatgcccatcagtaaccctaggaaacggccaatctgtgtcgcccaatcgtttctcagcaaacacgcaacgaaagcagagctctctcaggccgtatctcgtctcgagtccttgactcaacaagggattcgattaccctttgacctcctagcatctctgctccagcagtgtggagatacaaagtctttgaaacaaggcaaatggattcatcgtcacttgaagattactggattcaagagacccaacacgcttttgtccaatcatttaatcggaatgtacatgaaatgcggtaaacctattgatgcttgtaaagtgtttgatcaaatgcatctcaggaacttgtattcgtggaacaatatggtctctgggtatgtcaaatcagggatgttggtgcgtgcacgcgtagtgttcgatagtatgcctgagagagatgttgtttcttggaacacgatggttattgggtatgctcaggatgggaatctacacgaggcgttgtggttttataaagagtttaggagatctggaatcaagttcaacgagttcagcttcgctgggcttttgacggcatgtgtgaaatctaggcagctccagctcaatcggcaagctcacgggcaggttttggttgctgggtttttgtcaaatgtggtactttcgtgttctatcatcgatgcttatgcgaaatgtggtcagatggagagtgctaaaagatgttttgatgagatgacagtgaaggatattcatatttggactactctgatctctgggtatgccaaactgggagatatggaagctgctgaaaagttattctgtgagatgcctgagaaaaatccagtctcttggactgcattaattgctggatatgttagacaaggctcagggaatcgagcgcttgacttgtttagaaaaatgattgctttgggggttaaaccagagcaatttacttttagtagctgtctatgtgcctctgcgagcattgcttctcttagacatgggaaggaaattcatggctatatgatccgtaccaatgttagaccgaacgcgattgtcatcagttctttgatagatatgtactccaaatcaggtagtttagaagctagcgagcgggtgttcagaatttgcgatgacaagcacgactgcgttttttggaacacgatgatttctgcattggcacagcacgggcttggacacaaggccttgcgaatgcttgatgacatgatcaaattcagggtccagccaaaccggacgactctggttgtgattcttaatgcctgcagccattcaggtctggtagaggaaggattgaggtggtttgagtcaatgactgttcagcacgggattgttcccgaccaagagcattacgcatgtctgatagatctcctaggtcgcgccggttgtttcaaagaactgatgaggaagattgaggaaatgccttttgaacccgacaagcatatctggaacgcaatcctaggagtatgcagaatccatggaaacgaagaactgggaaagaaagcagcggacgagctgatcaaactggaccctgagtcgtctgcaccatacatattgctgtcaagcatttacgcagatcatgggaagtgggaattagtagagaagctgagaggggttatgaagaagagaagagtgaataaagaaaaagctgtgagttggattgaaatcgagaaaaaagtcgaagctttcactgtctcagatgggtcacatgctcatgctcggaaagaagagatatacttcattctgcataatctggctgcagttattgaagaagaagcttcaagaacatgatctctcatacaagaagaagcatcagcgaacacctgcaatttttcttctcaggattgtacactgttaaagcctgcaaaagcagggatttatacgttcacggagtttgtgatgattttgatgtagctttagaagttttgtcagtgtaacagagctagaaactacagacttctaattctttttcctttttgtcttcttcttcaagatttattggttaataaagaagcaaaatcaaaccaatttacagataaaatgatggatttttcaggtttgtttcgtattggctaagttattagaaagcggtggagatggcagagaaagggacaaatactaaaataaagaaaaagcgatacagttggagcaaccaacatttatgatgttcatcaaacattcaaatccaacaacgccacaggacaataacccggttctgtctgttaaaccagtgatcaagttttttttttgtttggtcaaacaccggtgaccaagtgttgtgcatcaatcagagcatccatctttcgaaaagtcaggcttcacgagaagcttttgcagcgtcttttgttgtctcataaataccttaatgaattctaagatagaaccacgactttgctcaggatccacatcaccagagagaactcaaatgcaaagagcgtatgaagcagtcccctatcgagtgcataaccatagagtgtaatccccttgttgttatgtcgcaaatattccactgcaatgtaactcctatcaattgctcgcaaataatttgaaaaaagaagagcatgctatcataattgtaacgtacctagagcttgcctagcctggaagaaggaagatagatccagtgacggtgacacattgatgtatatgttgtcggatgagtcagtgtcactttcgggtgatacggcttcagaagcgcatgtcaaagccatgtgccaccttgttgcaatacacactactccttgagctctgtgtgtgattcttgcagcacccaacaagcacaagaagaatccacttagctgtactgcagaacataccttgagatagaaaagaaaatgaatgctgcattaaatgcagaacggtgaaactagaaaaattattacaacaaagctttatagaattaccaccaaatcaccagagctgaggaaactcttttcagactttgaggcaagaaccaacaataaggccacaaactgactggtacttatcacaacaaaggcggtgatgatgaagaacctgtatctgtgacttgtagccgacaattgtttcttgatcctcacatgttccttgcatacatcttctatggtgtctgatccacatctatcaaacagcttgtgaagccctcgaaacctcagtatctgcagctcacaggtcaaccggaacaagatacaaacaagcaagaacactcctgtccggtaaacccatgaaaataagacgaggaagaacatcacaaagttcaatgcagcacaagatgactttatgaaaggaaatgatacttcggcggagtagaaaaatatgctcttatgcacaagttccacaaggaaagacggtacaagtatgtaggctaggtaacgtaaggccttgtcaagttctcgtgaatatccaagcctcaccaaggtagaatcatcaagaaacagaagctttgtgagactatatattctgaagaaacatattagagtcaagaaaccaatgacggcaagtccagactctggaaactggacgagcacattgaaagagttcgcatccataactgctgaaggccggtttctaggagttttgataaacagacaacttatgagagggactagtaaggtgaagactacaaacatcatataggacacagctttaccacaagaggaggagtgatccaaagcgcaccacttgaggagaagacgaaagttgcgcaaatcatcagaaggcaaggattttgaaggttgtaagggggtgttagagaggtttgggaggtgaaggagaaagtattcatcttcaccaggattcatatctttccaaatgaatcaaagggttgagggatcaccaaagttatatataggtggtcactgcgaaaagagaaaatgacaattcaaaataactacacccacatgcaatgcaagatatatataggtggtagaggtcttacatttttcatcacaaacgatggttgatcaaaaagagaaactggagagaaaggcaaaagtaacttgcttagtcacgtgaagtgaagaaccctctctctctctctctcctttactacttttgggtaatccaacttggctctgtgtatctttccccgtaaggtaagtcttttcaagtcttgattctagttatatatgcagttgagaaacacgagtggtctgctatgcaacacttttcatccacaacaagattagctgaaaaaagtttgcttgcttctgttgagagtaattgtctcagtttatgtaggaatcaattcaaaagacggcttgtttttgtgtgtaagaacatgtcatgtgtctaagatttgaagattcatcattttcatttagtttttgacagatgccagtcttcaagtcagaacagtaccctgggactcgttaccggcaaaatttggacttcaaactttcttccaacgaaccgaagaccctggagaacaatcctgcatatgcaaaattaaaccgacaattcagttgtcttcacgttggtaactaacagcgaaagttttggtacttcgcgattttggtgagatcaaatgaatagaaccaaagcttttgcagattcatgaataaagaagtgaaattttttccagcaacttagggaaaccgagcaaaatgactaacctgagaggggactatctttctgctgcaatgatccttttataagcaacgttcctggcatctgttggaacacctgtaaaagaagtttcttcatcataaacaattcgaaaaggtgaaggcaattgttagggatttctcaaatgaaatccaaacataccaagatgcggaaagataggttatattcagggacttgcaaactggagccatccagtgactgtttttcatatccatggcttcttacactatctacatctgcaatgtcattctttgagattgtgttgcactggtcattagatgcaacaatctgcacaacaatagaaagaaactccattgagcttgagatactgtagaaacaagattggatggcaagacaaaacaatacaggtagtgcacttacgtcaacagaaaatgtagaagagtttaacttgcacgaggcgccacagctcttgaagaattcttcaactgattgcagcacatctacggcactgtactgccgtttaatgcactataaacacacaaatccaccatggagaatgtaaggcttttgtaaagcccgagacttttatatagttacagaacaaatataagtaaaggatgacgaaagttatagatagaatacctcaagcataaaagaaagaacgctctttttgactacaggaggtgctataatcttcctagctattggcataaacgaccaagcgaggccccaacgggatgtttgaccttggacaaattcagtggtcttcacaatggtcactcccacttcccaaagcttagatatcaagagtttgaggttagccttctttccaagcattgaagtgtaccacctaatattaaacatgttcacaaaacgataagtcctgatggatggaaaaccagaatgtggaagatccaaaggtttatttgggtacaatttacctgaatctttgcctcagtacagcgctatctttgataatacgtgacacaaaagcttgctccccaccattgcaaaccatctcttcaggagttccaccgcatgaagttttaggatttagccccgcttcttcaaaggtctcaaaaaatggaggattggacatacagaagtcgaatgtttcgttttccttgacaacaccgagtagtacagctggttcaataaaactcttgttgtcatgataatcagacttaaccgtggcggaaatttcagcttcctcctgtatggttttctccctctctgtattttcaacctcagggacagaggaacactgtggaggaactttagagtctctgatctcgataaggtctgaaaaatggggattactttgaacattcttctctgcccattctagagctacaacagtaaaatctgcatacaaaacaacattgtcaccaaattgagaacatagagccaactactaaagaagctagtataatgcagatgaagtataataaaagaagaagaaaaacctgagccaacaaaactccaaccaaaaagagatgcaccaaggagaggataaatgcaattagccccagtaccaatgtcaaagccctttactttacttccatcaccacccaaactttgaatgatcccagaggacaaaagatcattgatccaatgaatgtaattcgatctattaggaacagttgggcaaagctgtccatcaggaatccacctatatatataagactttggtaaataactaactgttcttgagagcaaaaaagctagttcctttgtacaattgaaatcataccagttgacgccatggtcatgtagaaggaggacacgagtgagctctcgggttgcgttgtaatcggtccagtcgatgcgagctcgactaccggagaagaaaacaaagggcttgaaagatgggtaaagagacgctaacgaggcaaaatccggtgggttgtcggagtatttgcttcggggttgctttgtggatccaggttctgagcgagctctcttcttcccactccgcattgaaactactccgacagataaaacttaagccgtcggtgagagagaagacaacggcggtgaactggagtgaaggcatgttaaagcctctgcctgagttagcggctttgatcagaagccggagattatttgcgctcccagcaaagcgacgtcgttcgagcaacaaaattattatttttaattacttttggctcaaatatgataatcttcttttcatattaaagtttccttttatcttcactatattaactaattaaccaataaaaaaataatataaatattttcgtgagaagtgaaaataaaaattaatattttataagatatgtggaaaaatcttaaacggggtttaatccgaaactgataaatcttctatcatgtgcatgctccaaaataaataattaaaaagactaaaataattctactcatcaatagttttattaaatttttcgtcccaactcgcctaaaagaatcgcaagattggttataatagcatcaaaaagttgaagtgttgaatcactaactgaaactctaaaggatttagttaggttttttcgttagattcatcctattttaagtagcaccttattttaaaagccaattacatttgtatattcagttagttttttcatttatcattttatttgtatgctaaaacattttaaaacctttttctattagtctacaaattattgacttgttgactcaagatcattgtctcatgtaatcaccatcatatatattactacgaattatgatccaaaaaaaaaaatattactaggaataagtttattcatttttgataagtaagcgaaaatgtatttgtttttaacaagagcttataaaaaatgtattactaaaaaagtaaaaaagttgtgtctccaaacccgatgatcgattgaacaaagtagtctatttatcaaaaataaaaattaattaaatcaaagagaattggcattatgatcatgtagttgtggagaattttcaaagtcctaattattcggacatgtattcgaatttacatagtagaacagagaggatgcttagtcgaaattatataatcctacgtctgccattctgtttttttttattaagatggagccaataagtatcaagaaaaaaaaaatcatccagagcttaagtatactttagcatgaatgtcattcttactcgatgaaacatactttcaagttaataaagtcacacttcaactacaatatcaaatgtattttaatagtatacgtgtttacgaattattgattattttctaaaactaatcaatattcgaagagaactctcatgacaaaaaaaaaggttctaattattgaagttatatagctaatttaccaacataaaagatttagcaacgactgtaaaagtgtaaagtatatgtgtagagataccatctttttcttcgacaatgactgtaaaatctgttaatttttttgttttagtttgtccatatttcttagttggaaattagaaaaatgggaaaaacccacgcttgcagtctatatatttcaatggttgtttttcaaaataaaaattagtagccgagttagctagtatcattagtgtgaaagcaaatgttaaaaattagatatttttctactatattttcttttttagtttttggtttgcgatctactattattccgagatgataattaaggtattaaaccatctccatcaatgattttttattgaaaaactgtttaatataaaaataaaatataatcaaaaagtaagagagagagtaaaattagtctctcaagtgaaaaactctgaaaaacccataagaacacttgtatatcatctattggtcaaatattattttattattaaaatttaattatagaactaatatttattaaaatactaatatatttttttttaaaaaccaataaggtatctcactgatggagatgcctttagaacctaccaattaaatttttacatgtgagtcatttagatgattctaaaagagttagacatctttaatatacaatgtcataatatcaatatggttttccattcgcaagtaaaaagttaaacattatcacacacttacatgaaacaaacgttgattccatgaccttcatgttagataaaaactcgaagatcccataactaaaactccgaataaaaatgtgttgttcgataagttgcgttgaggttcaaataataataaattaaataaatatatacaaaattttcgttactatcgaaactgtatcacactttgcggttttgtcattattcagagtcaaaacatctttacaaactcttgggattcaaatcattcataccttcataaatttaaaagaggcacatttaaagctcaatcacttctttaaatataggtagatagaatcataattgatacagataaacttagtggccaaactactattagtaaccaaactcatcttttcattgaattattttgggtaaaactaaagatttcaaaattggatacatgtagtattttttttgtttggaaagtgtaaatgtgcattgacaggtcccatcgtcatgtcatttggactatggacgttacgcttttgaccactcttttgagattttgaccaaaataaatacatacaaaaaaactttggggctactctgtgaaaatccactatttatttgtacgagagcgtaataaaataaaaataaaaaaagaaacggcacgcagtttgcgttcccaaaaatatgggacgactagtcaaaatatctgcttacgtccgtcaactttaatgttgactgaaccagaataatattaaattattaaatatataaacttgtctttttcccattgtacccttcactctgttagatcttttcgggagaagaagaagataagctttgaataactttcaactcttagatttgaatctaacggctgagaagcctcctgcaaagcatccccaaccgtccagatcaaagcgggcccatcgctccctttagtttcccgaaaaggaaaaaataatacaatctcgaacattagcctggcccatttttgtaattatattatttcctttttagttttactattcaaacaaattcgtatttcattaagtaaaatttctaattgtactggaaaaagtcaaggaattatgcagaaaaatagaaatagccaatttataagatggaaaatacgtattaaaaatgggaatatgaaagaaaaaagagtagagaatattggaataaaaagtaaatagtgacgtggcgggataccctatgcctttacacacatatctcgcagatatataaacagcgtctgcttcacgccaaaggagagagagagagatctgatcggtgatttacttttagttcgtcggagagattttgatcagaatgagcggaggaggagacgtgaacatgagtggtggagacagacgcaagggaacggtgaagtggtttgatacacagaaggggtttggtttcatcacacctagcgacggtggtgacgatctcttcgttcaccagtcttccatcagatctgaaggatttcgtagcctcgcagctgaggaatctgttgagttcgacgttgaggttgacaactccggccgtcccaaggctattgaagtgtctggacccgacggtgctcccgttcagggtaacagcggtggtggtggttcatctggtggacgcggtggttttggcggcggtggtggaagaggagggggacgtggtggaggaagctacggaggaggttatggtggaagaggaagcggtggccgtggaggaggtggtggtgataattcttgctttaagtgcggtgaaccaggtcacatggcgagagaatgctctcaaggtggtggaggatacagcggaggcgggggtggtggaaggtacgggtctggcggcggcggaggaggaggtggtggtggcttaagctgctacagctgtggagagtctgggcactttgcaagggattgcactagcggtggtgctcgttgaagcaaaccagactgtgaagaaggggtaaatcagtcatcgatccctcttctccgtgacttctatcaaattattatctatcttttgttattcgactctcttcaatgttgttttcggaatttattaattaggacttgtggttgttatggttatggttccttgtgatttgagaaagaaactggattggttttaattgcatgtttatcataacttttgctcatcttcttcctctacttcaagccttcatacaatcttttaaccataacttccgaactaatccttgaaatttggaaatgattgttcttgatgaaagatatggcattaactcctaaagttttttttttttttctttaattcccaaacatgaaatacaataaaaacagaccaaccaactttagatgctaaacaaacacccaaacacactacgggcttggtagatctaagaaaaacccaaatctcgtctttttctgatccgtggaaaaacgccaactttcgtggcagctagggacacttttgggccggtactaaagatttgatgcttaaaattcaaaggccgtgagtgtgattgaagtgaggatggctgattggaggaggtgagaccataaccggtggtgggcattggtagcatttggtgaagaggccaaaggtgtcaatctggtgtacaaaattgatcatactagcccaaccaccgaacccgaatccaacaatgaacacccacacaactatgaaggcattgatcgtgaatgccccagtccatcgtcctagaaaccttggtggctgctccacagcgttttcacgtgcggcggatgagcggaaggtgaagatgtgagctagtgctgggatgatgtagacagtgaagctgacgagaagagatcctacggttgagttaatgggaccaaagaacgggaatatgatagcaagaaaccaaatgggtataacgacagggagcctcgcagcggctcgtttacacatgcttctgcactcatgcatccctattagcttctcccacacaaagtagagtggcgtgcaagcaaaaccaaaggtgatgaactgatggatgagcataagcacaactgcaaagtcacggtaaagattctttgggagaagagcaaatgcgtttgaatggtttagaagcaaatcaccaaacgcccaataaaccgcagacgcagaaggcagcgttagcgtcagcacgtagagtgttgcaaacaggtatatggacttgaacttctgaggtttccacatagcatgcattatctctctgccaacaaacaacacacaaacaatgaaagtgagtggtcattttcattactctgtaattccagttatacccttaggatatgtgaatggtgatggggttaaaagggtaaaaaaaagagaacatacacagtaacagcatgtccaccgaatgtgtaaagaatgtttgtggcccctgtgaagtataaaaccagcttgcttggtcctgaatgcttcactccttctacctatttttattattccaacattggtacattacattattctccttctataagaaaattcaattatctacaactctacaagtatataacatttatgcattaaactaagtctgacacaccaatgttatgggtttgggtaaagtggtcccaaaccacatgttgcttgaaacacaagtgccaaaagacataagcaaaaagacaactttgttgatgtttttgagtccccttaagccacaacatcaccagctattctaatctttaactcgttgaaactaattagattaaagaaagaactagttacctgtccatggaggatagaggcaatggtgaggtaccaagcagtgtaagtggtcatcaagagtccaagaaaagaccagatcctgtagttgtggaaggaaggaataaagactgtggttgcacaacatgctccaaatatgtatgtccatgtcctcttgtccagattatcatttatgtaatatatgttgctgcaacaacacattcacttaccattaaaccactacatcattagtctcattttcctgaagaaagaattggtatataaagtacctggcacaagctatgagttgaatgacagatccaaagagaaggaaggtgcagttaaaggctaaaccaacattcctccaatgcttcccaagcaatccatcaagaacctcaaaccacttcacattaaccaacaacatgtcaaatgtttttgtacaaaaaacatgtcagatatatactttgaataatagaaaagatcagtaaagaaacctgaatgacatggtttctgaagttaactttctctctttcctttctggttctgtattcaacatagagaatactgatgaggtaagcagtccaactacctaagatgccataaaagagctgaaacagaatccctgagagcatccccagctgtgagaacgagtatggcagtgtcaacagcacttgtgccacctatataatagcacattcatgaatcagaatcataagcagagagactaaatatatatttaaaccaaaacttgttcatcattttcatctgagagaaagctattacctgattggaagcacagctgaaccaagcatcataagcagagccaccatgccaaaacatgtcagatagcttagatttgatgtctaaagctttaccatccttctccatctcaacatagttcccaacaacgacagtctcagctgctttctcaccgttctccatctctcttatctctctttgtgatgaattttgaagtaagagagaatggagaagagatatgaatatatatagagagaaagaaagaaaatagagaagagtgttgtgtagacagagagggagacacggaagtagtttttcaaggcaagatgatgagagaagcttaactctctttgctttgtttttgatagctacttgtgagagtttatgtttcgggagtgacaacaacaactacatcgaaccaattcatacatactactattgctgtttccattaaagtattttcccccacagtaaatatctgtttatttattaccaaacctaacaaaacaagttttactgttaccatctatatttttctcttttatagtattaacaaatggacattttgaaagggtaattagtaaaattaaagatgtaatgtttgttggatttttattatagaaagaaaatgaagccgcaactatactgagtttttcgccggctaatatttgtacttaatagtctttatttaagtactgatttgttgttttttatccaatgtctaagtactgtttttgttgtttttatcagcaaattaattaaattaagcgtaagcacatggtttagcggcgagtcacgttttgctcgcacgagtgggctttcgtttctcgagcaaattattcctttactattctaattccaatgctattcgttaaaaacaaaacattttcattaatttggctataagttgagttatacgaatacgatatatttacatgtaatctctagatgtgtctgtaaaggctctccaacctctgatcataataactcttgtggtatcaattatacgaaagaaaattctatgtcaaaaaacaaaaacaaaaagtatttgaaaagaagacaaaagtttgaatgaaaaatctgctatatagtacattaatattctcccatgattcgaacaaacatttgtaaatctcgatgttgcttatacaagtacctcttgtatttattcatctagattttgctttttctacgagtttgatgatttttatagagatactgcctttgcactatatagacttacagctgtaaattaatgggctgtcatattcaatgcaaaaccatttttgtttttactttttctatgtgtatatatcatgaaactttacattacatttagttccataattatgtatcgttaagtagtgaccaacatagatgaagggagaatgaaggacacctaaaattaaggttcaattatctcaaatgttatgtacccactggttaccattcggcgtttaaaaaatgatcaaagaatcgtagtatagatgacaatggttgtgttggtattagaaaaaaaaaacagaatgatacaagtgtgtttttccaaactaagcgaaatgaactgaaaacacgtttagtatagacatttgaaatttttttttttttgtcaaacgaaataatatttttttaaatgctatagaatatgtaatacaaagctctcatgcaaacacccaatttatctaatgtatataaaaatttaataaaactttttcagcaaaacaatgtataaatatttaaaacaacggtaaaattgtgcctttaatctcatacgtcaaatatttttgatttatttacttcaataataacttagtattttattatttgcctatataaaatctcgactcttgatatttcacaattttcactaatgattaatatcatggaaaatagatacgtaattaatatactttcatgatatgttatgtacgaggagtaaaacatagaaaaatgaaatcttatgaccaaaagaaaaaagaaaaataactgaaatctgtttttataagatatgaatttattttttactgtgtattttttaaagagagcatgataaattaacaagaaagtagacggaatcattgcaagaaaacaagcgtggtcgcttttataataagaagaggtaagctcgcttttatcacatgccccattcatctctctgaaatttgtgctctttcttagtattctcaatttatacactaaaacctagtatatcacattgatctcatcaattttctttcttttgaatctatctatggtgcaaaataagtttatttactaactttggggatatggtgaagtacactgataaagtgataatagatacttaaattttgttatatggtaattaactactaactagagcatatagtgaaggaattatatggtttttttttttttttttgtcaaacatgtggttttagtttttttttttttttttagcattcatacaatttttagtttaatcttaatttatgctagaccattatattatattattttgttattttttaaaattagttgtggatggaagttacagaaatttagtagcgtcaaactaattttgttgatctctcaaattgagtttccatcttcgtttaatatttatattattttgtaatttctatgatttttcaaatttcatcgttctacaattctgtattatttaccaatcaaaataaataaatctcatataaaatattaaaaagtttaagtgaaaactcaagctattcatctttggagtcatatttaactcaatgcactaccgattatattttgaattccattaatttcctaaaagatgcatgttgtgaatatgtgaaggtacgtaattaaccaatatctattctatgagagataatattttttgtcatttcattgacgaaagcatataagtaactgcttaaggcaaaccaatacaaacaagtagacaaccacaaaataaaaacaaatattcttctatattagatcatgtggtctcaaaaacagacatcttttgtttgttaatgcctatattaatattcatgttctcattcaaatgcattgactcaaaacaaagatatttatccaagaacaatttttttctttttttttaacaacatacaagaacaatttaatttcaagtctactgtctttttccaagtgaacgttgtttctttctttagatttttcaagaataatttaagaataataatattttttttctgtgctgcttattttgtttattatttaaaaggtgataacctcttcatgacctcattgaggtgcttttgtgatgctaatattatgtgagaaactaagaatctcaaaatttatcatttatacatatctaataaataatcatgatggtgattcatgatatgctccacaatcattataacaaaatagttgaatttagaagtcacttgttgcatcttttcatatacatatagacatatttattatttatgaccctatcatcatatctcataatgggtttgtcttttcaataatcataattctatgaaacaaaaatagcattgttagaaataatgacaaatgagcatgcatgagtctttgtagctttttttatttatttatcaaattctttgcaaatatttgctgggcaacaatattaaagaaaaaagaattacttaatgaaacacacatatttctgattaaattcttgtatttagttaagaacccacgttgaaataaacaatttacaaaatcaactaatctcgaatggatttactaattggtatttttttttttccaagagtaactgatctcaaattactgatctcaaattactttaataactagattttaacccgcggtacaccgcggagacagttcatttttaaaaattaatatatataaaaatttgtaaataattttatagtttaccattgttactaagtaacgtcctgccaaacccgtcctgccaaacccgtccacaaacaaaaactatttattttattaatgttgatcttatttataatatgtttatgaatcattgtcaaaatattttagtcgttgcgggacgttgaacccacacatttttcgccaattggttaatatatgttcattcttaaaatttcgaatcacaaaatatgacgaaattttttttgagatttttttaaactttatatattatataatgatgttaattatttttgatagattaaactttttataaattcaaatattaataatgttttatgaagtttaaatatacaaataataatatttaaaaaattaatattttttgccttttaggtaaatgatataataactctaaaagcaaaaatttagaagatttaaatctttaaataaatattttcatgcctaaataattaatgtcagtagcatgacattgtaaataagttcaaatacatgatttgtttatttaaacaaaaaacatttagtaagaacaatatttatttaaacaaaaaattttgttttaaaattttgttaataaaatacgtttatgctaattttaagggattgatgtgaagtttgtttggattaaatttgattgataatgtgattgacaatttaaattaaaaatttaaagtaaaattaattattttggaaaaaagatttaatgctaatggcattaggttgtaaataagtccaactttaagatttatttgctaaaatggctgcaaaaatgtatatatagattgattctataatatatacctaaatattttagagcattagtaagcaagtgtttcttcataataaaatactataaaaaacatggctataatttcacaagtaataataatgggaattgtaattaagtaaaacgaggctaagcattcagtattagagaacagtattagagaaaatgcctaaggcacgctttcttctctgtgtttctactcaaagttattaatggctaagagattgtgagacaatttcaaattaactctcttattttttctgctctctttgtctccttcatcataactacatttaatattcttacccatatttatttactgcaaaatttattcacaaagttgagtagtaattatttatagctgaaaagaagaaaaaagctgagtattaattttggttagaatttttttttgtgtgtagacaaaggaaaagactgtcttaagcagtagatacgaaaatactttattagttatgttggtctgaaactgattagacctggtcaaaccaaaagctcctttttaatcaatcttttgaaaaatattgcctcctgagccacgccttttaccactacttaccataataaagacagagaacaacatatgtgtatgttccatcataatttagattcccatttgtttgtttgtcatcaaccacaatcattttcagtttcccctgtgtcctcttttttaccagacaaatctcagagaagattaatctacaagcatttgtctctatatgcccctattttatgtgtatatatattgttatttttcatagttatttgaataataccttgtgaaattaaatggccgaagtccatacataaacgcatatgatataatgtttaggccgaagaaagcccaaaagtataaataattaacagcccatatagttaagacactcgtcgagctcgtgtccttattattagaaaggaaacctctcacaacatcaatttcattgcaacgtcacaacatcactttcaagtttcaagtgccgatttagttttcctttggcctgaacttgcaagcaatcttgaggtcttccgggggtttgtccccggcgaatccagcgtcaacccaagccgagtagcctccccccatgttagccacatggtcgtacccctacgacatgacatgtatttttgaataggtatacttattaattgtgtgtatgtgtgtgtatatatagacgcacctcgttaagaagatcaacgcaagcacgacttcctcttcctccagcgttacaagccttcacggtaacatagttagactatttagtataaaggaaatggtctaactaaaatctaaatctaatgtatgaaaatacatgtcatcactaattaaatattagagtctaaccacgatcaaatgttcatctttcttgcaaaccgatgccacttgagaaaggaaatcaggatttataaccctacctacaaaaccattcacaatacataattctaagtgttatttgtgatcaaaatatttaaaatgaaactcttgcttaaaattttaaaccaccttcatctgttttgaacatataaggaatgttcaaagcctcctcaacatgactcttggcaaattcttcatttgtccttcaattaccgacaaaaataataagatttcttacaaaaaagaagaagaacttaaatgatatatttttctttatacttaccttacgtcgagatatcggtgaccagtactaagaaagcctttagctgtataaacatcaacggtctcaacatcttcaacgctgtagaaacaaatcgacaatagaaccttcatatatacggaattgttaataaaaatcaataaaaataaaagttttttcttgactcacgtctttggttttgtttcctccatgagaaagccttcggtgtgatctgtttttcttttctttctggtttgtcttctgcaatgagaaaggttgaggagagaatatgtatacatacaacttacaattattcaacttgatcatgtgtatttattattaacttaatcgaggtgaaatattatagaaattaatatagaagttgaccaactattattttattattttgtaatgatcgtgaaagttgaagctagagaaagatgatttaagaacaaatctcaaatcagtttattagttttaaacaaattggtaaccataagaaagtactagaccacaactataaaattattaatgtcaagaagaaagcgggtctcacgatttatatatgcatttcaaaagtcgcaatatttcaggataagaatccaagaacaagttttccaaggaatagtggcttttgcaaggagaaacaactagcccaacacatgaatactaatgtagttgagttgataacacatgaatacacatgaatatgcgttgatctcgatcatatattatcaatagcaagtaatcaacttacaacttacaattatacaacttgatcatgtgtatttattaacttaatcgagttgagatattatataaattaatatagaagttgaccaactattattttattattttgtaatgatcgtgaaacttgaagctagagaaagttgatttaagaaaaaatctcaaatcagagggtcgaccctgagattttagaggccacacaccgactcctgacgaaccggctccttgacgaaccggctccttgacgaaccggctccctgacaaaccagctccctgacgaaccgcctcctgacgaaccagctccctgacgaaccgcctcctgacgaaccagctccctgacgaaccagctccctgacgaaccagcttcctaacgaaccgactccttgacgaaccgcctcctgacaaaccaagcttgtgacaatctacaccgaataaatggtctagccgaaccaagctctccatgccatgttaatctcttcgaaagactccctcaccattacgtgacaagtcaagactccctcgtcgtgatgagccaacattctcaccattactagccaacgtcttttcctctagctaaaccatcccgcacaacaaagtcgtctcgcaaagtataatcatcaagtaaaacatagccatcccgccaagtagagccatatctccaaacgaagtcgtatcgccaaaccctttactgcaagcggatccatcgctaaacaacttagctcctcgtctaactgtcgacgtcatcacttaactgcttggctccaaagcgcatagttccaaactacaagctttcacctatgtaacatgaactacgaacggcttgatcccttcaaagggtacgtaggcagcctctaccgaggcgcatctataaaataaataaacttttgtctgtcaaaagcacgaccgagttctcgagtattcaaaggaagaaattgtttaccctaaaaccctttaattacttattgttacaacctcagtacaaacactatcctggaagaggtgctaaacactttcacgtgcattttctcatggattggaggctcctccagcataaaggagaactcctcattccactttgggtctttgttcttctttacatgctttgtttttctctcctcccctttgaagtagatgtgcacgtaaggattggtatggtgctttccttcaacatcctcagccgaatgcactattaccacaaacattcctccagcagccggtgtgccttctggagctttctgaaccgcttgcatttcttccttcgtgaatgacttatacaagagttcaacttccagcttccccctacaagctgccgttcttgaccaccgtccaaagtcttacgtagttccaaagtgaatgctttatgttcgtcaagcaccatttctttcagatagagtttcgtatgtccgagaattttgaagtaaacaaacctaaccatgttatcacctagattgagatctataccttatttattgaatcatgacatcaggagaaacccccgatgacctaacgcttctcttatagtttatttaaaacttaaatcaataactcaattaaattatatgcaataaaataatatattcgatagacttataaaatctctaaatgagttaccgactgtcacgtcatcgatacacggaagagttatgttgtaggagatttttcagattgtggtttgacctatgctatatttatttgacatggaggtttatcttgcaaaaacaaaattacattgaaggtttttttgcacaaattcttatgttttctaatagagttatcgagtgccacgtcatcgatacacgtaaggattgtattgcaggtgattttagagatggtgaagttgacttgcataattctggaaaatagtcatatcacattcgcttctcttcccactggaggaaatgatctcaaacgcatccgcttcaggtattttaactactcaaaacaatctctatatcttcatgacattcaaagctggaacatgagataaaaactaaccattacttgtgtcttgttttgaaagccgagagatgtacaataagtggcaagctcaacggcggtggggtgagaactatgacaagatcgttgagctttacaatgtacagagatttaaccgccaagctctccaaacgcctgcaagatccgacgatcaggtaaaagacatatatcctagatcctttggtctttcttcagacaagaaccttgtgaatcttgtcctttgatccaaagaaggtaacacaagtttatttttcagtcacagagagattcaacatactcaaagatggattcagcaagagaaagcaaagactggactccaagacacaacttcagacctccaggatctgtcccgcatcacttttatggcggctctagcaactatggaccaggaagttatcatggaggaccaccgatggatgcagcaagaaccacaacttcttccagagatgatccaccttccatgagcaatgctagtgaaatgcaagctgagtggattgaagaggactagcccggtgtttacattactatcagacaattatcagatgtacgtcgagtcagattcaggtataacaaaacatcttaaactaagcattggctaatcatatacattttgaaagttgataatcataccgtgactaacaggaatctatgattttgtggtttaatcaacagccgggaacagtttggggaagtgcatgttaagacatggtgggagcagaacagagagagaatacaaacacagtacctctaaaaagaaacattatgagcttctctaccacaatctttaattaattaattaatctcattcacataacaacacaactatatacattttgcttatcttttgttcatcttaattagcttaacatcttatacataaatcaagtgttctgaagtatcatctctaatcaaagctgattacatataagtataattatcgttaaatgctctacacgttttcaagtaatgtaaaccatgtcttgtttttgtgacacaaagataaagaagtcaactatgaacctaactattctttaattctagctagatctttctcctctttgggggtttaaaaatatcaaatgttagttcttttatgatcaacatgtggtatagaatataaaaagtcaactttattatttgcttataaggaatacaaagtagagttgaccatttgaggttttagatgagcaaaccataaacatgtttggagaaagagtcatcatagttccatcaatggctgagatctctgatattactactcagactcaaaccgttgtctcggacatcgaaaacgatcgatcaattgatgattcccagtcgtcggttttatctggtcctcttgtgtccgtatcattcgttcaaaaggtgagacacatcttttatgttgccacatggtttcttaattttttcttgaaatatttgtttgtcgaatcaagattttatattccgtgtgatgttgctatatgcgatctcaatcttgactttggctctaattattggtgattgattttccagtttatgaagtatagtaatcaaaccgaacaaacatctatttcgaatccgtttggtacaagtttgtttctataacagtaaatttaaacacgtaatatttttactcgttgacgtttgcaaaaattaaatcctttatttttaccattcataaaaattattaaagtttatgttttcatgttttccctatagaagttgacttttttttttttgtctaaactctatagttgattggcgagttcgtggggacattctctatgatatttgccggctgctcagccatcgtggtaaatgagacgtacggtaaaccggtgacacttcccggtatagctttggtatggggactagtcgtaacggttatgatctactcaattggtcatgtctccggtgcacatttcaaccctgctgtttctattgcctttgcctcttctaagaagttcccttttaatcaggtgaaccaaagatatctacaattgtaaaaaaatacctcatactatctttataaggttatttcatgatttcgaccatattcataactataagcagacaaaatatgtttttccactagttatttgttaaatcaagtttttctcgaccactttggttaaaacataagctaacaatgttttattttcaaggccaatttcgggagcatctatgaatccagcaagaagcttagggcctgcacttatatggggatgttataaggatttatggttatacatagtttcacccggagcattatcaggtgcatggacttatggtttgttacgatcgacaacgaaatcatatagtgagattatacgtccaatttgcaataaagtatcttcgagagatcgccaagaagcttcccaagatgagatttgtgttttacgagtggttgatccggctaatcaaaactattttatatgttcatcacctaccgatatcaatggcaaatgtaatgttacatgtaagttggcgtgaattatatcgatgtactactcaccacactagttcaatatccatgtattttgttttctcgtttcatattactgtgtatatttttattttatatgcgataagtgataaaaagcttatatacagtattaacacgaaatgttttctcatgctcaactttatatagtaatacaataataaaaaaagaaatctatttttgaatgccagccaccacacgatgttaatcgaggaaaagagtaatactaactaccaatgtgcttaagtacatgccagttttaagtgtcgtgggcttatgaacctcaccaacaaagtggaacccttgtacggtagacaggtttgcgacatcgtctacaaactttgtcagtttcgccactttgaatatagtttcttttgttccaaatgttccgatgcacaagaaacattttaataacgaaaagaagagaaaaataataatcatttcttagaatatttgtgagagttaatgtttgtgagtgtgtgagtgaatgtgaatccacatttatacgtatatccgattactgaaaacgcaacacaacctttctatcttttcatggttattttgttaaaacgtatgataagaatgtaacgttgttacatgtaagttggcatgaaagatagatgtaccattggcaatacactagttcaatactaaagtatttgttttccggtttttatttcagtaaaacctctataaattaataaagttggaactaagaaattttattaatttatagagatattattaactatagacagattgtattaatattataatttcttaagaaaatatttatgaaaacagttttttaataatcaatatctttctaaattcaattaaaataaaaagcaattatttagtttaaaaaagggaattttgcaaaataaccctctaagtcaattttatttgcaattttaccctctaaatccgaattatgcaaagtgcaaactcaacctcaccataggaaagaaaagtcaaagagacacaacacaatacaaagtttataaatacatgaaaccaaatatctctttgtttgttctcgaatcgaatcagaaatcaaaaggcagtttgccagtcaagctcgatttggatctttccattcttagaatcaataaggtgaaacttctgattcatccttttgttgttcaccacgtccaccaccggaatatccacgtaccctagtgtttcctgtccatcaacaaccacttttagattagacaactacaaaacacttattagtgttactgtgagtgaaacaagtgtgttaccttgggatgcaatagacctatcctagaagaggtgctaaacacttccacgtgcaatttctcatggactggaggctcctcgagcataaaggagaactcctcattccactttgggtctttgttcttcttcacattctttgtttttctctcctcccctttgaagtagatgtgcacataaggattggtatgatgctttccttcaacatcctcagccgaatgcactattaccacaagcattcctccagcaaccggtgtgccttctggagctttctgaaccgcttgcatttcttcctccgtgaatggcttatacaagagttcaacctccagcttccccctatacttgccaggctgcccttcttcaccaccgtccagagtcttacgcagttccaaggtgaatgctttacgttcatcaggcgccaattctttcaaagctaatacattcatacccatcttatcgtgcttcccaatctgcgttgcaaaaaaaaaaaaaatacatatatatcctactccatgtcacttgtcacccctttggatagctttttaccttttcccagccatacacattgaattctagaacctgagtcttgggatctctgaccgagaatttgaattcctcattccattcagggttcaaattcttgtgtttaacagttgtcttcttagatgaaattttatcttcagagagctcgatttgcacgtatggatttatcatgcccatctgaacttttttcctttgaaccacagccttcacaactttcacatggaggattccaacatgccttcttaatgctctacagattaaaaattaagatttgctttatattattgaatttaagacatggattaactattcaaaagataaaggcatttacatgttcacaacttgatccttgatttgctcctgaaacaattaacgcaacaatgaaactacaaatgaatatttgatccagcagaaatgtaaaaacaaaaagacaaaacaactttcatatatattggtccaaatacatatatattggtcaaccaagaagtcagagtttcatttgccattcagccttaaaagattgaaaaaaatcctcttcatcaaactagactaagaacttttcgataacatcctacccattattagatctactaatcatctattttttgagaatatcgtaagtctgaatttttatctatctgatttacaacttgatattttcttctttcttgtcttttaattgataatctattggtttagtttaattcgaaaacttagtttattgtgtgatctgagagctttgtggaattcgaccctaaagtaatacaatcgatctcttatttgagagagtggtcttaggattaatttgatcatacatcaaatcagcgcacctatcacccctcgaaacacatacacatccccacactcttcacctgcaccaatcatcatcttcatagcacagcgttcacaacaaaccctacagcctcatgcgttacttctttgtttcctctcatcgtttgtcgccactattcccaaactattctatgataaccttgtgacaacttaggaagaggctctatgcttgtgatcgtacaacataccataccaaatcgggatgcatccaagccatttaggaacgtgtttgtgcgttcttgttgcgatcttcttccaattgtgaagccaactctccgcagctacatgttcgtatcattttataaatcgccaattcatcccacatcttctttagcctaccatagtatgtcatcaccgtgtctccattctgtctacaatttgcgatatcagctcgaagctcactgattcacggttcattcccaggcgagaacgtcagctttaagtcatcccacaacacttgggcttcctccacccttgatatcgaagtgcgtactgtgggctcgaatgtattcattatccatgcaactagcattgtattcacaacctcctactgttccatatcatcttccttggtaggtttctccaaggttccatcaatgaatcccaatttttgtttagttcgtgaggcgttccgcacatgctttgcccaatcttcatagttttcacccttcagttgaacattagttatcaaattctctggtccatcagaagaatggagataaagtggggaagccatggctttttctgccatcgtgaggccagtcccaccgtcgccttccacagctttattacccggttatcgtcaaatctttgttaccaccgtcgtcgtcgtccacatgatctcttatctctccctttattttgtttccgtttcttaaaaccctagctctgataccacgtcagagggtaaagagaatatgtctattgtcttattgagaaaccctaactaccctactttaaagatattaacatattagactagaaattattatttatttacttatagtccctaacatgacatacttatatttttgaataggtatacttattaattgtgtaagtgtgtgtgtatatatagactcacctcattgagaagttcaacgcaagcacgacttcctccagcgttacaagccttcacggtaacatatttagtataaggaaacggtctgtgtaaaatcttaatctaatgtgatttaatatatgtcatcactaattaaatattagagtctaaccacgatcaaatgtttatctttcttgcaaaccgatgccacttgagaaaggaaatcaggatttataaccctacctacaaaaccattcacaattgtttgttagttttatttgtgatcgaatgttgaaatgaaactcttgctaaatttaaaattaccctcatctgttttgaacgtaccaggaatgttcaaagcctcctcaacatgactcttggcaaattcttcatttgtcctacaattaacgacaaaaaaaaaagtaaggtaaatgataactctgtagaaacaaatcgacaataaaaccctaatatacatatacttgaacacatacatacggaattgttcataaagaagattagaaattgttttacttgactcacctctttggttttgtttcctccatgggaaagccttcggtttgatcttcttttttctggttcgtcgtcttctgctatgataaaggttgaacttgaagagaagatatatataaaacatacaacttataattgttcaacttgatcatgtatttgttttaatcaatttgaagttgtataaaaagattaacatataaggtgaccaactattattttattacttttaccaaaaaaaaaaaaaactattattttattattttgaattgatcgtgaaacttgaaccaagagaaaagtagatttaagaaaatatcaactcagtttattagttagttttatacaaattgttaaccataacaaagtactagctgaccacaaactataaaattgttatgtcaagaagcaggtctcgcgatttattagggcatatatgcattttaaaagtcgcaatatttcagcttcagaatgcaagaacaagttttccatttgttctcttcaaaaacagaacaatggaagcaagaaattcggtttcgaatatgcattgatcttcgatcatatatgatagatactgttagtttgccaaataaaaaatatgattatactgttcaatagtaatttgagaaaatcttctcactaaaaaaatgagatgtggaaactgagagtcactcacactaccgaatttcatagaaaagagaagtcgaagacacacaaatccaaataaaagaaggctctgcaaatctgaatgttggtttttaagagttaaagcccattttgtacaacaacacatagtttttaacaacatcaaaccaattatctctttgtttgttctcgaatcaactcagaaatcaagaggcagttcgccactcgagctcgatttggatctttccgttcttagaatcaataaggtgaaacttctgattcatccttttgttgttcaccacgtccaccactggaatatccacataccccagtgtttcctgtccatcaacaaccacttctagattagaccaacacaaaacacttgctagtgttagttactctgagcgaaacgagtgtgttaccttgggatgcaatagacctatcctggaagaggtgctcagcacttcaacgtgcagcttctcacggactggaggctcctcgagcataaaggtgaactcctcattccaccttgggtctctgttcttcttcacgtgctttgtttttctctcttctcctttgaaatagatgcgcacgtaaggattggtatggtgctttccttcaacatcctcagccgaatgcactattaccacaagcattcctccagcagccggtgtgccttctggagctttctgcacggcttgcgtttcttcaaagcctttgggcatttcttcctccgtgaatggcttatacaagagttcaacctccagcttccccctatacttgtcaggaggctgcccatcttcaccgccgtccagagtcttacgcagttccaaggtgaatgctttatgttcgtcaggcaccatttctttcagagctaatacattcatacccatcttctcgggattcccaacctgcgttataaaaacaaatattacatatatacccactccaaggcaccagtcacccttttgatagctttttacctgttcccagtcatacacactgaactctagaacctgagtctggggatctctgaccgagaatttgaactcctcattccattcaggattcaaattcttgtgtttaactgttgtcttcttagaaggaatcttatcttcagagagcttgattttcacgaatggatctgccccgcccatcagatcttttttcctcagccccacagccctcacaactttcacatggacaattccaacaggccttctgaacgccctgcagtttaaaaattaagatttgctcagcataattaaatttaagacatggattgactattcaaaagataaaggcagaatggcatactttgcagggtcaaggattggaactacaagggtcttaggccagagatacatgttcgcaacttgatccttgatttgctcctgaaacaattaacgcagcaatggaactacaaatgaatatttgatccagcagaaacgtaaaagcaaaaagaccaaacaactttcaccaaataagagatttaatgtccaaatacatatgtattggccaaacgaaatgtcacagtttcatctgcccttcagccttaacagattgaaacaaatactcttcataaaactagactaaatagaatgagtagcccatataatgatcaatcatacctctccctcataaaaaaattcttactcatacaagtcagggatttgaatgatgtatgtaagagaaagatatcaacctgaacaaatctgtagaggccagggattgacataagatctgctccaccaagcttcagtccaaaatcaacatgtggctgccatagtagcaaggatcagtcaaaaacacaaaatctctaccaaagatctgataatgaggctgactactacacaaattgaccttataatgaaaaaggttataccacataccttctccataagagacacatagatattggcaaaacaagggaaacttggaactaatggcttgagagtgatacgaggctgagcaaaaacttgcagatcgaccacctgacaaaaattccttggtaagtgagggacaatcatgactgataatattaagtaggtcgttccttctttaaggttgactaagcacttggcagcataattacctgaactgttgccttcaacccaaatgccttgatggcaaccaagatattgggatttgcggcccatttcaagcatggttccataatcaactctttctcatccgtgagataaactttcatccctgcaaagagaagaataatcgtcgtaagtcctggaatcaattcataatcatctttcgcatttcaccaccatccatcctccagttcttagttccattatgcaaacaggacattcaaggagatattaaagatgagaagaaaggattatccgaccttgaaatgtagggggtaaagagcctagagtaagtgtttcaaattcaacagagtcaatcttgtactttggtatctgctcctcaatgatcggttttgctatattctttgcagtcttacatatggcctacatggatagttggagagaccaaaattcaaaatttagcaaatgaaggtaagagaaagtgaagtatcacaagaacatcagtccaggtatgtaaccttgtcgagataaggccacatgtactcgagaaatctgtttatccagtcaacctaattcacaagaagatagaaagacaaagatcagagcctgagacaacaaaaaaaaaacttgtaatatcaagagtagggggaagaatcacatacacgatcgaaatccggatttttgacccatagaggtatctctggaagcatccgtagcatagctttgggatcttggtcagctattgaacgaatttcaggatcctataagagcgaaagggtcacaaacttgaactgtaaaatgactgtatcaccacataacactgtttgggaaattcctattctgggatgcataactaatttagacacatacaccaatacagccaagaagagttcaagtaaacatgtcaagcctagagaaatgttgttgcaagtgagcaataagtttaattccatttgctaatcctaatgtagtttatgaacgatcaagcgtggacataggattgaaccacaaatctcagtgaaaaaaacgaaccttgacgtcgttggggagcaagtagacgaagagaacgtaaccaataacaagtcccaatgaaatcccaactccaaatccacaaaatcctagtatcgtactgaaaaagcccattttgatttccgtttcagatccaacaaattctactcagcaaccaaaacaaaaaccctagaagctttctcctaaacacagatcaagacggacacagttcagcggcgtcggaagcgatctgaggtcagagattagtggagattggactaatcgaaaagagagattaaggaacattgactgagatccatggacgtggaaatcggagaagataaacagatgtcgtgagaatcgtgaagcccagaaggcaagcaaactttgtgtgcgcttcgctgctaaagacacggaccaatttattttattgttctttttttgtcttttacttttaaaaataaaaaatatcagcaatttaatttaatttttttaatttttattctctcttcgaataataacattgctttctgatgatactataataaattaattaatgaaaatcttattcctttttcataactttctacatacatcaatattgaaatttacgtatatgttttcaaagaaaattagtattttgtttacgaaaacatatataattgttcatttgttctaaaaactatatttgggcacatttggataattattgaaagagaagggtaagtatcttatattgggccatcgcatgttgataagaagcccatgattaagacaggtggcacactttaagtggatgttggtggcaattagggccctgtggttgttgatggaccacgtaagacatctgactattttatttactctctctcgttaagagacaaaaaaaaatgccatgccgacactatcgtcactcaaatttccggtttatttcaccatcctgatctttctcacgaaccggtaaaaccgggtggtatgaaacattatttattaacaacgaaacggcgtcgcttatgcgtttcggcgggcaacgaaattcagtctcccgcccacgagatgttgttttgtgttcttgtgcatcgctattggatcgtgaaattgaaaaatggaaaacgaccaagaggatcttgaattgcttctgtctcttgacgatagggttctcgaaactcctcctggttctccttctgctgcacccggtgagtttctctctcacttttgtagggttttgttttttgctttcttaaatccagtgtgcgattccgatttgcatctctgattcgatcaatcacttgcgtaatagatcttatgattcgaatattgatctgggggcgtcttgtttccatctaattcgctcaagaatctgtaaagtttgatgcttttctctcagttggattgttcttgtccttaatgcgaggtaacgtttgtgcaggatatctcacggatgatgaatcccccaagcgtaggggtcactctgacttgtctgacttcagaagtgttgttcaagattgcattgactataatcctaaaccaatcgccaaaaacactaaacccaaaggctccaacaactccaataccaatgacattgagaagttttctggcttgcgcattaggtaaagctaaacccttttcactctagcaatgtgagtcacagctactatagtcgtagattgttttttcagttccaatctatagctgaaatagccaatcttttgatgtatttgtaggaatcaattacttagccctgcagagataagtgatctgttttcagatatccgtttcgttcgattgccaacaataaagtaagttgttcacttcttagatagataaacattacttactactcttgggaagcagaagagatttaaaacaagtttctgtgtaggaacttgctaatgggtgacaaactctctggctgctgggcgacaatgggagtgataacagagaaaggacaacccaaaacaagctccattgggcaggcttatggtatatggaagatcggtagcttaaatgaaaacaatgtctccttgttcttgtttggtgatgcttacaaaaagaatgagacagaaaaggcaggaacggttttcggtctgtttaattgctcacttcgcaaggacaatggggtaagtatatagcatcagcttttccagtagccggatggcttaactaaatcttctttttaaaaaatttatgtttgtggcagggacgtgagttctcattgagtgtcaactctgctaaacaaatggttaaactgggggtttcagctgattatggagtctgcacagcaaagcggaaagatggaacaacttgtacatctgttgtaaacaagtaagtttaccttagcgatgcatctctctttgtattgtttcctgaatgttgagttacaactttgaatttggtttcaggcgccaaggagcattctgcaagattcataaactggtacattttggtaatactttggtcttgttttctggcgtcaatgcaatgaaccatgtttttcactaactatgaatttttcacagaatgcatcagacaaatttgctacaatgagaactgaactcaaaggagggtatgctaatcctacctagtcgtgttcataggttggtcataccacgagttggaaattttcatgattcttgggatgtttttctatttcaggaacttgagaacagcgttcagagatctaaaatcgcaagggatttacacagttgagccaccagcagatagaagcggaaacaaaaagaccactcagcctgttcgagtgctatcagtggaaggtctccgaaaggctctaaggttggaaactctcaacaagttttttacttttaacataacgaacagaacccgcttctcagattctaaagccaattgtgattatgcagtggcgcggataaagtgacccctaatgtacactcacaaggaatacgtttcttgaacgagatggccagtatgcttcttctttctcatttgacacaatacaaataaagcttataaggtgaaatgtgtgactgatcttgaaattacaggacaaaaggcatcaaagaacgtaaacaagaaatctgaagctgtgaataagtcgacagagaagaggtaccatcttcctgagttgttactttttttagttgtactgatgtataaaagttatctcaaaggagatgttctggaatctcctcttcaggaaagcatcaacgaaagaaacacaagtaaatggtgagccaaagagaaagaaaacagagcacaggaaggaaactcccgagatttccaccggaaaaatgatgctcctagatttctgcagctctgacgaagaatgactcctcaatagacagacattgtcaaacaggtactcaggccttaagatttgggccaaatgtgatgttatatgaaaccatagaaaccggtttttttgtggcttttgccggtttattcaatattgagatagattttgtggttctcaagattagtcttgaaaccggcaaaacaaatatccgtcatgcaaaaaaccttccatttcaaccaaaatatatagatggacacatttatttaatgcatcaagcagtaccatatatatatttcctcacagttgagaacctataactcaatagtagcattgttaactgcaacatgtttattctctaatcatctgaacagtagtgttgttggaactgcattccttgcaggcataaccaaattgcaccataccaaaaaactctcccattcctatatcaaataacacatggttataggtaagttaacttaattggagacgagataaacaatgatcaaaacaaaaacaagcaacaattaacaaaaccagggttatccaaggagaatatagttttcaaatcaacaaaataaaaactgcaagaaaggtagacacaatagagtctaataaataaactagatatgatcgagatacatgtgacggagggtagtaatatagtcgaagttgtcctcctcccattgctcgatccctgcctccaccaactccaccgtcgcacttgagagctcctctgcggtaatctccgcctcaaacgccagttgttgcacttgctccctcagctcggtaaatccctcaacgtcctcgcctcttatcacccgtctattgttttggttgataaggtaggtttcgtgggtcttggcttctttgatggtttcttggacggcaaggtaggtctcgcggagttgatcggccacagatttaacatctttgtttagatcttgtctcgaagctttgatatcctcgtcgactttagatctcaactcatctcggagctcttgccatatctcgtcaacattgtggcgcatgttgtccctcagagttccaagttgtgagcagatcataccatctaattccgtcattgtcttcttcccatctttgctcaactcatcaagaaattctccccactcttttctttgagtttcaagaactgagtggattatgttctgcataactgtcaccctcttcttcccatcttccactaactccttcatcttctccacttgctcgcgcacttcaccttcagagaccgcatacattagcataaaacaagaaatgatagaaaaacaatagctagaccgatttatataattaccgggagtctcatcactcttagattgaggtggaggaggaggtggtacgacttgatgagatctaaggaaatgctcgaacatgtaaatcgagtggatcacaacggagaggaaaacggtgagacgccagaggaaggtaagctcaaagcctcgatccaatagtttataatactcataggctaagtaaaacgtagagcggtccaatataaacagccagatttttccaataccctaatcagacagattaacatgtttaagtagttaggttcttgttttaatacatacaacatctgagaagagatatacttactgatggtccaactgaagagagactagtgcaaaagaagaagaatggtaatgcgaaaagagtagtggcgagaatgatagggatgataagatctaagaggtatgttgggaagatgacaagtagaaacagaaacaaacgttctgtccaaaacaatccatttgcttctagtctcctctttttttcttcttcttcaaccttattcatcttcttcttcttcttaatactttgtttgctcttgctatgtttgtgggtttataaaatttataagctggacgattttataagaatcctacctaactctaatcctataaagttgggattttatttgatattaagacttgagtttttttagaaacgaaaatttgataatacataaaacttttccaaagcaaaccgttcacaaacgcttattttgcgggtaacaagatgaacaaaagaatattcagactaattggttggttacaagatgccttgaagaaggggtttcccttgaaacttgtcgaccttggagctcagaaatgtgaagcttttgtggagacgagctcttttcatatcaagatcccctaacttcgcagccatctccgtcattttagctctccactcctttatcttcttctccttctctcccagttctttcacctgtttctcagtttcttgtttcgcaagtaacacatctctctcccacacctctttctccactacgctcatcttgtgttcatcgtagtgttttaccgcctctacgatctcctccaggacaggcttgagccaacctgctttgattttcacggactcaatgtctttaacaatcgctaccatttccaccacgcggctctccttgagatacttcaggggagttgtttggagttcgaataccaccgaggcaagcatgtcgaggtagtaggatcgtgtagcaagcgattgtagtttggaaccagacgcaatgtcaccgtgcttctggagtatgtgttgtagagtggtcgagacgctagctctgaccttgtactgtcccacagaaacgtaagactcagatagaatagactgcatcacgtcccttatttcattattggtaattattcctttcatacgagagatctcagcgagactgaagctctgtgattcatctggcagctccggtggctcgttgtttgctttatgctgttcctcttgttcgctgcttccagatttcgatgtggtttcagcgtaaattgaaacagtgtgttcgtcgtgatcatccacaaatgaaaatttatcgtcgtctgtgcttgcagaatcatccatttcatcacaatgttctttctgtttgttaggtgtttcatatcctcggtgattaagctgaggtaagaggcaaaaactgtcattagcatgtgtagaaatatatatatatatatatatatatatgaagatgtgaaagtagagagtagagagcagtaccgtaataagtctagagggtggcctttcttgaggtgacaaaatcagttctggaaagagtagaactgattcctcgttcttctcaatgtacactgactcagctttgctcccaagataattgtaggcatgagatgatctttgacccatttcttgtgagattttttccctgtgatcaggtgaccttcctccatagactgcagttttgggcctactttcatgtattcttggctttgtttccacagtcctcggctggtgttctggcgtcctaggcctagtttcaactgtccgaggcattttaagagcagcgttgtcaagggatctgtgggacatgggctgagtttggggaatcctagggctgggttcaggcgtcttggaccgctgttttggagtccttgaggatggttcgaagtaagtaggttgaggctctggggtcttggaccttggtccgggggatctttccatgaactcaggtgacctccctctacgttgtgcagtcctcggcctagtttctggtgtttgaggcctccttcctgttgcagcagactcatgtataggtgtcctcggcctagtgtcagggatggcagatcggtgttcaggagtcctcggcctagtttctggtgtttggggcctcctttctgttgcagcagactcatgtatgggtgtcctcggcctattatcataggtggcatatcggtgatcaggagtccttggtctagtttctggtgtttgaggccttcttcctgttgccgcagactcatgtatgggtgtccttggcctagtatcagaggtattggatcggcgttcaggagtcctcggcctagtttctagtgaaaaagcgtcctcttggtgtgcagagcggtgttgcggtgtgcgtggcctatgctgaggcgtcctaagagggtgttcaggggtcttaggctgagttccaaaaggccttggtgatacatcatcatcctcatctccacgctgatcagcctggcttaaacaaataccaacaaatgagtgagtttcagaagtcaagtgagcaagtttagctattctttgatttatgaaataatacttaccctccttgcaaagtagtctccccctgagtatagagcgagagaaggcgaaactggcagcgaatcgacattgcttgaaggctcgatcttgcgtccctgtagcggggaaaggcgacttaagaagttgccattggtgtgatcataagaggatggtgaactctctgctgacgactcaaccttcttcttggcgaaatagctggccagaggtgatctgcttccacgagccggactagctggaggagtctgatccctgctgggagttctcttaccaaaccctgacacaagacaaaaacatcagagactcttcttgatgacagaagactttgacccaataacagaatcagaagcatatttgtttcataccaaagagtttcttctccttcttgtggacatctggagagtttactctctcaaaacagatagcagtacactcatggaaaggattgcctgcgttggagcaacctggaactacttttccagacactaattccatctcacaaacttaaaacaaaactctatgataagatctcaaacctgaccattccaaaaagaaaaaaaaaagcgtcagatccattgacccagcaaaacaagtagatatcatcacacaagaagagagtcaacggtttctatatatggaaactacaataaaagattcatgttttctctttgcttaattatgtttcttctccaaagagagagacttgacaatcttccactggttttcttactaatcaataacggattgtgatgttgataaattgcaaaaactctcataatcagctaattaaaagcttttgctagataaaaaaaaaggtcaagagagaatagagattgatgatacctgtgaaaaaattataattgaggaagaagaaagaaagaagcaaagccagttgaagaaatgagatgaatgatttatctcatcttgtctgtacataagagagatagccaatgaagcttataggtgtatatataataatatcttattgggttctaacatgggttgactttgaccgcaataaaaaaatgagtcattttatagtttcagccgagacttcgtcaattggctatttctttttcttttcttttagtattttatgtatttgtcaaagttagaatggatcgaagaggtttcagtctaactaagcagaagaaaagaatcaaagattttaggagatctctaacttcattgtgttctcattactccattatcatttgcttcctcctttcttcttctttttttttttggttatatttaaatgctctatttgaatctcagttgacaaagtttaattgaaaaacatttatttttatattttatcatttcttaaattcttgggggaatttttaacaacaaaaaattgaatatctttttaacaaaaaaaaaactactatcactcacgtaatttagcttttgttgaacgtttgacgcgtttccctaattatataggcggtagaaaggaatagacaacatatgccctttcgaaggcccagtttcttctgtcagcccaaatacaaaaaccaggtagtaatcgaaatcaaagcagtagtaaaagtgaccttaccaactgtttttcaatgaaagcggtcaagagaggaccacaaaatggttttccagagtcagaatcacaaatattgaattatatactaatttttattttatttttttatttggtaaaatatgaaatatttatacaattttcgaaatttcgattgaagttacaaagagtactagtagcaaaaaaataacaaaatgtacagaaaaacagacaatgacaaaacagcaaaggagaaaaacatatgtatataacggaaataaaagaagaaacaccgattccgagatgccaaatttagaaatttacgtaatttccacaactctaaggagctgaaatctcatcctagttgccacgaacaaacccaactagaggcccgtccacaaaacctcagtatcaaacgtctataccttttccgtaaactaacgcaaaaacgcgatgataacagcggactataattgttggggatgattttatgcttaccaattcaactatcacacgttgacatggacaacgtttagaatagataggaggacttttaaaaaatgagcatgaaccttctccctccctcttttccaacaaacaaagacttctccgagtgattatgcttggataagcattttccaaagcggtttactccactaaaccggtttaattaaatttccaaaaggtcgggttcagtcaacgagaaccgaatgaccgtcgaatttaaggaccttgctctcatagagctccagattcttcttcactctcacatccttcatctccagctgccccagccgtcccgccaactccgtcactctctctctacattccttcgtttccttctctctccgccgcagctcctccctcatctcctccatctcttttttccccgccgtcatttccctatcgcactcctccctcacaatcttcgccgtgtcgtacttcccgtagtactccaccgcctccgctagctccgtcaccgctgttttgagccacgatacatcgattttcaccgaatccatgtccttcacgaccgccgcgatttccgccactcgcgtcttcgtcagatctctcaacgccgttgatttcagttccattactgctgcggctagggattcgagataaaacgacctcgttgaggtagattgtaacttcgacgaggcggcgatgtcaccgtgtttgtcaatgatcgcttcgagcgtggcggcgatgctcatccgtaccttgtaattggcgacggagacgtaagtctcggatatcgctaattgtatctcttcctttccgtagctttgaagtccgcgcattctggcgatctcctgcatcgtgaagctctgtgactcgtccggcagctccggcggctcgaattgcctctcctgctcgtaagtctctaccgatgtgatctgatacttgtagtgaaccggctgcacaaaccaaagcaatttgaatttaagcattttcttcacactttggtaaatagagacccgcgagagaaaaaaacgaaccgtgctgcttcctgaaactcccctggaacgacgtccagtggcaatttctggaaagagataggtggaattgttgtcgtcttcgtcgtcactggatgagtagaacggcggtggtggagagtagcttgtgtgttgatgaacaggactcatgggagggctgttacgcggtgtgatatcggcatctgcctcgtacatcccctcgaaatgatcttttccgttgttgtatctctgagtctgcaactaagtagagccaatatatcagagaatgaatgattaacaaaggcgttatatcagagaatgaatgattgaatccactaacccttgcgtgtggcggtggagagcggctttgggatggatgaaatgggcttgaaggtctgttccgggaagttacattgccttcagcttcatatctttctctactgtagtctcttccacgttcatgctgcaattacaaaagatttgttttttagtcgatgacggagactaaatgagaagtatgtaaaacaacattgagtaggattagtacggtgttgtagggagctggagagcggcttctgaaggggtgaaatggactcacattggcatctgcctcatacattctctcgtacagctctttggttatctcgctagaccttttacgacgatcaggctgcactccactcacagacaaaactttgttactggttccaaatcagcagattgaaaaaaaagaacaaaagtgatttggtaccgtgcgggttctggcagatcgaaaagggctcccagaaccgttgctccttggagtcacatcctcatcaggctctctaggacgctcaggctggagtttggaacaaagaatgaaaaccatggaaattgaaagaaactgtaaatctcatcacaaggagttgagagtaccgtgctatatctgtagactggaggccgttggtgggaatttgggatgcgttcagaggcttgctgttgtggtttccagtgagtggtttgttcatcggagatgggaaacgcgtactctgattccgatcttttcatgccgaaatgagttgtcggctgagaccgaccctcagcaagatgaggagggctcgacgggttgctcttgctcgcacttttgtgaccaaacaatcctgtagacaccagttcagtttagccaccatctaacctaaataggtcttctatttgtcatcatcatcatataacaataagtagaactgacctgctcttttgccatgtctcttctctcttgaatggaagaaatccatccccggatcggtatgcaaacctgcgtgtacaccggacaattcgatcagccagagtccattgtataatagaatcgtgtgcatataaaaaagtacctgggatccaactaccaaattcttaattaggagttttgttatgaactgccgtctgagaagatcaagagaagacaaaggtctccaacaattactcttatattattatgctagaaacgacatggtgtggtcatgcaagttaataacctgaaaatgacaatcacgacaaatattaaatttgtgtcatttgtataattgatttgatgatggaggcttctatccaactgtagcagccactgacactgacttggtcaattttggcaaccatctttgaaaaatatgaagaccaaactactaagaaaaattaacatttacacgaccataaacgtcataacgaatcaatccttcggctactaaaaaggtgacaactttattttttaataggcgcaaatgtagacaattattgtttataagaatactaacgggctttgaaatggaccgaaataggcccaagaggggtttaaatgaagataaaccctaagctgaacaaaccttctttcctcatgtgcgtcggcttcgcttctggaagattctgaaaatcaccgatttcgatggcgactcggctcaaggagattgtgaagaagtacggaaaagtcgcgcttggagtccatttctcggtctccggcgtctcaattagtggattctacatcgcgatcaagaacaacgtcgatgtcgaatcgctcttggagaaataccaaatcccatggttctccagcaaggaaaaccctaaccctagcctcgatttaaagctggaagagcaaggttccgttacgagcgataacaagacgaaacagcttgcgaaatcggccggcggagccctagcgttggcggttttgtgcaataaggcgctttttccgatcagagttccgatcacgatggcgttgactcctccaatcgctagattcctcaggcagaggaagatcctcaaaaccggccaatgactatttctctccacattttcacatttggggtcttgtctatgttttctcaccatctgtattggttccatgcgtttttgtttgttcgtaatttcgaatgtaatgcttcttaataggaagagaatgagatattgtgttagaggtatttcagactatagtgttgatcatctctccttataataaggtctgaatttagaatttaccaatattgaaatggactttacattatctatcattctccatgatttcttcacaagatgtctctgtatttggggatttgcagacaaaaaaacattttgcaggtcggttaagtgaaaaaatgaaagtagcttgagatgaatttttgacatgataccaagtacttgtctatgttggggacatctgataaattaggaaattagtgtatgtccttataaagaaataaggaattc

SEQ ID NO: 259 - DNA, 20078 bp, Arabidopsis thaliana
tccaggaagtctgttgtgtggggctgtagtttaacgtaagttccctttggaagagtgacatttctaactctcacaatgtctccttcttgcagcagcagattctgcatcatctggattatatcaaagaagcaaacaatcagtctggtaagtccacatgatccagagtacttcgattcacaaacaaagaggaaactgattcttacccaatatggcatgtaaatcatgccttcttctgcaatgaactcaaggactccacagtgtgtaacacgttcaattccagcattacgaagctcaaacagcatcggatagtcaatatgcaaagaggctgtaaagtccccaatattagcgatttgatatgtttctaagttaaacaaatattagaccaaatccaaaagagaaaaccagtaggagcatacctagacgatcaagggctgatggtggcattataactgaaatagaattaacacaaattaaaacctcaggcttgaacaatacagatggaaacaaacattggtgtctagatagaagacttactcttgtcaccactttcaagttgtggctgcagggaagagaaaaggaaatagaaattagatactagatctcagctttcttatagaacttacttagtagaacatgacaacgactaagattctaacattacaaaagagcactctcagattcacttatcagggaattaaactaaaagtagagagatgaaatcaaaccttgtcgataaaagatgccggataacaccggtaactctgctcaaaggttgttccatgataatggtatccatcgaaaaactgcatcgagtttaaattccaaaggtttagacaaacaaaccaagggtgcgagatataaaagctagagtgaagactaacggttaaaaaggaaagctttgaatacacttaccatagttattggtggtagtagactaacagagtaagttaacaaatggcaacctacagaaaaagaaacctcacacaagtcaattacaagagatccaaatcataaaagagaaaaagagggcactctttaatttaagggtttcaataatcaattgtggccaacaattccgaccggaaggaacatcaaagttagtgactttaacagataactaaacaagctattatcaaaaacctaagacctcaatttcgaatctcagcagaagaatagaaacctacaaaatcgaagaaccatctacaacttgcaaaatcccaccttttgaaacaaacccaagtaagatccttggaaacctattcctaaacaattcaccggaaatccccagaacagaagattccgatcaaaagttgagagtgggatcgatacaaacaataccaaagctaaaaactttacaaaattaaaagctcgtcttgagattatcagagaagaataagaactcagaaaccaccgattgagctgcccgaccaataaaattacctttaggaagtaattgattccagacacaacccaagtaaagatgcaaactttgaggacctgtgataacgttgcttgtatatatatatacccatacggtgcgtattgattcatgtctttgtaaaacagtttgggcttcacaaaaaacggtactagcccattgggcctcgaatagtgaggaatcatgaccactttatattgacgtgtgcgttaccaacttaccatactgggaaactctcaattctgagcagatatctacccaatcacggattgaggagagaagcaagaagaagaaatggagattacactgaacagtggcttcaaaatgccgatcatcggcttaggagtttggagaatggagaaagaagagcttcgagaccttatcatcgatgccatcaagatcggttatcgtcatctcgactgtgctggtataacttaacactgcttaaaaccttttctttctgatctttgttgcttcgggtttgtcaggatatgtgaataaaatattaggttttgttttaatttgttgaaagttggaatcttacttggaaattatgtcttaagatttgggtttttaagtatttggaaatttggaatcgtagaatgatcttaagtctttgctgtatcacagacaattgtttttgtttctttgcatgtgagtgagttgctttgttctgtatcctgatttatgagtatcttttggggttacttggttcagctaattataagaacgaagctgaagttggtgaggctcttacagaagcattcacgacaggtcttgtcaagagggaggatctcttcattacgactaaggtccaaacggctttaagttaaactactacatacctttgatatcagttcatttcagatcgaatgctctctgtcttggttttgcagctatggagttcagaccatggccatgttattgaggcatgcaaagacagtctcaagaaacttcaacttgattacctcgaccttttcctcgttcatatacccatagctacaaaacacacgggttaggcttcagccttgttcatgaatattatcagtttcgagtagagaccattgcatttcagccttgttactggctggaaaattaagttttctcaagtctctagcaattggcacacagagtaataagctgtaacatgtaagccttgtgcaggaataggaacaaccgatagtgctttgggggatgatggggtattggacatagatacaacaatctctctggaaactacatggcacgacatggaaaagcttgtttctatgggtttagtccgcagcattggaatcaggttcaacttctctcactatcattacaagttctcttgtttagtcgccaatatatgaattatttgaccattaggttttttgcagtaactatgatgtctttctaacgagagattgcttggcttactccaagatcaaacctgctgtgaatcagatcgagacacatccttacttccaacgcgattctctagtcaaattctgccagaaacatggtatctgtgtcactgctcatactcctctgggaggtgccacagccaatgccgaatggtttggcaccgtgtcatgtctggatgacccagttctcaaagtaagccccatcctctaaaccttaaaagtttggactgaaacagttaaataattaaaccttttgtctgtctgaattcataggatgtggccgagaagtacaaacagacagtggcacagattgtcctgaggtggggaattcagaggaacacggtggtgataccaaagacatcgaagcctgaaagattggaagagaattttcaggttttcgacttccaactatcgaaagaggacatggaagtgatcaaaagcatggagaggaattaccgcacgcaccaaacagccaagttttggggcattgagctctacgcttgatcacacacacactctctctctctatctatctatatgaataaatgaagcttaagaatataatatcagataacttcaacttttttaagaaaacctaagactccaatttcgaatctgagcagaagaaaagaaacctagaaatacgaagaaccatctccaagtttcaatatcacaccttttgaaacaagcccattaagatcctaggaaacctgttccaataccactcaccggaattccacagaataaaagattccgatcataaattctacaatcatcgaattataatagtgatatcgatacaaacataccaaagcttagaactttacaaaattgaaaactcgccggaaaaaaagatgcaaaggggacctctgattaaacgacgtttcttcttgtttgtcctctcgcatcaactgtactgggcctaataaataaacggttctggattattgggcctaaagtagtgaggaatcatggcccctttatataacgtgtgcgttactaaaaacacacactgagaaactctcaatctgagcagatatttacccaatcagggattcaggaagagaagcagagaaagaaatggagataacactgaacagtggcttcaagatgccgatcgtcggcttaggagtatggagaatggagaaggaagggattcgagaccttatcctcaatgccatcaagatcggctatcgccatctcgactgtgctggtattcacttgttctctcaaaaccttctctttctgatctttgttgcttctggtttgtctaaatatgtgatttgaatactgggtttgttttaactttttgatagttggaatctttcttggaaaatatgtctttaagatttgttttttttttcatagtctctataaacttgttatctaaagtaaatgctctctgtacatctttatttgcatctgattctgaagttctaagtatttggaatcatagaatgatctagattctattgctgtattgatgacagattgttctataatagcttttaacttgttacttattatagacagagttcagctttgttttaattctattgtgtgatttgcgttgttttaagtcttgattttggtgtgttcgttttccttggtgcagctgattataggaatgagaccgaagttggtgatgctcttacagaagcattcaagactggtctggttaagagggaggatctcttcattacaaccaaggtccaatcgaaaactatacagctatgatctcaatttaatgtgagcaagctctgatctgtgatctgaattggttttttgcagctatggaattcagaccatggccatgtcattgaggcctgcaaagacagtctcaagaaacttcaacttgattacctcgatctcttcctcgttcattttcccgtagcaacgaaacacaccggtgaggcctctgcctcattagcgttttattagtctagagtcagagaccattgcatttcgttttattacaagtcctcctttttcactgactgagatcaagttttcttaagtgtcttctatatatgctttgcaggagtagggacaaccgatagtgctttgggcgatgacggggtattggacatagacacgaccatctctctggaaactacatggcacgacatggaaaagcttgtttctatgggtttagtccgcagcattggaatcaggttcaacttctctcactatcattacaagttctcttgtttagtcgccaatatatgaattttttgaccattaggttttttgcagtaactatgatgtctttctaacgagagattgcttggcttactccaagatcaaacctgctgtgaatcagatcgagacacatccttacttccaacgtgattctcttgtcaaattctgccagaaacatggtatctgtgtcactgctcatactcctctcggaggtgccacagccaatgccgagtggtttggcaccgtgtcatgcctggatgatccagttctcaaagtaagccccatcctctaaaccttaaaagtttggattgaacctttgacaattaaaaaaggactgcgtttatctgaattcttaggatgtggccgagaagtacaaaaagacagtggcacaagttgtcctgaggtggggaatccagagaaaaacggtggtgataccaaagacatcaaagcctgcgagattggaagagaactttcaggttttcgacttcgaactatcgaaagaggacatggaagtgatcaaaagcatggagaggaaataccgcacgaaccaaccagccaagttttggaacattgatctctacgcttgatcacactctctctatctacatgaataaatgaagcttaagaagataaacaacgagaagaagccatagctttacctgaaacattctcaaatgtttgtgagcctatctttcatacataaactcatgttgttaaacagattatgatttcttaagtactacaatatcacacattgatggaaagtgatatagatttctctcttctctatttatatgcttaaatccacaatgaatcattattgtaactgaaagaggatatttaaaaagacgagtatacccttgatttctcttgtttagtagtagagaagagggtaatttggtaaatgacgaagtaagtacattgagcttcttcgcggacagagacactatctctctctctctctaccctttggatctttcttctcgatcaattatccattttgcccagattttttccagaagctcatcgaattcgtaagctttcgcgccttttcctctctttaatttatttgttaatcaattttgaatgtgttgtatctctagggtttataatttcagtttcacccttgttttctattgtttcgcggaataatctcttgtcatggaaggtttagattgattcgacctttttgatcttgacctaatttattccaattttcgtaaaattgttccttaagacctgtttctctgactagctcagattgattttggtatctgaatcaattgcggaaccctaactggcagatcaattcgagaagttttgattttgtttgaagatagtgaattgcgagttcagtgtgctaatatctgcttgtaattcttactcttcaattgttttcatagatcgaatcacaatgtttgaaatttggtttcactgttgctgagtgtgtttggaggagaagcttgattggttcggtgtttcactgtttgaagattataagagttatggagaatggtggtcagtatgataatgcgcggttcaagcccgattacttcaaaggtgcacaatctatggtaagacttaagatttttggtttcctaaagatatgtttttgttagtgtgattgaagttatataagcaaagaatgtttgttacagtggaatatgattccccagcatcagattaaggaacaacataatgcgttggtgatgaataagaagatcatgtccatccttgctgagagagacgctgctgtacatgaaagaaatcaagctgtctctgctaaaaaggaagctgtcgctgctcgggacgaagcgcttcagcaacgtgacaaagctctttctgagagagataaagctttgatagagagagataatgcttatgctgctcttcaacaccatgaaaatagtctcaactttgctttgtctggtgggaagtgtgttgatggagatgattgttttggtattggggaaccccacaaacttgaagtcttccctttgtcaactattccgcctgaggttacaaacacgaaggtggtgaacaaaaggaagaaagagaacaagcagggactatcaaaggtgaaaaaagtgggtgaagatctgaaccgtcgagttcctgctcctggaaagaaatctagaacagattgggacagtcaagatgtcggtttgaacttagtcaccttcgatgagacgacaatgcctgtacccatgtgttcgtgcacaggctctacgcgtcagtgttacaaatggggaaatggcggctggcaatcgtcttgctgcacaaccaccttatcccagtatccattaccgcagatgccaaacaagaggcattctcggatgggcggtaggaaaatgagcggaaacgttttctcgagattactcagccgtttatcagcagaaggatatgatctctcgtgtcctgttgatcttaaagactattgggctaggcacgggacaaaccgctacatcactatcaagtagcctctgttgtttacacagtccaagtatgtttctctcgtcttcttaagattaggtgttgtctttgtctttattgtccatagtttgttctttgttgtgtatggtaaaaccattgttatgtgtatcttttggatgggcaaaaatggtttgcataaaaaatctgtgttttgacctcaaaaaataaaataaaatcgtaacagttaaaaatcaaaatctgttacccctttgatagcaaaatctgttaccccttttttctttcacttgttagtttctttttataccgagaggagagaacaaaaaataaaacacaaagtaagcataaacaacaacaaaatgatggagaaagccacagtggcgcatgtggagacgcatcaacggtcacaagagatatggtttcttggcgccgcaagagccttcttgcaaattccgaatccggggattgtcaaagtttttgtcctaagcagcttgactacattcacctcaggaatggctttagtcattgagtggatctgtcacggaaagagtcacacgggattcgggtggatcatctactatgcattgttcttgatgtgtcttcctcttgtcatcttgatcggtcttcatattctcgtcaggcgcggctcagatcagattgtggattcaactccaagcaaagaaccgtgtgtggtgcagaatcagagtaccgagacgactaaacgaactgaagaaacggtgaaaaacagctgccaaagtttagccgttgtggttgctccggatgacaagaagatgccgaggataaaacgcgcagtgtcattcccgtctcacggcgaagtaagatcatgtcgaactcgttagcaaattaaaacttagtgtggttcattcaaaaaaataactttgatgtggttagctatcagatcgattcaagaatctaataatctcttttgtgatatgtttgttattcagcattttatcttttccaataatccaacgaccaatgatcttcaaaaattcgaattacatctttctttcttttttcccctcttatgagctgagttcaatatatatatatatatatatatatatatatatatatatatatatatatattgatgtactatatattgttagttaaaagcaaaagatgaaaaagtcttacaatgggttttggtttttctttgaaattttgtaacaacccaagtaaaatactagatcctctgttttttagggaaagtattttttgcaaaattttgaattgctataaagtagagttttggaaaaactaaaataaaaaatctttacattcaaggtaaaaatctctacttctttgaaataatgccacgtgtcagttcagcgaggaataatatgtgtgagtctcatgggttgtttgagtcaatttcgttaccggttctacaataagaagttactttggcccaaatagaaagaaattttacttatcaagtggccgaaaggtggccccaaaaaaacaaggaagtaaatctactaatgtacatttgtcgctacataattggtctaagataaattacttatatagaatactgttatggtgatttacccaatttttagccaaatgtggtaaatttaatttctaaacaaacttacaatcatttatagtatctattaatttattgctaacaacaattattttttccaaataaaaatacatttttttttacaaaatttaatttagattcactgaaatatctacaattaagtaatgtaatttaatgtgggtccatgtagtgcatagaaaagatttactaattaagtgattgctaaaatcaataaattaataaacaaaaataaaaatattagttgatcaaaaaaaggagatatatgatatttattaatatagccaaaaaataaatctcacaattacaattaatcaaaggactacaaaaatatacaaaactttctgtaaaaaatcaaacaacaatcatttgtaaaatccaacattggtaattcttctagagatgaaccaaatgtatatctaaatcagaaaaagaaaacaaacaatatttatgttccttgatcagtcttaaataaacgtggtaaaatagttcgattacaacgaaataaacgtgtcaataactcattaataaaactgaaaaaaacgtgataaaataactcactagaataaataacgcggcaaaataactaactaatgactcgatagcaaaacacaaacaatttagatttataaattttcattgtataaccttacaacacagtacagtatagctttttatcttaaaaatgtaaaagctgttttatagaaaaaataattcaaatgtatagatataaaatatttgagaccataaaaagggaaaaatccttaattaaatatgaggagggtgaaaaacatgagacttgtgtcctttccttaaccaaatataaataggagggtcgtgcaatctattgaaccagacaaaaaaaaacaccaatcattttctcagagagatttcttttgtcaactgtccttatccattgttgaagcttgaggtctcctctcttttaactctttatgtctctctcaagtctcaacgtttcaatcttcttctttttttttggtctccttgtctgcaacctgatcaaagttttcatagaattaatctgaatatcacgatttgatcatttcaattttagctttggactattgttaactctttcccatttatgcattcgatttttgatttcttctttaagaaaaataacaaaacttccatatgattgcagaaactccgataacaacgatgaacggtcgtggaaatatgactcaataccagcagaatcctttcagtactgatgatggtggccagagcaccggcgtgtcactctcttcccggacttctctgtcaccaccactgatccgttatccagccgggtcgccggacttcagccccggaccacggtgtacgactcaaccgtcccctaccttctccgacttcactcaagcgagtccttcactgacgtcattcaataatccggcaagctttacaccttcgtttagcttctccaacattcaccaaatgattcctacgccgtcgtcgtcccataactcaaaggcgtcggtgagctctgcttcgtcgtctagcttctactttccccagacgagtccttcatcatgctctactccgtcgtcgttcagtccagactcgttttctcactccaacaccggaccatggtcgatccctcagccttcccctgtgttctcatccatagcaccggccagttctgctctgtcgtcgttcggtccagactcattttctcactccaacaccggaacatggtcgatccctcagccttcccctgtgttctcatccatagcaccggccagctctgctccgccgttgttcggtcgtgattcatttccccgctccaaccgcggaaaagggtcgttgattcataggtcgcctgtgctttcggtcttaccgccggcgcctgtctactcctctaatccgatggtgagatcatctccgccgggtcacccatctccatcagcacatttggaggaaatgtctaaccgtcccccgttgcatcctcagcctcgggttccagtcacgaggtccaactctgcgaaagtctccggtagcaggcctagaaagtatcataaaaggaccaacagtgagctatcaagtatgttggttggggactcaagccgcggcgaggaaggcggatttggaaagctcatatataatgaggaagcaatgaaggaattctgctctgagtatatgatcatgcctaaccaaagtgctgttaacaatagtgatcagaatcggaatgctgatgttttgatgataaccaatactgattcgggaggtgcaaatgatgctaagaaatataaaaggtaagcaagactgggtgacttatattagggaacaatattttttctttaatatattttattattatcttttgtgatgtatggttgttgacatttatttattcatattgatgctctttcagaatgttggcaaaccgagcctcagctgcacgttctaaggagaatcgggaaaagaagattcgtgatatggaactcagagtagaaactcttgaaaacactcaagcttcactgtttggaacgatgacacttttggaggtgagacatatatatcacaatatcaaccatctacttgtcatgtctaagtttcttctatagggaatttgtttaaacaaaactattgttgttgcatgcagaaggaaaacatagtgatgatgaacgagaataagttagcgaagattcgacttcaattactagagcaacaggcccctcttcttactggtacgttttagccacatatttctcttcataaaaagaattttgaatgagtttttaccaaatctttttttttttttcctttttttttccttttttttttaccaaagtttttaccaaatcttcaactgtgaaatacgtttatttttttctgctatatcgaaaacttgatgtctaactagtatgtaaatcatttttatatgaggttcctaacaagatccttcatcgtaccatcgtttttttatttgaaaaaatatccatgctcggtgactgaagaagatatataagctttcattttttttgtttttgtagctttaactaaacaattagatgaactccgaaggctagaaaaggaggcaaatgaacgagggagtgtcgactattctcaactactgaaacaactgaaacaaagtgaagagctccttgctgaaatcaaccgatttaaagtagcaactggtcaggggatgaaaaatcccaaccagttcgagggttcaaccatgcatcaatcggaccaaaacgtgttccagccgcaactcaacacctatgagttcaatcagcaccagcaattggacccaaacatattcaaagagcaatgcaatgtcaacgagtttaatcatgagcaaccaaaccatgaattttatggacataactaaaggattaaacatgtcttcaagttgttttagatttatctatatatgattataaatttgtaaccgtgagagggttcagacaatatgatttttttttaatatttttgtttagtttatttcattaaagctttgttctttcatttttttgttattgagattaatttttattttatcaaatttgttgaatttgatagagaaataaacatactctatatgtaattagacgaaagtagtcttttccgaccagtggatgattgctgctttggtcaacgtttcaaaagaatcgttttttcttttagttccttccttctttcgctattttcgccattgattgctgaagaaaacacagagagagagagattcacttccccatttcaggtcaaatttctttctttctaatagatttatcttctctatttgggggaaatcaattattgttgaaatctccagctaaaggatcaaactttagttagggttttggttcttcttcaaagtttctgacttttatttttgttcggaatctcagaaaatcaaaatgggtggtggtggtgatacaacagataccaatatgatgcagagagttaattcttcttctggtacatcgtcttcttcgatccctaaacacaatcttcacttgaatcctgctcttatccgctctcaccatcacttccgtcaccctttcaccggagctcctccaccgccgattccacccatttctccttactctcagatcccggcgactttacaacctagacattctcgctctatgtcgcaaccgtcttctttcttctcctttgattcattgccgccgttaaatccttctgctccgtcggtttcggtgtcggtggaggagaaaaccggtgccggatttagtccttcgttgcctccgtcaccgtttacgatgtgtcattcttctagctctaggaacgccggagatggagagaatctacctccgagaaagtcgcataggcgttcgaatagtgatgttacttttgggtttagttcaatgatgtctcagaatcaaaagtctcctcctttgagttctttggagagatcgatctctggtgaagatacatcagattggtctaatttggtgaagaaagaaccgagagaaggcttctacaagggaagaaaaccagaggttgaagcagctatggacgatgttttcacggcttatatgaatcttgataacattgatgtcttgaattcttttggaggtgaagatggcaagaatgggaatgagaatgtggaggagatggagagtagtagaggtagtggtacaaagaagacgaatggtggaagtagtagtgattctgaaggagatagcagtgcgagtgggaatgtgaaggttgcgttgagttcttcttcttcaggcgtgaagagaagagcaggtggagatattgctcctactggtagacattacaggagtgtttctatggacagttgtttcatggggaagttgaatttcggcgacgaatcatcgctaaagcttccgccttcttcatcagctaaagtttccccaaccaattcaggtgaagggaattcaagtgcttatagtgttgaatttggaaacagtgagtttactgcagctgaaatgaagaagattgcagctgatgagaaactcgctgagattgtaatggctgaccctaagcgtgttaaaaggtaataaaatagtgatgcttcattagacattttgatgttgttgttgttgtgacttgactgttttgatttaaccatctcgttagaatcttggcgaaccgcgtatctgctgcacgttcaaaggagcggaagacgcgatacatggcagagttggaacacaaggtgcagacacttcagactgaagctactacattatcggctcagctcacacatttgcaggtgcgagacaaaacaacaaactatcatgtttgaataagtctgtagtcttatattgtttcctttggtggctcagagagattctatggggttgacaaaccagaacagtgagctgaagtttcgtcttcaagctatggagcagcaagcacaactccgcgatggtatgcacattatcaaaagtattcattctcaaaattagggttgctgagtcgctttaggattgttttgtattcgaactcgatggaaccaagtcagtgtcttgtccttatccgaatgctttgttttactttccatagacgattttcttctaccgtaagaactttcccttttcggtttccccagccttgagtaggaacaatgtttgtgtattctatgtatggaaaaacctgaaccttgtccttgattatttagctcatggccgcaagattgcacccgaattttatccatccttaccgctaaatatgtctcttgtttaacttactctattaaaagatttgatctctccggagaatttagctaccacgtttcttgattttttgtaagttctcctagagaggtaacattttgatattccttgtttggcagctctgtcagagaaactgaatgaagaagtccagcggttgaaactggtgataggggagccgaaccgcaggcaaagtgggagcagcagcagcgaatcaaagatgtcactaaacccggagatgtttcagcagcttagcataagtcagttacaacaccaacagatgcagcattccaatcagtgtagcacaatgaaagcaaagcacacttcaaacgactagggtaagtaaaactgcgatccgcagttgtctagttacatatatgataagaatcttttgtgcagagttctgtttttggaagttttaaagaaacatatataaagattatgtccgggaaatttgatcatatttcctgaaacatacacacatatatatagtggtaatggaggactttctttctggaccaggtgatcttatgttgttttggtcatatatttacacagttaggattttatttccctttggattttggataatctatgagacaatttttaaggtttataaatattactggatctaaatcgttttaacagagtcaaatgctgtgaaattgcttctctcgcttagactacttctctccagcttcatctcctcctgtagtctttatggatttttattacagtaggatctttcaacatgttcttgaatcttattaaagtaaaatagaatgatggattggatacaactgggagtgatggcttacataaaataaatttcaaaagagagtttcaggcccattgcttttctgaaaaaatggattgtgaagaaaatgaagttgaaaacaatgatgaagaagctcaacgaaaagaacatgccaatcagttcacatatatataggaaggggtcttgtacccaatccagcatctgaacgtaaagatgctcaaaggcggttacaaaacatcagttcacatatcttgatcgtattcgtctctcggggttacaaacttctttcacatattctaatagcctttatgttcacagtccatgtttgtagtcattattgaattcttctcgccaatcaaatattgaattctaagcgtctaaaggttgatttgaaacaaaacttactttattaaaatatgtaaaatgaaaagggtacatatcaaaagagcataaacgaatagattatctaaggttgaccaacaaaacaaatgacatgcacattgctttcacataactccaatcgtcgtctctatcttcttctccttctgattctgaatctgaataatatggatatgattcttctgtcatcacaaatggagcattgaatgattgagtatgtttaaatcgttaacactaagatcatctagtggtctgcaaaggtgtacacgctacaagaagcttcaatcaccaaaaccatgggttacatgatcaatgcactctttttatttaaggtaattttaacaagttatgtttgtcaaaccattcaaaatgtttcttatttcgccaaaccacgtaataaaaattcaattaatttgccaaatcacataactatcccaatgtgaagtcaaagtccacaagatttagatacaaaataaggcgcaatagttattagggtatctggtcagtaacaactgatatgggaactggtgcaccttcaaaaagaaaatcaatagaacaaaaataaaagcacacacaaaaacgtgtacggaatgggacgaaaacgatagattctgcaaaaaaatcgatagctactctcatccaattggctatcacccatcctttacagctttccttctggtccattcattcatattccaccaagttcattatacttatatttcttaaggctccaacagaaaaaaaaaactaaataaaaacttgttattgataggttaaattaatataactgaacattctaagtttatgtaacctttatgtttcttgttaaaattaaatctactaaccaatatgtaagaaaattttgcaccaagtaaatagagtctacaagtaattaaagaaaaaaaagaaatgttttctatcaacgggctaatataaaacaaacggcatttaaagtaaactagaatttaacccgtgatacactacggggcaaatatttttcatatataataaaattaaattttatggttttatatttagtattaaagatatataattttatattaatattgtaattaaaaaaattagtgatgataaaataataaaataaatatttaacctgtgttatatcaatccaaacccgtctcgctgtatttcatatcaatccaaacccatcctgctatacttctcgtctcataaaatttaaatttttttatgtttaaatattaataatgttttataaagttaaaatatatcaataatattttttaaaaataacaattgtttttggctttagtgtaatgccattctttgtaaattcttactttactaacacaaaagtactttaaaaaggtacttcaaattttttaatatatataatgttaatttttggtaaaaattattataaataaatatttagtttaatcataatttgggattaatatacttgttttttgactaactattttttattttaataacctaaatttagtcattttgtgaatattatttgaatcaacaatatcaacttaatacatgtacaatttatttatcccagaaaaaagaacaaaattattttgtacaattgcaaatttaaaacgaaaaatatggattgagaaataatttgggtttcaaatttttattacgtaattaatttttaatgaagatattaaagcatatattgtaatataagatttgattcattttattaactgaaaataaatgatttaaaacgaaaaatcagggtgattaatgttaattggaaagatttaaatgtttttgtgatttttttttagtttcctaaattttagtaacataataggttttatatttagatttaaaaataaatttagtaaaacaataaatgttaatggcatgccattgtaaataagtgtcaagtagatgatttatttgctaaagtggctgcaaaaatgtatatgtagatatacaaaaaacaaacaaaaacaaaattactaaatttatctctcaaagaagtaaaatcatcaagtttataagtcactgcgagtagctccatgttctccatgcatgaaatctttctcggaaaatctcacactgcattatgtgttccatttcgagaacacaaaccattgctcataaaaggattttgagttccaagtgaaaagactcttggcatccatcaaaactatctatgaatccctcaaacaacaacatgcatcttaattagtcctgagaatttatcgtcgcacttccaaggaacacaaagaaaaaatcttgctcatttcccaccggttcatgttggataataacatatgagttatgactgcaccatccgggattcgtgagcttcctcccaagctatgctctccgtctttgcattttaagttcatctttcataatttctcatttaaattacttttatagaggttatgaggataaatatcgacttcagtatgcatgtgtgtgagtgttataggtcatatataatagatattagtggaaatattagtacatgtggatgcagtttattccaaggcaaaagaaataatattatagatggaaaaaataaatatgtgcgttatattaagaagactagttgcttcgtatacaaacaccatttgtggctagtagggaaaggcaaagagggaagctaaataagtgcattgaatttatattaaatgtgtcttttaaatgtagagatatgtatatgtgcatcaagtaattactagagacaatgctttgcttcacctacctcttcttaatattttgctttctcactagagacatcaaattagaaactctttgttcattaattcaatggtcccatatgttacacctaatagtctacagtctagagtctatagactatagtgaagcatttcaagtttgtagtaaatgtttatggctaacgtagatattccggtaatgataatgaataaaatacttcaatatgcttatagaactcaatcaacaatgcaaaggagataaccctctaaaaacttctttttttaaaagagggaataatgaaaattatataggagctaagttgaaaaagatttgatcgataatttgattgcattgagcaagaacaatatctactagttcttattagcgcaagctatcactcagatttattatagcatgcgaaaaataaattaggtttacatttcaacccttaaatgcgaaacaagcatagggtgccacacttaggaatcaacaaactaaaacccaggtttgacataatccacataaaagtgtcattttacgcaaatcattataggtttatagttcagaaaaaaaaaatttggattcaatattcatccaaaggtaacaaaaaaatttgatataaatatatatagatgtttataagctctctctctctctctctttctctttctctcccactccctcatccgatcatggatgttaaagagcggaaaacaacttcttcacaaggaatagtgagtcccatgtcatgattgaacccgaactcttcttctgcctgttgaagcaagctcttgaacttaggatgagtcaagaaggatatgggtacgatgtaccggctcctcttttcgcctacatagaccgggaaatgaccctttggtacgtctacaggcagaccatcctcatcatagcattgattcttggccaagctcgagcatctcttgaggatttgcttcagcattgcggtttgtgttagctttgaagatctcttaaccgccattgctagttattgtttcttgagaggagaagaagaagaagttgaggtgtagatggcggagagaagtgagagatggtgaaagggttatttatggcggagaatgaggatgtggatgtgatgcttacgccaatatttcgatttcttgattattcaaaattattatatatatagtcaatttcgatggattcgtctagtactgaatatagaaagaaaaaatataaacataacgtaatgtcgattaactttggaagagtgtaatgtcgttaactcaactactagttctagaatttaacatttcatggatgctactaggttttagaccatatgtgttttattgatctttgggggatttactaaacacttcctgtcatataatcagatcctactaaaactatgttaattaatacaactatattaaag

SEQ ID NO: 260 - DNA, 125045 bp, Arabidopsis thaliana
gaattcgatgagcttctggaaaaaatctgggcaaaatggataattgatcgagaagaaagatccaaagggtagagagagagagagatagtgtctctgtccgcgaagaagctcaatgtacttacttcgtcatttaccaaattaccctcttctctactactaaacaagagaaatcaagggtatactcgtctttttaaatatcctctttcagttacaataatgattcattgtggatttaagcatataaatagagaagagagaaatctatatcactttccatcaatgtgtgatattgtagtacttaagaaatcataatctgtttaacaacatgagtttatgtatgaaagataggctcacaaacatttgagaatgtttcaggtaaagctatggcttcttctcgttgtttatcttcttaagcttcatttattcatgtagatagagagagtgtgatcaagcgtagagatcaatgttccaaaacttggctggttggttcgtgcggtatttcctctccatgcttttgatcacttccatgtcctctttcgatagttcgaagtcgaaaacctgaaagttctcttccaatctcgcaggctttgatgtctttggtatcaccaccgtttttctctggattccccacctcaggacaacttgtgccactgtctttttgtacttctcggccacatcctaagaattcagataaacgcagtccttttttaattgtcaaaggttcaatccaaacttttaaggtttagaggatggggcttactttgagaactggatcatccaggcatgacacggtgccaaaccactcggcattggctgtggcacctccgagaggagtatgagcagtgacacagataccatgtttctggcagaatttgacaagagaatcacgttggaagtaaggatgtgtctcgatctgattcacagcaggtttgatcttggagtaagccaagcaatctctcgttagaaagacatcatagttactgcaaaaaacctaatggtcaaaaaattcatatattggcgactaaacaagagaacttgtaatgatagtgagagaagttgaacctgattccaatgctgcggactaaacccatagaaacaagcttttccatgtcgtgccatgtagtttccagagagatggtcgtgtctatgtccaataccccgtcatcgcccaaagcactatcggttgtccctactcctgcaaagcatatatagaagacacttaagaaaacttgatctcagtcagtgaaaaaggaggacttgtaataaaacgaaatgcaatggtctctgactctagactaataaaacgctaatgaggcagaggcctcaccggtgtgtttcgttgctacgggaaaatgaacgaggaagagatcgaggtaatcaagttgaagtttcttgagactgtctttgcaggcctcaatgacatggccatggtctgaattccatagctgcaaaaaaccaattcagatcacagatcagagcttgctcacattaaattgagatcatagctgtatagttttcgattggaccttggttgtaatgaagagatcctccctcttaaccagaccagtcttgaatgcttctgtaagagcatcaccaacttcggtctcattcctataatcagctgcaccaaggaaaacgaacacaccaaaatcaagacttaaaacaacgcaaatcacacaatagaattaaaacaaagctgaactctgtctataataagtaacaagttaaaagctattatagaacaatctgtcatcaatacagcaatagaatctagatcattctatgattccaaatacttagaacttcagaatcagatgcaaataaagatgtacagagagcatttactttagataacaagtttatagagactatgaaaaaaaaaacaaatcttaaagacatattttccaagaaagattccaactatcaaaaagttaaaacaaacccagtattcaaatcacatatttagacaaaccagaagcaacaaagatcagaaagagaaggttttgagagaacaagtgaataccagcacagtcgagatggcgatagccgatcttgatggcattgaggataaggtctcgaatcccttccttctccattctccatactcctaagccgacgatcggcatcttgaagccactgttcagtgttatctccatttctttctctgcttctcttcctgaatccctgattgggtaaatatctgctcagattgagagtttctcagtgtgtgtttttagtaacgcacacgttatataaaggggccatgattcctcactactttaggcccaataatccagaaccgtttatttattaggcccagtacagttgatgcgagaggacaaacaagaagaaacgtcgtttaatcagaggtcccctttgcatctttttttccggcgagttttcaattttgtaaagttctaagctttggtatgtttgtatcgatatcactattataattcgatgattgtagaatttatgatcggaatcttttattctgtggaattccggtgagtggtattggaacaggtttcctaggatcttaatgggcttgtttcaaaaggtgtgatattgaaacttggagatggttcttcgtatttctaggtttcttttcttctgctcagattcgaaattggagtcttaggttttcttaaaaaagttgaagttatctgatattatattcttaagcttcatttattcatatagatagatagagagagagagtgtgtgtgtgatcaagcgtagagctcaatgccccaaaacttggctgtttggtgcgtgcggtaattcctctccatgcttttgatcacttccatgtcctctttcgatagttggaagtcgaaaacctgaaaattctcttccaatctttcaggcttcgatgtctttggtatcaccaccgtgttcctctgaattccccacctcaggacaatctgtgccactgtctgtttgtacttctcggccacatcctatgaattcagacagacaaaaggtttaattatttaactgtttcagtccaaacttttaaggtttagaggatggggcttactttgagaactgggtcatccagacatgacacggtgccaaaccattcggcattggctgtggcacctcccagaggagtatgagcagtgacacagataccatgtttctggcagaatttgactagagaatcgcgttggaagtaaggatgtgtctcgatctgattcacagcaggtttgatcttggagtaagccaagcaatctctcgttagaaagacatcatagttactgcaaaaaacctaatggtcaaataattcatatattggcgactaaacaagagaacttgtaatgatagtgagagaagttgaacctgattccaatgctgcggactaaacccatagaaacaagcttttccatgtcgtgccatgtagtttccagagagattgttgtatctatgtccaataccccatcatcccccaaagcactatcggttgttcctattcctgcacaaggcttacatgttacagcttattactctgtgtgccaattgctagagacttgagaaaacttaattttccagccagtaacaaggctgaaatgcaatggtctctactcgaaactgataatattcatgaacaaggctgaagcctaacccgtgtgttttgtagctatgggtatatgaacgaggaaaaggtcgaggtaatcaagttgaagtttcttgagactgtctttgcatgcctcaataacatggccatggtctgaactccatagctgcaaaaccaagacagagagcattcgatctgaaatgaactgatatcaaaggtatgtagtagtttaacttaaagccgtttggaccttagtcgtaatgaagagatcctccctcttgacaagacctgtcgtgaatgcttctgtaagagcctcaccaacttcagcttcgttcttataattagctgaaccaagtaaccccaaaagatactcataaatcaggatacagaacaaagcaactcactcacatgcaaagaaacaaaaacaattgtctgtgatacagcaaagacttaagatcattctacgattccaaatttccaaatacttaaaaacccaaatcttaagacataatttccaagtaagattccaactttcaacaaattaaaacaaaacctaatattttattcacatatcctgacaaacccgaagcaacaaagatcagaaagaaaaggttttaagcagtgttaagttataccagcacagtcgagatgacgataaccgatcttgatggcatcgatgataaggtctcgaagctcttctttctccattctccaaactcctaagccgatgatcggcattttgaagccactgttcagtgtaatctccatttcttcttcttgcttctctcctcaatccgtgattgggtagatatctgctcagaattgagagtttcccagtatggtaagttggtaacgcacacgtcaatataaagtggtcatgattcctcactattcgaggcccaatgggctagtaccgttttttgtgaagcccaaactgttttacaaagacatgaatcaatacgcaccgtatgggtatatatatatacaagcaacgttatcacaggtcctcaaagtttgcatctttacttgggttgtgtctggaatcaattacttcctaaaggtaattttattggtcgggcagctcaatcggtggtttctgagttcttattcttctctgataatctcaagacgagcttttaattttgtaaagtttttagctttggtattgtttgtatcgatcccactctcaacttttgatcggaatcttctgttctggggatttccggtgaattgtttaggaataggtttccaaggatcttacttgggtttgtttcaaaaggtgggattttgcaagttgtagatggttcttcgattttgtaggtttctattcttctgctgagattcgaaattgaggtcttaggtttttgataatagcttgtttagttatctgttaaagtcactaactttgatgttccttccggtcggaattgttggccacaattgattattgaaacccttaaattaaagagtgccctctttttctcttttatgatttggatctcttgtaattgacttgtgtgaggtttctttttctgtaggttgccatttgttaacttactctgttagtctactaccaccaataactatggtaagtgtattcaaagctttcctttttaaccgttagtcttcactctagcttttatatctcgcacccttggtttgtttgtctaaacctttggaatttaaactcgatgcagtttttcgatggataccattatcatggaacaacctttgagcagagttaccggtgttatccggcatcttttatcgacaaggtttgatttcatctctctacttttagtttaattccctgataagtgaatctgagagtgctcttttgtaatgttagaatcttagtcgttgtcatgttctactaagtaagttctataagaaagctgagatctagtatctaatttctatttccttttctcttccctgcagccacaacttgaaagtggtgacaagagtaagtcttctatctagacaccaatgtttgtttccatctgtattgttcaagcctgaggttttaatttgtgttaattctatttcagttataatgccaccatcagcccttgatcgtctaggtatgctcctactggttttctcttttggatttggtctaatatttgtttaacttagaaacatatcaaatcgctaatattggggactttacagcctctttgcatattgactatccgatgctgtttgagcttcgtaatgctggaattgaacgtgttacacactgtggagtccttgagttcattgcagaagaaggcatgatttacatgccatattgggtaagaatcagtttcctctttgtttgtgaatcgaagtactctggatcatgtggacttaccagactgattgtttgcttctttgatataatccagatgatgcagaatctgctgctgcaagaaggagacattgtgagagttagaaatgtcactcttccaaagggaacttacgttaaactacagccccacacaacagacttcctggatatatccaacccgaaagccatgtgagtccgacttatttctaccctcttgtatttgagccctcatatactttcccacatcatgttgtttattgcttagagaatgtattattatatctaagttcttcccgttttctggctcgtagttgtttgatgtcactctttttatcttgttcccaatattctttactgataattgagtgaacgttgcagcttggagactgctttgagaaattattcatgcctaactagtggggatagcattatggttccatacaacaataagaagtacttcatagatatagttgaaacaaagcctgctaacgcaatcagcatcatagaaacagactgtgaggttgatttcgcacctcccctcgattacaaggagcctgaacgtcccacagcaccttctgcagctaagggtccggcaaaaggtatctatccatggacatgaaatcatcagatggacttactatcagcttcaagttgttagattctcatgtgttcttttctttccaaatttcacagctgaggaggttgtggatgaacctgaaccaaagttcaaccctttcaccggatctggaagacggttagatgggagacctcttgcctatgagccagcgccagcctctagctcaaaaggcaaacaacctgttgtcgctaatggtaatggacagtcatctgtagcaagtagctcagagaaagctacacgagctcagggaaagcttgtatttggggctaacggaaaccgtgctccaaaagaagctgctccgaaagtacgcattcagagtttattgataattgacaaaacaaaaactgtaatggaattgagagacaaatgcatatgattgttcatctcttaattttttttttcaggttggagctgcaaaagagacaaagaaagaggaacaagagaagaaagacgagcccaagtttcaagctttctctgggaagaagtattcattgaggggttgatcaactcacacaatgggtctactcagtctatttatgacctctcatgttgtgtactaaaaatacaaggaaaacaaataagtgaataaatctctggctcctcttgacgcggcttgttttctttatcagattcaatgcaactttctacaattctctgctcttttatattcttactgtaggatataagattctgagcacctcactaacataatgtgttcatgaatagcaagccatgctctgtagctctttaccaatgaaccaatgaccaaagaacatagatgagaaagatgctatgtctgagttataatatcctcaacacatctgtgatctctggtttctgagataacaccgaaaacactttttaccataaatacatttctcgagttttactcaaaaagaaagatatagagacgaaaagaaaagaatatcttgtttttctggggattttctgtgatcaaaaccaattttacaaagatgcttatgtgtgtcaccttattgcataatggctctgagtgcatccttcacgtatttatacttgaattcaaaaccaagctctttggctcttacaggtaataccttctgtccctccagaactacagtggcaccttctccgagcaaagctttgagtgcaaagtcaggaactggtagccacgatggtcggctaagaacactgcctagctgctggcacatttccccaagcctaaccggattcggcgcagtcccattaataactcctgccaacaaccagcaccaatagcattatgcttcccttgacctattcttaaaaggtaacatagaggacaagtatgtatgttgttacctttataagatggattagtgagggcctcgtaaattaagttcaccaagtcatccacgtgaatccaagagaacctacacaatgaattatggaaatatgatatgatcttcaaattcgtagagagacattcaatagataaccagaaaaagcatccaacgtttaccattgttgtccggaacccagaggtcctccagcaaacatttggaaaaagggtatcatcatggctacaatgcacaaaaagactttggacgatcagcagagtatctaagtccttcacaaacatattacattagcgtgtgggagcaaatagtaatacgcacccaaagctccaccgtctttgccaagaacaacaccaatgcggataagtgccactctaacatccttatttgctttcaatgcagttccttcccattctctgcaaacctaagtacacaagtacatgtttcatttaagcagcaaattctttgaacctagagttagatcgacatctatcaccgctaagttatgacagtattttcagggtcctagactaccaaaaaattcagaatttgcaagggaattaattataagacatttacctctgcaagatagtccttccctgatggactattttcgtcgaatactcctgtctcactagtacctgacagtttaaagagccgcgttagaattcgtgttggcatgatcagattaacgaatgcaaacttcgatggctccgcagataggattgtaacaaaccatagtaaccaacagccgtggcgctaactagaacggtaggcctagcttctgctggtgaattattgattaagtcaacaaccttcatgtggttaacaaaaatgaaactttttaattaggaaatctcctcaatatgtgaagcgtggagccacaatccaatgacaaaagacagtaatcactaactttggaggtgacacggatccggctgcccttaatctctttcttgatctgcaaagcaagcaaagataaacttacagaaaagaacaaacacaaactttagagaaaggtgcaagaagaaactaacctcgggagaccaccttgtactaataggcagtcctgccaagttcacaacagcagtagagccttgtacacagttcttccactccgattcttctgcaatcacaatacctgggaagtccttggctgaagaagaccattatgaagaagaagatgagtcagataaaagactttagaacataactaatcacatatgatccttataaaatagaagtagagtagtcattaccttcttaccaggaaatatttgctcagctttggatttagagcgtgttaagacccggatagcgtggttatctgcagaatgaacattggtgtcatgacttgaataccagtagaactcataagtgttaagaaaaaaaagtgagtctttataccagcacgaagtctctgaaccaatcgtctccctatgaatccagttgctccagttactgacactgtcatctgactttcctgaattgaaaaaagaaaaccaaactttgaacattctctatcaactaaacattttaattctcaaactcttaactattttcatacttgtagcttaaaaagatactacaatacaagtcttccgggtgaagagattgaaatgaaataccttctgggaactacacagaaccatgaatctccttgtccctggcatctaaaaaccaagtaaaaatccaaaatttgatcattcatgagtaatcaatcacgcaacaaattaaatgaatgttaacataaaaaaaacaaaatttgcatacggagaacgaacgagggactaaaagagcagaagagagagcgaaggaggaggaaagagacgttggtgagcagagaagctccatcgtttcgctgaaactgatcgttaacagtgagtggtggagacacatatacgtcgtattttgcacggagacaacttaaaggcccttattgggctttgttgatattcattattaaggcccatttagtcttatttctggtccatgtgtttaatctttgattgaagtctgagagacggagaggaggaggacgagagtgtgtgagaaagaggagatggcggcgatgcagtggtgcggcgcgatgacacgacggattatgatgacgcagcgaacatctgcagctctgaattgttcggcgaggtattcatcgttatctccggcgtgtgcagctccggcggtatcggaaatggatttgtgtgggagaggagataagaagacgaagaaagggaaaagattcaaaggatcgtacgggaattcgagagggaagaaacagaagatgattgagagaatcaaagacaagcttgagcttcccaggtctactccttggcctcttcctttcaagctcatctgaatctcttgttaggggttttctcctcttttgccaacaacaaaaatgtcgcctttagtggcggttctctctgtatactttttgttatgaatcattgaacttgtttgaaattgaaattggtcatcaatatttcctcttttactggtgaagtagcttcacttgggatcagaaatgtagagagtgtgaggtcataagctatatagatagcaacactgtgaattgtttgattggcttttccttctttctgcgattagagattcagtgaccttagacctttcaggtggttgtctaattagttggttgtaggaagattatagaactgaactaatctgatgctttggtatgaatgtttttgctgaatcgcttggatgaatcgatggttgaatgtaggataagcaagatatggcttgagagactagttttgactctcagattttgtgtatttatatgacatgtttgaaaacgcacctggcatatcacattggataatggttacaactagtttgatttcattggatgttttacatgcaacttagattaatagaaagttttattatctagtttgctattatcttggttgaatatctagttccaagatgtttgaattaagtaaaatcagtgacgatgatcatagattgctctctgaaattggattctaacaaattcgacagatattttactttttcctttttagccgctgataatgatgatcatcattcataggtttgttctgttttcttgagtcgggctttggattccatcttctgttgtttttacccaattccgaaactgaggccatgctttggaagtatgtaattgataccatagttataaattgtgtatagataaacgagtgtttagaaacgatcattcttttgggctccttgtgcttgagaacagtagttccaacccgtaagcaacattgttggaccagtgtcactcatttcaagagatgtttcgttgcgcttaaataggacaaggatcaatatcatattacccagacgacttgccagttaagaaaaacgaacatcagaatcagataatgtctgtttccaatattaaaaacccatcaacgcaaaagaaacagaaaaggttctcttcggctgcggtaacatctaagaatctttttcatcaaacacccattagctagaagcctagaagatttacacgtacaaaccttgaaaccattatatgaacgtggttgactattaaaattagaacagtgtggccatgcttttcctccagtttagtgatctccgcgttgtcggtagcggaggcgtgaagctcagaccaaacatctccttcatagctctaccttgctccacaaacctaaccagtttcgctacaacggctgcgctttcaaccgcatgagttatgtcattgggtttactccagagctggttcgctagctgcaaccgccgacgtttcgagttcacagcaatcccaaacttctggtaaagtctcttcctttcctctccagtaaacctcttcccgacaagcttgcttagcatccgtctctccctatgaagcgccttcaggctacagcaaaaccggaaaagcagttaacaaaacattagttgtttgctgcggatacaaatgcaaacgctaaaagtacttaccttgaagctattgtgagtgtctgtcctctttcaaaggcatggtttccttgagagaaactttctttcataaaggagagtcttcttagctctactccgatgtatatcgaatccgcttgatctcccgtgaagagcaagaagaagtacgttctatgcaccaacgagacatgacatgtctgccacagccccagaatttgttctctctgtctctcgaattcctccgaccagtttgtcattgtcccagacacctcttcctccatagcatccacaccaatgtccttcctcattttccctgaattctccggatccgaaacctgaatacaaagctccacataagaagttgcaccttttgtagcaaaagatatatatatcgagagtgtttttaacggtttttaccatctccttcagcccttcaacaaatgaccgtatgctggtgatacctccctcttctcccaccaacggtgttccaatgctgtgagcctcagttgaatcacttccacgagaagtcattgaatcgttcctcaacaatttcccaccagaaccaaactccaaatcaggaaacgcaaatccatgaccctccggtcttccacggtagtctgtctccagggcatcaggaggagtgcttgtgcctgtcatggtatctccacggctccaactcttcctcctcctgacacttctaacacttgacgggatcctgtgttgagcactacctgtttcaccgtttgcctctgcattgtgtcccaaaagtgtttctgcgtctgtcctttcttcactgtcgttattaatgtctctggtcgattcttccatctcaatgcattgtacctctttgcagtattcttctgattgatctcctgaatgcctgggcgacatttcctcctccagatcatcatcagagtgagacctaacatgagctcttgcagtcgacagaggcgttgacgtcccatctgatatgaaactggtcctgtctggatcaaccacgcctgatatctctgacactgaaccatcctcccacttgttggtacggttacggaaatgcggagttccagccttttaaggaaaaaaacaaacaaacaaatggttagctaaaactgctatcgaaatataaaagattattggataaactgtcattgaactgagataccttcgaagacgcatcgtgttccaccatcttcataaaatcttcaagccgagattgagcaatatcccgctgttttgtcatttctgcaagctgcttctccatctgcacgacatcaaagcttgatcagaataaatccaactaaacaaaaatcaaccaactcatgccaaaagatctgtggaaacaacttctgggttttcccaaaagcacaaaccttttgtatctgaagatctttctttctcagtgtcaccccacaatcgcagcttgaggttgcaggtgctgggtttctcagctcgctctcgagcctggctagctcacgctgtagttgcttcaccaaagccttgtctgacataacaacattgatctgtgctttcgtggtgacttccttggcacagcaagcaaacaagagagtgtttctagtctgctccacatgactcctcgctggactcagcgtgcagactatggcggttctggcattgccccccaagcacggctgaagaatgcgtgtgagtttggagtctctatagttgatgtgtccttgtcttccgttgctacatcatgttgacagtctttatattaatgcacattaagtttcagaaagacaaatatagatgcttgtaaagtcccaattttgttttgtcaaaatgctaaaaatagtatggttttagtgtcagccaaagtatcacttccacacctgagtttgcgtatcactgttcctagagtcagcaagcttcgattgatatgacaaccctccttaagtcttgcaccagctgataaggcctgcgatgcacgctcgctccccgccaaatcaataaaattctgtacataagaaacaatgagtacaaacaagatgattggcaaagcttataaccttaacacccaaaagaagataaagcagatgagtacataccacactcgccatgagagtggttgagttttccttgcctaagaactcacgagcagagctttcaactgtctacacaatgttaacaatttagataaggcactgagcaaaaaaagaaaggaaaatctttgtgccttagatccagtgatagaaaagagctttactagtttgataatttgatgagatcttgaacttctctcatttagtgaagtttcaccaatcttccgctgtgctgcaataagaaaatcaagaagtaaagaaacatgatgagagatatttctaagacaacattttatacagaataacctgagttgcaaatcctgagcaagctccataactatcagctcgttgtagtaacagaaaataggttgactatttgagattattaccttcacaaactgagataagttccttcaaatggttccaatctctcagcgtttcctctgtggctttttcaacggcggcccctttctaaatggaagaagaagaaaaacacgagaagagagtcacacaacattattaacaaaaagaactcgcagtaaggagagaaaaaaaaatctttcacctcagggtcatctcgtagcctcagtggtgtactatctgggctgagaagatcgcggatggcctcattgtagatctctatagccgaaaatttcacaacaaatgccctatcttcatgctgcagtgtccagtccaattagtgaaaagaggaatacatatcaaagtagtatgcgagaaaatcagccttaatttttggcagtaccttaaatatataatcaaatatgtcagccacagcaaactcagttataccagacatggtgtatgtctttccactgctcgtctgaccatacgcgaaaatactagctgggaaacaataagtattgaatcacttggctatccacgccattgatgtctacgtcattacaacattaaaggaaacttacagttaattcctttgaccaccgagagagcaacttccttggggccatcttcgtaaacttgtctggttgggcattcacctcggtacactctatctgtcaccaaaatgtcaaaagagaaatgggtatctaaatcaactcatggatgcggtgtacaagtgtgaaatatacagggacaaggccaggtagatttaaatttatagaagaggatagaacagttcaaagaaaccaataattgaagttgatttaagcacatagaagaaatttgaactcaaaacaccattattgcgattcttaccaaatgagtatgcagaaggaaaagttgagccctcacgcaacgtgtttctgtacaatacggtggtgtcgttgatgcattcccagtccgcagcttcattagccaagatctctttctcgttcagaggtctcagtctcaccagaaccaatatcttctcttcccgggcaacatgcacctgtgtcttctccattttcttcagctcttctccagcaatcgctcccattgctcactggtcaaatcacaatgatgcacaatgagctcatttcattcatattttaaggaatgttgaaagctatcaagaacagaatagatctgaggagagaccaaaagagtacttactttccaactaacacaaccataaagaaatgataaagctcagaaatctcaacttaccaaaccaaaaacaagaaacatgcctaaaaaatctcttagtagtgttccttaaaaacagaggaaacttgaacagttcaacaaagcaagctcatagtacgtatgtcgattacactgtatttaaacactagaattaagaatttcttcaacacactgcttaaacagaaagaaaaagaaaccgaaagagagatgacttattacttattaatagggagggatgttgtaattagaataacaaaagagagcttacttagaaggtgatcaacctttaaactgaagaacaaacaacaaaaagactaccgacttttttttatctttagtggtcacccactaactatgcttgaaaacgaagtcatgtatcatcaatctaaagtttctttaaagaaaatataagtaacaaaaggacccacaaaaccataccttctctgtttaaacgtatctctatattataatggcaaagaaagaactgaaaaagaaaaagttatcatcatattcaaagtactttgattgtaatcttacacacgcaaaagcagacagaacaaaaaaaaaagagaaaggaatttaatatatagaagttgttgtatactcataagtctttctcaacagcgcacttgagttaatcataataatgaaacaaaggaaaaacaaaagtctaagttaacataaaaagaaatcatgactaattcaatataataatagattttgacttgaatgcaaaataccccacatcttgataactaagaaactctaaatcttctcttgttcatgtacaatgtgtacaatattttgtgtgttagatgttgaatatgagtgagagaggctttataccttgtgagatatgttgtcttcttcctcaaagtgattcttcagaagctcctctaatctgaaacatccaccacagatatcagcattaaaacacacacaagactgattttgaaagtggaataggaaatataataaaccctagatagaaatttctgaatctataaagcgcatccaaataaaaacgccaagtgttctccactaaaatttccaaaaatagcaatctcgatctaaaaaatagggaacacttgacccaaaataattcctagaatcaagctggtcaaaaaaatcagataaagaaacaacacttcacccaaattaagaaaatcagaaatcagaggagaaatttgagaaatcaaggtctctctatctaatctatgaaacagtggaatcggaagctcaaagaagaacccaggatctctatcacacattacacatagtgcgaaaaatccggagagaaagagagagaatcacagtacattaccttcttcgtcttcgtctagttactccatcatcatgctgctgcttcgtcgtcgtcgtcgtctatatctggaaattggccaatggctctctcagtgtgaaggaggagggaccaatgggcattgatttggtcccgcaaatctcgtagcgaagcgcctcttctctctctctctcctttgtatttgttgaaccgagagaatgcggtggaaggaagataccttttgaaatacctaaattacccctgggaacgttgtcgggtatctgagaaagccctgccacgttggcttttcggttttttaaatttattgcgataattcttctcagttacgcctttgacacgtggcaagaggaccgctcctttatagccgttgaaaggtacggagcccaagtgtttctaaactctctcatccatccagaggctctcgaataaattaaaataaaaataacattttattttacaacttcagctttattttacaaccttttttgctcatgcactgacatagcattttaccaaacaaacgtgaaattagttaaatagcgaaattcacggatcacttttttagttttgtcggtccacttattatagaaactagaaagtatataataaaataaacaaggaagaaaaaatgaagtcaaaagtcattaaccatgattctataacctctcatttttttcccacaagtcataaaccctaatcaactgtaattaatgctccatgtgctaaatagtaacataactaacattcctattttatcagcaagcccaatttacatattaataacacatttttacaattagcctcttgaaaacaatgtacaaaaagtaaattggtaacatgtctacataaaaatttagtccttagattcaatgttttttttacctaaaccgttaaatttagatccaatgtataattggtaacatttacgtaaactttgacctgaaatctcatggtctaagttggtaagtgagaacaaaaaagtgactaatttgctggtaaaaaaaaaaaaaaactgtcatcctcgtgcagtcatgcccatagtttttggatatcacaaaagcctgacacgaatactatcgaagaaaagaaaaaattacgcttaaatcttcaatggcctcacacataaagcccattatactaatacttgctcagtactcattgatttgttttatgggcttaaaattttgtattcttgaaattttgtacacgagtatgaatcagaccaacttctgttatatacttatatagtttcaattttaagaatatagtttctactaagtactaacaaagtaacaatgttttagaaaacctaactctaaaaaatattgtttggctgaccaaattgctagcatttagtggtatttattgatgaaaacaatattgcaaaattaggaggaaaacgatatagatatgtggttgcttatactttttacatagaaacaaagaaaaaaaactgataagaagagagccaaaactaataaatgcaaatggtcaatcaaggtctaaaaaaatctattgaaccctctataaatatctaaagatcattgattggaccgacgcagaaacattttcagaatactggaattgagatttttgtccaaaattgaatatttgggacatagtaggaaagaaaaaaaaacgaaaacaaacctactaggaaacgataattacttcttgaccaccagtttcagtggctgttgatagttttgaccctaccatttctgttttccattctcgtgtggctcttatatttccttgttgttgtattttgtcactattattactaaaactagcctatcgtaaaagacaccatttctgttacaccaatgataaataacgtggaattgattacaaattaccaaaaatacaaacatttccgtggacgagattagacgaactcgaacattctacaaactttgacaaaaggaaggaaacatcacttacaaagtcatttgtctaatatagtttctactttaccattgggtccctagactctgaacctaagttcgattccaatatatagatatgacttttcagttatgtaacaacatgcatttgaatcaaatatcaggctttctctttggattttcttctgaatcaacgagtaccatttggtaaccttgcctatacggctatacatgtaataatcgtacatgcatggtaagtttatgtaaaaatgaatacaatttctttactgtggaagtattgcctaaagtgtcataaagactctaatccaaagagaaggtctcagcttgtgaaagaaacgaagtcacgagaggcgcacgtgctttgtcatacagctcatcaaagctagagacgtaattaacctcttgccaatggttcaaccattttgtctctttgtctctgcatttgaaacagagtacggaagaagagagaggagcgtggcggtgagtagagttgtataaaggagaagataagtgagacattagggttaagagagtaagtgcaagagaggcagctgaaagtttattcagtcttgtttctaagggtttgtgtaaccaaggctttctagtggatttccgggtaatctcggtccagacgtagcgttcatcactgaacgtgaactgggttaacatttgcttgtgtctgttttactttctttgtctaaacacacgagtgatcgaacaaagagagatttagtgagagcttccgcataaaacagttaaagattcaagctttttttttttacatcaacaaattggtatcagagccaggttgagtttaaaggttgaagaaaggtttgaactttataaagtttgaagctttggtgataaagcaggttcagacttcataaaggttgaagctttggtgttaaagctttgaactttcttactaatcatgacttctgggcattcggaggtggaaaagttggatggagaaggagattacgtcctttggaaagaaaagttgcttgctcacatagagttgctgggtttgttagaagggctcgaagaagacgaagccattgaggaagaagagtcaacagctgaaactgattctttgctaacaaaaacagaagacaaagtcctaaaggagaagagaggaaaagctagatctacagtcatactgagtctaggaaatcacgttctaaggaaggtcataaaggagaagactgctgcaggtatgatcagagtgttagacaagctgttcatggctaaatctttaccaaataggatttatttaaagcaaaggctttatgggtataagatgtctgatagcatgactattgaagagaacgtgaatgatttctttaagttgatttctgatctggagaatgttaaagtttctgtaccggacgaagaccaagccattgttctgcttatgtcattacctaagcagtttgatcagctcaaagatactttgaagtacggcaaaaccactcttgctcttgatgagatcacaggagcaatcagatctaaggtattagagcttggagccagtggaaaaatgctcaagaacagctctgacgctctgtttgttcaagacagaggaagatctgagaaacgagacaagagtagtgaaagaaacaagagtcaaagcagatcaaagtcaagggaaaagaaggtgtgttgggtttgtggcaaggaaggacattttaagaaacaatgttatgtctggaaagaaaagaacaagaaaggaaacaactcagagaagggagaatcctctaatgtcataggacaagctgcagatgctgctgctttagcagtaagagaagagtcgaatgcagacaatcaagaagttgacaacgagtggataatggacacagggtgctcatttcatatgacaccaagaagggactggtttgttgagtttgatgagtcacaaaccggaagagtgaagatggcaaatcaaacatattctgagatcaaaggcattggaagcataaggattcagaatgatgataatacaaccgttcttctcaagaatgtgagatatgtcccaagtatgtccaagaacttgatctcgatgggaacattagaagatcaaggttgctggttccagtctaaggctgggacattaaaggttgtcaaaggctgcatgacactacttaaaggaaagaaagttggtactttgtacctcttgcaaggagttgttgtaacaggaaatgcaaacgcagttacaagctcaaaagatgaatcaaagatatggcacagcagattatgccatatgagtcagagaaatattgatgtgttgatcaagaaaggatgccttcaagctgaaaagataaatggtctcgagttttgtgaagactgtgtgtacgggaaaacacatagagttggttttgggtctgcaaaacatgtcacaagagagaaacttgagtacattcactcggatctttggggagcgccatcagtaccaaactcactaggtaattgtcagtactttatcacgtttattgatgaccttacaagaaaagtatggatttattttctgaagaagaaagaacatttcttctcttgtatgttgatgatatgttgatcatatcaaagaacaaggaaacagtcaaggaattaaaggaaagactgagttcagagtttgaaatgaaggatttggggcctgcaaggaaaattctgggaatggagataacaagaaaccgagaagaaaatattttggagttatctcagagaagttatctgcaaaaggtgttaaagacattcagaatggatgaatgcaagcctgttaaaacaccattggcaccacatatgaagtttgtagcagcaacagagactgaagcagaggagcaagctgatcaaatgaagtctataccttatgcaaatgcagtgggaagcataatgtattctatgatcgggtcaaggcctgaccttgctcatcctgttggagtcataagtaggtttatgagtaaaccattgatgaatcattggctaggtgtgaaatgggttctccgttacattaaggggtctattgattcaaggctgcagtacaagagagaaggtgattttgtggtgacagggtactgtgattcagatcactctggagatcgtgatcgaagtagatcgaccacagggtacacattcactgtaggagggaacatagtaagctggaggtcatgcttgcagccagttgttgcactgtcatcaacagaggctgagtatatagccttaacagaggctgcaaaagaagcatattggctaaaagacttgatgaatgagctgggatttaaacaaggagcggtagatatccattgtgattctcagagtgctatagctttagcaaagaatgcagttcatcatgaaaggacaaagcatatccagagaaggtttcattacatcagagatgcaatcactgatggagaagtgaaagtgctgaaaatatccacagttcataatccatcggatattttcacaaaggtggtaccggttaacaagttcctgagcgcgttgaagaagctcagggttacaagtgcctgataagggatcatggtccgagatggaaatcaagttacactagaagggaagcaaaggaaaggttgacactaaggcaaggtgaagttttgtggaagtattgcctaaagtgtcataaagactctaatccaaagagaaggtctcagcttgtgaaagaaacgaagtcacgagaggcgcacgtgctttgtcatacagctcatcaaggctagagacgtaattaacctcttgccaatggttcaaccattttgtctctttgtctctgcatttgaaacagagtacggaagaagagagaggagcgtggcggtgagtagagttgtataaaggagaagataagtgagacattagggttaagagagtaagtgcaagagaggcagctgaaagtttattcagtcttgtttctaagggtttgtgtaaccaaggctttctagtggatttccgggtaatctcggtccagacgtagcgttcatcactgaacgtgaactgggttaacatttgcttgtgtctgttttactttctttgtctaaacacacgagtgatcgaacaaagagagatttagtgagagcttccgcataaaacagttaaagattcaagctttttttttttacatcaacatttactaataaaaatgtatagttgaattttcaatattatatgctccaattgatacttcagaatgtgttaagattttcagcttagcaaaagtacacaaaaactatagtagaatagttcaaaaaaaattacaataacaattaatgataaattttgagaccatttttgacactgcaatttccttttaaaataattaataacaaattaacaatcaaaatggtgtatacactcacctaccattcaaacccataatttcatatagaacatattcctaaaaatgtgaaaaaattttaaaagattaaaaaatatttgacaaagagtcaaatacaaaaaaaaaaaaaaaaaatcctatctatgtttaattttggccatcagaagggaaatcaaataaaggggagatagagcgagtatacatatacaagctactcgcagcgtctgcaaattcatctatccatcatatttctctgctgctctctgctttcttcttcttcttcttcttcttcttcttcttcttcttcttcttcttagtttgattcaaaaaatctccttcctcttcttactttatctcgtattatccattaatcctaaaccctttagtctctccatcttccgcttcaacaatcagaatttgggtttggcgaaagatgctaactttgaaagtgagactaatcgtttgagtaaaaaacatgcgaattttgtgtgatgcttgtgagagcgccgccgctatcgtcttttgcgccgccgacgaagctgccctctgttgctcctgcgacgaaaaagtaaccacctttacctgaaaaaaatctcatttttcttaaagtaacacttttatctcaacaaatgcaaaaatttggaatttttgagacaatatctagttgaagtgctaaatttatagattttgaggttattataactcgaacatggccaaagtagtaccaaaagttgtgttttgattgttaaagaaacattctagtgattttagcttgtcataatttgaactttgcatatagcagttctctggtgatacactttatttacagttacagtcactctattgaagctggaagagctatgagactttttgttatctgcaatggctttgattgaggacgtggttagatataagttataagaaagaaacatttttgtttgtgtgtttaggttcataagtgcaacaagctggctagtcggcatcttcgtgtaggcttagctgatccgagtaatgcaccaagctgtgacatatgcgaaaatgcacccggtattgatatgattcctctttctttagtgtataagaggaagcggaagtttcagtttttgacatgtttgttttgttgttgatcgatgaacagcattcttttactgtgagatagatggtagttccctttgtctacaatgtgatatggtggtacatgttggtgggaagagaacacataggcggtttctattactgagacagagaattgaggtttgacttttgaaaatgcaaggatcttgaagcattcttgatttgtggtattgactgttctttacaatgttgtgttcttgtagtttccaggcgataagcctaatcatgctgaccaactgggactacggtgtcaaaaggcttcctctggtcgtggtcaagaatcaaatgggaatggtgatcatgatcataatatgatcgatcttaactccaatcctcaaagagtacacgagcctggatcacataaccaagtacgtgtatcttatctagatgaacataatcaatcttgcctcagtgtctctaaagctgttttgtttgtgtttcaaggaggagggtattgatgtaaataacgcaaacaatcacgagcatgaatagtgatcgcagatacacaagatcaagtaagaacctatgcaagaacagtatctttacagggaaatgtcttattttgttttgaagaaattagcttagaggaaacaaatatgttgttttctgaatttcttctcttttcctttcttttgtgaaatgatcaattagtggataacgattcttcagagttatatctcaaatatatgattttctctcttctcacattcagacaaagctttaatagaaaatagtaaaatggttagccattaaaggagatgccttcttggctcggtttaagtgatcaccatgagccatgactattatcttcttcttctctctctgattagttttgttaactctgagttataaacatgagtaatttgagagtcatatgatcttgaactgcaatctctcattactcaagtctcaacatactgtttcgatgtttctcgctccatttttttgaacataaattgtaatgtcattttcctgcattagatgtgattttgagctcagagagcataatgttactagtttcataacttgtaaagacagagtttttgagtgataacaatgatagaaacagactactaactcaattattagtagtaacgagtaggtactaagatattaaccatgaagaaacaaaactagtctcacatgataacacagaactgacttttatacctgaagaagagtataataactcaaatgaccagaatcaagctcaagtttttgagttttgatctatggaaccattattacaaatagcttagtaggtgtagccttttacaaacataccctccttggcttcctcagactcgccttctccagtgtatttcccgagctgagccagcgaattggctttggctctggccaagagaatgtcctgagccgccttcacgttctcttccttgcctccccatgtcttcaagcaagtgttctgcaaggcacgtgcgtaggagaaggacacgtgccatgggttcggtgcctggttcattgcgttcaagttcaaggtcgcctccaactcggactgtccaccagacaagaactgcatacaatagatagtttaacataaatctcaagcatagtttcttcagctgcaaaagtttacagtatcagagaaaacttgccatgattccggggacagcaggagggattctgttgcgaaggagcttgagagtgtaggaagcaacctgctcaggagtagctctgtctgtggcctcagctcctggagtaaccatgcttggcttcaggagaataccttcgaacatgacgttgttctgagcgaggtagaagaagacctcagcccaaaccttctctgcaacgtcgtatgtcctgtcaatgccgtgttctccgtccaacataatctctggctccacaatcggcaccagaccgctgtcctgtagaacacaaactcaaacgcatgagtatattcaagacagtaatggaactcagaaacagcggtgcagttagaaatagatagtacttgagaaatagctgcgtagcgagcaagtccccaagctgcttctttaacagccaaagcagagggtccatttggaatgctcacaacagtacgcctaatcatacatacatggagctcaattaaaaaaagacaccatttgacaaatatatgatattgattctgcaatccgagcatatattaacgtaccatttggcgaaacgagcaccttgttggtagtaagcagcggtgcgagaggctaaaccgtcaagtccttggcaccatgactcgtcgtaagacccaacaagtggcaccaaaccctatttatattcattggaatcgaacaaatataaaaaactaaaccagaatctgtttgtaaaccggtcaaatctaagaatagaccaaaccggcattttgctagtccaaaacagactaactattccaactcgataagaatataccggagctaaaccgaaatgcataaacctagctaggtttactacagtagtagtaccttgtcgactttgatgccagggacgatgttctgctcgacgagaacatcaaccattttcttgccatcagtggtggattggtacagagtctcctcgaacaggatagctccggagatgtactgtccaagtcctggagccgacacaagcaacgtcctgtaagcttgacggttagcctccgtgttctctagcccaattgacgccaaacgctttccacaagtcgcgttggactcatccatcgccataattccgtgtcccggagacgcgattgttttctgcaacccatatcttaatcattaaccattgaaatgaaaatgaaaatgataatgaaatatacttggattatagagttaattacagcggttttgacgagctcatcggcgtaagcagaagcggctcggacggtgagagcggaaggtgccacgtggctgcgaatagctgagacagaggaaggttgacggaggagaagactctgtcccttaacccaatcagatttcaccggtgaggctttgagcatagtcgcagtgcttgacgccattgttgctagtacttgcttgctagtgagagcttaaaacgcttgtaacgcactacgataaacaatcgtgcttttcggtggtttgatatatagagactcaagtgacatacaaagattggataattgaggttctcgtgagccggctgacgaggatttgccacgtggatgatgataatattttcagataaaatgccaaaaaagactaaaccatatgataaaaacctctcagaattatagaatcaaaccattaaaaaaaataaaaaaaattatttagcaatccgagcataagagaaatcgacaattcccaacaaaattcatctaaaaaactatagataacaaaaattacaatgagagattagtttgtgaggtggtgaggagttctcacaggtttttaaggctgaggttatgtttggagattatcatcagatattgtgaagtctacatcaacggttcaaggcatgccatgtcaactcccacgttaattcttgtgccttatggcgaagatgtggtactatcatttcttaggtgtacgttattcattcaaagtaacttggagatatcacatttataatggcgttcaaactagctatttgactaacggagactctcgagttttagggagagattttctacacactcgtgagaaaaaaatatattcatttactctttgaatttgaatttgtgatagatttctctcaatttttagttgttttacgccttggcatagttatctattacttcttttgatctcgttaaatattttgtccgtaacaagaatatatgttgtttcttatttttctttcaatacttgcgaattgtcttacatctttaaagtgaatgtgtgtttttgtaatgcatcaaaattgtttttttttctttgtaaaatgaaaggaataaaccgaaaaaaccaaaatcaaaccgaattacattgttttaaaatgatttcatttttttttgtaaaaacccataaaccataagctaaggaaactattttttttttgggtgcaactgccaaacttaactactacatactattttaaaactagaaaactataaaaaccaaatagtaactcggaatgcgcactcctaaactcaagtttacaagtcaagacaagtcataagtgaagacaagttgatgatgatacatcaaatatattttagctttatagtttagagcttggtatttcaattcggaagtctttattagagcacttctatcgataggttttagatggatatctaagctaataaaaatttgaaaagaaaaaaagttgtagagagagtgagagagactctcttaaatgagatacctctagaacctctccaaacaagggtcacatgattaatgatttagttcttttaaaataaataaattttattatataataaattattaatataattctgataaaaaactttttgagtcattccactgatggggattctcttagatactactagattttgatgaagcaacttattaatatagttttgatgacatcactttttatatgaatttaatttggactaattgtgttgtaatatagcgaaaaagtatgaactcaaagcgaatagatggaatgtgactgaacagttttcctagaggggggaacttttctcatatccatagagatgggacaaagattgtagcaaaattgtctctcaaattcaataaccgaacctattatatttattttagttttaagaataatttatattagttttaaatctaaattataaaaagaaaatcaattttaatttgaatatacaaatattatatcgagatgataaaaaatttaatacatagtatgaaagaaactgaaagatattattaatttatttagagattctttgcattattatgagatatttattactacaccattgaaaggttggacaaagtgctgcttctaaagatgcaattcatgtgcggactgcggactaaatgatcaagtggcaaatattcttaccatgcattgttccttcatcaatttgaacatcttaaatggagaatgcgtcttatacatatctttggaagctaatcttgagaaggcatattagagtcgttcagtatggtttataaattatgaagtgtcgaaagcgaatacaaaccgttgcttgcaatttgcgtacagttttaagacttttagtcagaaacatacaaagtagggtcatatgtgactcgatgcatattaagatcttcttgtcctttgtctccaacatgaaaacaacgcttttacagtcacacattgccttaccaattttcccactttctgtttcttaattattttggttctctttgcttttaaaatctcaatttgactaaccggttaggtgtaccaatcattagaccgaatgcttacatgagtaaatgagttcacaggaaacttgagttgtgttgttttctatcagttaatcaacgcaacgccgagaagctttttcaggggtttggtgcgttgaatttgtggatcaagaaacaatgcaaattcaatgcaaaaccctaacttttacagtttcttcgattcctttaacccaaagctaccattcccatcttccctcactttacggtcatggaatccttcattcccgagtttcaggagctccgctgtttccggaccaaagtcatcactgaagctgaacaggtttttaagaaactgtgcaagtacgaatcaggagcttgttgttgatggagaaaccggaaatgggtcgatttcggagctccaaggagatgcagcaaatggttcgatttcgccggtggaagtggaagcagaagtagaagaagtgaaggtagatgatttggcgactcagagcatttggggacagatgaaagagatcgtcatgtttaccggacctgccgcgggattgtggctatgtgggccgttgatgagtctcattgatacggcggtgattggtcaaggaagctcactcgaactcgctgctttaggtatataccatagaatctgagttttgcttgacttgatttcataaattgttggttcttggcttttaattcttcaacttgaattggtctctttgctctttgttgtaatataattcaagtcaagaatgatttatggacaatgttttaccagcttaatcatacaaaaagaacaaaacttttagcctcttttctgttcagttttcgcttgtctctgtctaacgagtgaggagcttttttctcttttcatcatctgtgtgtaaccttgaaatctaaagtgggcatgatgtgctggaatagcactaacctttctttagtgacgtatttaatggtgcttgagttttgtctgattagtatataatttactgaaggaaaataggatctttaggttccataaagcaatgtagctttcttgtttgattggcaaattcgatacaaagatgtttgtaagtttcaggtttcagtcatggctttgattactcgtgactcctgaacatttgattttgatttcatattataccttggatgtgttacttgaactgggaacatccgattattcttccctttactatgttccacgctaggttcactggttgaagtaacagtaatttaaatttcactttggatgaaccaggtcctgctaccgtcatctgtgattatttgtgttatacgttcatgttcctctcagttgcgacttcaaatcttgttgctacctctcttgctcggcaggtcagtttatcattcttggactatgaatttggcctataataccttttattcattaatcataagcaatttccaggatattttccaattggacacagtattagtaacttctaatagaatagtgcttatgcaggataaagatgaagtacaacatcagatatcgatcttgcttttcattgggttggcttgtggagtcacgatgatggtgttgacaagactgtttggttcctgggcactaactggtaacaagtgatctttgtatctgaatagaagtttatgactagtagcaaatcaacagactgttgactgttcagtcttctttcagcttttacaggggtaaagaatgccgacattgttccagcagctaataaatatgttcaggtccgtactatatcttagtaaactctactgtgggctttggtgagcttgttggctctatgtgtatagaaaaatagtatggcttttccttgtgaacctgtctggagatgtacaacttatactaagttcgatccatgctaatagccttgaatattgttgattgtttttccatattctcagattcgtggtttagcatggccagctgttctcattggatgggttgctcaaagtgcaaggtccctttataccccattttcttctgcgtcttgcattttttgctcttccaaagtttcagcattgtcatacaattctggctgtgggatcttaatagcctgcaaggattatattccactgttattgtggtgtaacatcctcttttcttatttgtttgtcttagtcttggtatgaaagactcatggggacctcttaaggctttggcggttgctagtgcaataaacggtgttggtgatgtggtcttatgcacctttctaggatatggtatagcaggtgcagcttgggcaactatggtgtcacaagtaagctgaaatctttaagattccaaaaagttctgattttggaactgaaatcttcttgtctgattcaatatcatatcagctagttaacaatatggtcataatgcgaggtgttttaggttgttgctgcttatatgatgatggacgcattgaacaagaaaggatacagcgcattctcattctgtgttccttctccaagtgaacttttgacgatttttggactcgctgcccctgtctttataactatgatgtcaaaggttaatacttcacttgtatctatagaattgccacaagatcgtctcttccttatctgaaatttgtgtcttgtcccttaggttttgttctatacgctccttgtgtactttgctacatcaatgggtacaaatatcatagctgctcatcaggtgatatgtcctttaatatctcaccaccaaccatgtttctgatttgagttttctctataacttctttggctcttttggtctctaggttatgcttcagatatataccatgagtacggtttggggggagcctctctctcaaactgcacagtcctttatgcctgagcttttattcggaatcaatcgtaatttgcctaaagtaggtcataagttgtcagttgaaaccatttatttgcacatcagttttatttttttgttttactgttgcctaaagcaactctgcttgtactgttgtctgtaggctagggtgcttctgaagtcactagttatcatcggagctacgctaggaatagtagtcggaaccattggcacagcagttccatggctgttccctggcatcttcacacgtgacaaggttgtcacatccgaggtatatctttacagtttttctcatatgttcccgacaacaaattttgaagaatgaagagtttttaaacagttattcgtttcatattctaacagatgcacaaggtcataataccgtattttcttgctttatccatcactccaagtactcacagtcttgaaggcaccttactggtaaatcatacttttgtgtctcagtacatttctggatcacctgcaaacctaatctagaagaactaagactgttgtatatgaaatgaaggctggaagagatcttagatatatcagcttgtcaatgactggatgcttagcggtcgctgggcttctacttatggtactcactcctcttatcatcaatctccatcactctcttgaattctaaaatagattttgtaactctttccttttcgcattgtttaccaatttactaatagcttctgagcaatggaggatttggtttgagaggctgctggtatgctctcgtgggattccaatgggtaaaaattgctacgcctttactaagccacattacccagaacttcatatatcttttgctcttcttaaatctaacatcaaatatttcaggctcggttttctctatctcttttccgccttctatcgcgggatggtgtactgtactccgaagatacaagccgatacgctgagaaagtgaaagctgcgtagctcagtaagtcaccgtatacctcacaagaaaaagtataatgaacagagaacagcttcattcagttgtagatcaatgggttactctgtttcaagattgtattctttaagaacatgaaaatgtattcgactgaatagaaaagtcttggcattaataggccctgcttcaactcctgtgattcccctgtatataaaagatgatacaaacaaactgttgctactcttcattccgttttttgtcctcgtcggctttcaatttggtgggactaggacgataaagtatcacggtccgcgcaatttgcccgactgatactgaaccagtggcttcctccaaacgtagaatcatgtcctctagctctccagggcatgttctgtgtattttcacctattgattgaatcgatcaagattaagtcaagtctcaggattggacttcaaatacatttcattgatcagacagcaactattccaatgtaaccaccattccactacctaaacccaaatcttggagagattgtaacaataaagtttatacctttaagagctcgttcttctccagcgtctctacgaaggacaagacgactgaatccgtaacgccagacttgcctacaagttgagatttcagtttgtcacccaaatgatgtgcgtaagaagcaagctttctcttctctttcgcagacaactccaaagccgagcttcttcggttttctctcatggacaccattgtaagttccgacccatcttcttggccatcatcgttaatctcgttaagagaggctactaaggacacgttgtcttcgtcttgttctgattcatcaacagaagagaaggatttaggtacgaggagaggagagaagctgatataaggacgtggaagaggtaaagaagaggagatccacgcatgatgactggatttacggcctaatagagacacggaaaagggtctgaggaacagacagacaggagatgttggtttgcgatgtcggagaagatggtggatcaagttagtcaaagtcgatgattttgcagtcgccatctccggtctcctcttctgaactctgagatttatgaggttttataatatcatttcaattaataatcttttttgcttgaaattatcaaaagggtgtttggtctagtggtatgattctcgcttcgggtgcgagaggtcccgagttcgattctcggaacacccctatgcttcaattttgtaaaaaatgttgaaatcgacacgcatgattcacaaaaatgttgttccataacataatcagtacattcatacaacaacataatcatttgtctaacaagaaaatgtgttcacatgctctggtcttgaaaatgtgttctgcttcacaaaccactgttctgttttgcgccctttagcgcaagaagagaagctccataggaagcttcagtgtggacggcttttttcacaggcaaacccaaaactcgctgccttatctttatccacttgtcattcttggctccacctcctgctgtcaacacttcctcggcctccgttgctcccaactctttcagcaacttgtagcctttcccctgatagtgttaccattcaacaccatcatgagtcactcttagttacttctcatgttcaaaccaaacttacttgatcgttattggtaactaaacaaaaactatattaagcctgacacttgtgattcttgaagagcatggacttagaaatataaagttgatataaagtaagagacctgctcagatgttgagttttataaaaatcattttcttctgactgtttccatgagtcatgtgaaactcagtagcaacagcttggaaatagttgttcatacctcaatacgtgcgattgattccaatataccatgcaagaattcaacgtcgctttctgggcgtggaagtaatctgcaatatgtaaacatgttttccgatgaatacacacagaaagaaaagtgttttacgtgctttaagggacgtttgagacacctgtgagaacatgagaaaggcagacaaacctgggagccaagttaggatcagcaatgggaaatctttcaccgctgctttgcaaaggatagtaatctagaggagatccgaccataggattgatttcttggctcagtctctctaactgttcgtcactaaagagctgtctgagaatggctccaccagtgttggaagctcctccgaccaaccatttgtcatccaggcggtggctgtagactccatacctcgcatcatcaactcttttggtgctgagaagtttgatggctaaggtcgaacccaatgaagttacctttgacaaataatcatagaaaagaatcatttcatggtacaaacatcaatatgtccctcacagtacagctttttcacatgaaacggttaagtgtatagctgagatataattagcaatccgaaagtattgcagagttctcactgctttcccaggttcagtcgcgcgtgctgcaagaaatgcagctatgctatcagtagtaccggtgcagacaatgcaatcatctggaaatcctggtcaagccaaaaagaagattgaaaatctatttttcttttcatcgatttttttttttagacatcagaaatatttaccaaattgccttgtaaagctttctttcagattgcctattgatgttccaggagcttgcaccttaggtaataactgagaataaggctgacctagcaaccatgatggatatgattcactctcaggatcatagcccacctgcactcaaatccaaaataggaaagcactttgatgagtcacatttccttgtttagcagcctattaatctacactttctgcctaaatgcagtaaatacttcatggtgtgttaccttcaaggcattgttgtaatctgacactccgagtctaccgtgaagtaaccacaacaaccagtctgcctgatgcagcaataccgctgattctctgtttggcacctcagtgttccaccatgagacaagtttgcacaaggtagaagtaccagagcagactgtatggtttgctggcgctatagacttgacctctggcagagcatcagggcagctctggttgtagagataaggttgacacagaacttctccactctcactgcaacacataattgaataagcaaaggagatttaaacaacacattactgaaacatcaaatcctctaatgtaaatggaatacagaaacagaaaagagaagtgatccggtgaattacatgcctgtttaagatgagagtagttgcagaagttccatcaagcgaaatggatgagacgagggagcgaactgtgacgggaatgtcctctagcaacgaaaaaagagttgctttccatgagcttgcccaacccatgctttcttctttctatctagatttcaaaacaaatgtctcagtccatagctttctcttgattttgttcataaagcagctcagaaattgtatatgatatatatacaaggatacttaatgcaaaagttttaccatgaaaggaggatattctcttttgccttgtgctttaatctctccttgctcatcaataactgtaaatcgacctccagaagtaccaaaatccatacccagataaagtttttcatagttcgttcctttattgccactcataactctgaaatcggagtaaaatctagttctgggtagaggaacactccttgaactagagtaaaaccctgagattaacattatcataaatgattcagctcctaaaacccctaataaacgccattatatcgaaaaatcttcatgtttacctgtttgttttggagattggaagagctcaaatgaagatatctgaaattgacgaagaatcagcatctctcttttccttctgaggctgctttcttctaaactccatagataagggagctagcaagttcgtgaccgttggatttctcgattttttcctcttgatttgaatttaccattttagccttccatattatttttatttattttactccactcaacaccaagcagttgggctgcacgttctctggtcatctaacggctcagattatgggtgcggatcttcatatttggacccttgtaggcccacgaccaataatgatgacaacaatccctctctcctggcaccatattttgttccacacaagttttctttaaaaaatttacatgtaaatgctatatataccaagcaatttttgtctaattaaaaatttacagaatattgaaatcatagcactaagacgcaaaactaaaaataacaacattccatttgcatatgaaccaaatgggtcgtggtctagtggtaattcatgaagatgaaggttggttttggtgtgtcccaagtactgttgatatccttattcattaaatcggaacgtctaaaaatctgtctttggatacttgggaaaactacaaatgattttttgctgaaaacatgacttggatttcattgtgaaaagcatgcacgtgtgagccagatgtgcggtggagctcaagaagtgggagatatgacaacttctttgccactgctactttaccttcgagaagcaatcacactctatatacgtaaactacttggtattagggaataaggacccacatattcaatgtgtgtgtaacataagtgtttaatattatagaagcaagatatacgtgctcgtaataactccattttattggattactttctattttatttttatttaggttataattttgtcttttgcaatttgcaggatttattagtacaccatctatttaaggataatgtttcctttcatttagccattattaaattcagtactgaatctattcgacatgttgcagttaagtagaatctaacataatgtcgcaaatcatgttccattggaattgacgttttttaacattttgagtgacccttaagagaaattactttaaatctgttcattatttttagatttggtgttggatacaattcctaatttattttttaactgattcggttaaaaacttaaaattgaacatatttcactaggatttcattttctttggtttaggttgaaccggaacaaaaacattgaacgaattaaagggcagaaaggacaaaaacattgaaatcctccatttttactaacccatcgttcttcccgctcgttcggttcattcaatttgtttcgaaaaccttttaacccggttcgcggttattttattttaatcctcaaccacgttcgaatctattagcgacacagtaaaaacaaatatattttattaatcaaaaattcaaaatctgaaaaaaagacgctttcaccaaaaaaaaatatctccaatcgatttctctctatctctctcttcaccaccgtcgcgtgaagaagacgaaacaatcgctctctccttgtgtggtctcactatctttttctcaccttcgcgtagcttaaccatggaaaagtagagaagaagaagaaagagagaagtgagagaaagacgaagaagatgaagagcatattgctttttctgtccccagccatgtgagtttccactgacacattctctccatcttcacatttggtgtttttttcttttgcttgattctttctatcttcattttcagatttttaccgagtccgtaaccgagtttgaacgagttagtggatggcttcatcgtcgtctagaactaggagtcgttctcctttctcgcaccgtagacctccgagtccttactcttcggcttcgtctacttcttcgtctcttataaataatcgtctattacctcgttcttcttccacacctacttctaccgtttacaattccggcggtgtaaccgggtcccgatctatgtcgattactcgcaccatttccgattccggtcccatcggcggctccgggacttatggagcccaatcgtacccatcggaggggctcattggcgagtctgggcagacgattacctctgagcgagatagcatctccgtcaccgttcgatttcgtccgatgaggtacggtagatctggaagcggaatatcagatccatttgatacaatttcacgattattcttctttagaagtttaatatttatgaaatgtgaattgatacttagtcaattttgaaaatctcccgtgttatttgtttgattgcagtgagagggagtatcaacgaggagatgagattgtttggtatcctgacgcagataagatggtcaggaatgaatacaatcccctcacagcttacgcatttggtattgagatcaatttattgccggagataatttcaatttactgttcattgattatagatttggtcgcctccgtttgttcaatgaatgttcttccatatttgttgatgccagataaagtttttggaccacagtcaacaactccagaagtatatgacgtagctgctaaacctgtagtcaaggctgctatggaaggtgttaacggtaaggcttatagctgtgttatcgattaaacaagagttgtgtttgtcattgaaatacttttagccaactcatttgctagtagcattacttgcagggaagtattctgactctgtgtttgcaatttgacaggaaccgtttttgcttatggtgttacaagcagtggaaagacacatacaatgcatgtaagtgttttggaaaaatacacgctatacaccatttcgttatacaacgtttactgtgatgtgaaagatatacgatatcatacacacactgggtgattatagttgctgataaatgtttgattgacatgcttgtgttgataaaaagtagagaagatcttgattaagattgaccaaaatgatctcttcttaaatcatcacgtgatcatatgcatcttggatttccatcaaacaatcagagattcagctatacatgctgttaataattaaccattgcttcatttgcaatctgcatagggtgatcaagattttcctggaatcataccattagcaataaaagacgtgttcagtatcattcaggaagtaagggatcttcttcaacttaaaaactatatggtccttactgatttaaagttcttaatgcatctattacagtgtcatatctgctaatttcttacatcattctaaatatcagaccaccggaagagagtttctgctccgtgtttcatatcttgaaatatacaatgaggtatgcaaaaaatttcattccataatgtaatagcgtttactgacacaataaataaaccatgaagttaaggcttttagcctcatatagtcatatatagtttcctattcccctcacgttgaagtaaatatgatgtatctccttttttggtaacatgtgatataactcatcatgtcttatattttagatgagtgttcttaattgcttatatgtccatctgtctgcaagttatcttatttttgtccttctatcaggtgataaatgacttactggatccaacagggcaaaatttacgtattagagaggattcccaggtttccatcttgttctctttctctcacacatgattacatatgtatatcaaacaagagcatttgcttgtttgtatgatttcattattttcactttaacaataacaaatatgatacttgatgaatagtccatgttacatccatcctgtttttatggattaccttggtttgatctagaggggatatttttttatagggcacttacgttgagggtatcaaggaagaagtcgttttgtctccaggccatgcgttatctttcattgcagctggggaaggtaattggaaaaattattgttgagacatgttttcaaaatattcctatttgcgtttcctttattactgttttgacttttgatcttcaatggcagaacatcgtcatgttggttcaaataatttcaacctgatgagcagcagaagtcacacaatatttacactggtacattttcaatcttgtgaacatcccattttcttacccttgatcctctcaatgtcctttagatactttttctcttacaaatgtccttgctatgcattttaagtttcaatttcaagtattttctgtttgcagatgattgaaagtagtgctcatggagaccaatatgatggagttattttttctcagctagtaagggcttctttcttctttcattgcataagttctctcgtcttataaacagctctctcacagtgtctctttcttgctcagaatttgattgacttagctggatctgagagttccaaaactgagacaacgggactgaggaggaaagagggtgcatacatcaacaagagtcttctgactcttggaactgtaggtgtctcttttctgttggagctttcttttatttgtcagatatttccttttcagttataatatgatataaatcagaattaagtataatgcaaaactgccttagaagaacaacctggtttgctagtgtatcttaatgatcaatgcctttattttctgataagcctgttccctttttgtgtccttatgtcaaggataacatctctagtcacctaacctttgaaatcgattttaggatgttttgattataaactatatctcatggttcaaatatgtaggtgattggaaaactgactgagggcaagacaactcatgtcccatttcgggactctaagctaactcgtcttctgcaatcttcactgagtgggcatgggcatgtatcggtacgactcttctgtatctggtgaatatttcccattttactgtaatagttttcacacggttgattatctcagattgtctaattgtgttgtcttcagtagcatatttaaggcaatgttggtttgtttgtatttattggctatctaatatacgctgtgtgctgatcttaattttaaaatcgcaatgagcagaagctaattaaaattttattttctgaaacttttgtagctcatatgtacagttactcctgcgtcaagcagtaccgaggaaactcataatactttgaagtttgccagcagggcaaagagaattgaaattaatgcctcacgcaataaggtcatttcttaggcttttggtcatgaagtacttggctttttcatacaaaaaagaagaagaagtatttgacttctattgatggcataacctaaaattcggctaaaaaatacattgtttcatatcttgcaacagatcatagatgagaagtcattgattaagaaatatcagaaagaaatctcgaccctcaaagtcgaacttgatcagctaagaaggggtgtgctagttggtgtcagtcacgaagagttattgagcctaaagcaacaggttctaacctccccgagaccttgttatttcataaatgtttgagtttattcctatttggtgaatagatcgagctatcaatttattaacagctacaagaaggtcaagtgaagatgcaatcaagattggaggaagaagaagaagctaaagcagctctaatgagtagaatccaaaagcttacaaagctcatacttgtctctaccaagaattctattcctggatatttaggtgacacaccagctcattctcgcagcatttctgctggtaaagatgatgtaagtttgttatttagatctgattatcactgtgttcctatattcctttttaactgttgcatgttggttcctcactgcccaagaggtttgatacctgattgactcattctgttttctttctgctcttcagaagttagactctctgctcttggatagtgataatctggcatctccatcttcgactctctctctagcatcagatgcgcgacggtcttccagcaagtttaaggatgaaaactctccagttggttctcgtgcagaattaactcaagtaagttctgggattcttagcgtatatagttttacattgaatttcgtttattagaagtttggtgtattcttgttttcaatccaaatggttacagaaaagggtgtttaatgattcagtgtcgcatgcacccatttaacctttcttttatcccatgaatatgattttttcagtgtttttatcagaaaatgacatttgatagttgtggctattacagggcgttatgactcccgatgaaatggatctcctcgttgagcaagttaagatgcttgctggtgagatagctttcggcacaagcacactaaagcgtttggtggatcagtccatgaatgatcctgaaaactcgaaaacccaagtaaagattcttctttatctatctagagaattatataccagtatgactgtggtctccctaatttcaagttttaaccctgaaaatcagaaaatgcatctccagatgctgaactttattagcattccactttaagccatttatttacctataagcataactacggaacttattatatgctggcatgcagatccagaatctagaaaatgatattcaagaaaagcaaagacaaatgaaatccttggaacagagaataactgagagtggtgaagcttcaattgctaatgcatcatcgattgagatgcaagaggtaacctaatctatacatcttatatttatgatcctttaccctcttaaggtcattcagttgtggacacagtgtggatcagctaaaggtattacaattatttttgttgttttcagaaagttatgagattgatgacacaatgcaatgagaagagctttgagctggaggtaaaatgtctctctagaatgaaatgtcttcttctatagcgaatatggaagatttctcaagtcaatatatatatttaaatgtgttctacctatggatcagattatatcagcagataatcgtattctccaagaacaactacagacaaaggtcacttctaagtcacggactccttttattcttttattcttttttatttttcatatacagcattttcttgtggctattatctcagtcatccttacttatatacacatgctctaacaactgcagtgtaccgagaacaatgaattgcacgaaaaggtgcatcttctagagcaacgattatcgagtcagaaggccacactgtcttgttgtgatgttgtgactgaagagtatgtagatgagctgaaaaagaaagtacagtctcaggtaatttctcaaaatctcaaccaattttgtcaaatttgcgaccatgcattctcacaagtatgcctgaatcctgataaatatcttcactggttgcgaggagattgtgaaaacacatataatgatatatatgtttaatggacctctcattgtatttacatgagcgtttgatgttttcatacttcaggagattgagaacgaaaagttgaagctagagcatgtgcagagtgtggaggagaagagtggattacgagtgcaaaatcaaaaattagctgaagaagcttcatatgcaaaagaattggcctctgcagctgctattgagctgaagaatctagctgatgaagttacaaagctctcgcttcaaaacgcaaagctagaaaaagaattagtagctgcaagagacttggcagcggcagctcagaagcgtaacaacaactccatgaacagcgcagcgaaccgtaatggaacaaggccagggagaaaggcaaggatctcagactcatggaacctcaaccaagaaaatctcacaatggaattgcaggcaaggaaacagcgagaagcagtacttgaggctgcactagctgagaaagaatacatagaagaagagtttaggaaaaaagctgaagaagcaaagagaagagaagaggcccttgaaaacgatttagccaacatgtgggtgcttgttgccaagttgaagaaagccaatagtggcgccttgtcaatacaaaagagtgacgaagcagagcctgcaaaggaagatgaagtgacagagttagataataagaatgaacaaaatgcaatcttgaaagagaggcaactcgtgaatggacatgaagaagtaatagttgccaaggctgaagagacaccaaaggaggaacctcttgttgctcgtcttaaggtaaaccttttacaaatttgctttctattttctttcagcattcttagttttctataagcctactccacagtctagcggtaggcaaatctagatatccattacctgttcgctccatatcctttatgccatgaccttcggatcaggcaacatatattaaaaccttcaaaacacccagaatatatggttcaaaatatgtaaatagctttacctgatccaatatattctaatatcatgtcctcctatctataatacaagtgactgttacggataattaagtcaagctacttgtgggtattgaatatttatctggtttttcggggacatggaacttgtgtacccatgtgtgagcttctatcttgtacgggtaatgaaaatcatgaatcatcatctcacacgttcaaacaatatgagctttaataaataaaaaaactacttgttttcttgttctgcatttgatgctttatatacataacaggcaagaatgcaagagatgaaagagaaagagatgaaatctcaggcggctgcagcagctaatgctgatgcaaactcacatatatgtaaagtctgttttgagtcgccgaccgccacaattctcctcccttgccgtcatttctgccgtaagtctcactctcacattacctgaggatccttcattaagtactaagtaatcctaaaacgatcacaatctctccttttatgcagtctgtaaatcttgttcacttgcctgctctgagtgcccaatctgccgaaccaagatctctgatcgcctgttcgccttcccgtcttgacctgcggcaagtatagtcactctcctacacacagtataaggtaattccaatatttcccaccttcacaaaatctttaaaatccaaattctttagttcaaaaacattaggcaatctttttattgaaagacaattgtatgtgattttgcaggtataaagaactatatggaagtctgtttgtttgctaacattttccagaacggcaggctcgaattcttttattacaagttgttttttgttttcttgtatgtaatgtctttgttatatctttctgttcaaaatgtggtaaagaaagaggaaacataacatgctaacagaaaaataggaaacatatcatagccgtttcatagtaagttcaaaatttgaagtaagtaattaaaaattattttgctaattcatgaaatttgtgtacagttttttagaaaaaacatacagttgtacaatggagaatagtgtacgaatgcaacagtgatacacaagaacaccaaactacaccaattatcatcgatgaattactgcaaaccacacaaacctttgatctcttctaacttatattgtaatttttaattttaataataatttttacttagttatatctatgctaaattcttatttttttttaagaaatttaatacataccgaatttaatacaccaataacacatgtaaatatttttggatcagagtggttgttacggcccaatggatctagtgagcctaaatgatacgaccatatattgtttttttttcggttttcgccaacgaggatttggttaccgagagtttgtttgaacggtcctcagaaattcggagcttgtagcttctcggtgcggtgccttcactttaatggcggcaatatcccctgttcaatgcttattctcttgcaattctcatcatcatcatcaacaacgcgagcaggtgaatctctctgttcttatttcttcataattagcgagaactaccttcttcttgttatgacttcattcctccgtttttttcaagtagagtgggtcgctttggagattgggttctagggttttagtatcttcgagtctatggaagctttctctgttctctggactccatttgaaccgaaggtgattatgttctagttaacgatttcagtaggatttggcccttgaagcgatgattctgtgtaatgcagttggatatgagataattgattgcaatcttttgggtctaataaaacaggagaactttgatctgtgcagtcaagggagatccagaagatgcctttaagaagactgtcgaaatcgatcggatgattgatgctcttagagatgcaaaccctagacaagtaaggaaacatgtcatatgcatcgtataaatgttgtgtttttgctctattatcttgagtaaattgagttttgttttgttgttgttgccattttcattgaacaggttgagaagattgttgttgaaaatatccttgcttttgatgaggttttttggataagactagcagctaggtcggatacttgtaaatcagaagatgacaaggcatgagtttatattgtttatgtcaatgatagagcagacttttgatctcttttgtttccgctaatgctttgaatacggtttgtttcttacagaaggactatgaggagttagctacaactgtgatgactatagttgactgtgttgtgaataagactcgggtttctctttcttctgtggttttattgtctcttcttcttcagcgtttacttaaacagggataactgagagttcattatatccctttaggaaaagatagagacgtctactgatattctgaaagggattttaagacctgctatagatggagtggaagagatttcatggccgccaagagatcctgaagccatcaatctaatgaaaaaggtttatactagttgttcttcactttctactacatctacacattttttatatatacaacctatattcagaagggttatctggtcttagattctgtgatttgatatcgtcatggttactgagatcagtgtattaacaggaaattatacaacgggaaaaagaagggcaattagatgaaggatttctttcagaagttaatgctcagctccggcaggtaagtgctacaatttgttttgtttcacttctgaggtctttcctttacagtgaatagatgtattcttttgaatgtttgaggctgacgattgttttcaggcaaaagaagataaagacaaaccagggttattggctatgctgcaaaaagttcttcaactctattctgctactatcctctccaagcgtagctacgcaaagaaaggtgatttgcccaattttgaaaactatgccaagtcactctaaaccattttctacgaacataatctcatccactatagctattgtcacagggaacgaagttgtaaaagccgagcattttcttgaaactctgatcaaaggtctgttctgcaaccacttttccatgtactatagaccccagccagacttcacatcggtttattatgtgtgtttcagctcctgaggaacaatggaacaagcttttcgtagacgggttaacaatcggaaaaggagatatcacacctgatgagctatctgctgttatcaagaaacgaatcgagcgcacactgattcgaactgtaagtaacataccatgacacatttgcttgcattgttattattctcttcaggagtgaatgcgaggctaaccgggttttgggttggggttttaaccagatattgttttctaaaattcatcattctaaccacaactattctgatcataccaggaagggggttcataccagcagcgaattttgaccgagtatctcaaaggaatcgagtccagggctaatgaaattatgaaattactccagggttaatgtcgtaaatcatgtatttatctatacatttttgtgtaatatcagttcaataaccccaattaatatattgttttctctcatgtaataattttttgattgagcatttgaagtgttatctgatttaaaaatatgaagctctgtagtcaaaattttacagattttaattatcttggaataaaaaatgtaaagttgatgcttccatataaaataaaagtaaaaatgagtaattcatgccaattaaattagcgagacgcaaattggagacagagataactgagcggagggattcagatctatacgacgaaactgaatctcaccgtcttcttcttcttcttcttcttctagacgatccttgtgtttctcttgctctcgcatccacgcttctctggtaatgctactgatcgtcaccgtgaagctgagcttgatcgcttccccttgtgaactgatctgatctgaggtgaatctctatttcttctccttcttcattgtacgaatctcgatttctcggatcttgctgcttcttatcgttagatctgttttcaatttcacgtggattacgttttttttcttccttttgcgggtttttcgatttctttgaactgatctttctccatgattttcattctctgttgatctggtttttgtagagttgtttctgtttcgtaatctgtgaatatgctgaccaagttcgagaccaagagtaaccgagttaagggtctgagtttccaccctaaacgaccatggattctcgcgagtttacacagtggtgtgatccagctctgggattatcgtatgggtactttgatcgacagatttgatgagcacgaaggacctgttcgtggtgttcatttccacaactcacagcctttattcgtctctggaggtatgctttgttattggtaggccaataagtctgtttattacactttcatgatcgataaatcctgatctgcttaagtattaacccttagctagttagcttcctcggttcctagatctagcttggtctcccaacctttgtttaatggatgacttaagctcttatagtcccagctggagtaaataatttgtgtttaagttacttatataacatattggatgatttggacctagtgcattgaaaccagatcttatggtacatgttgcatagtattttatttgaacataagtaagtactcaaacaactagaaatgcaaatggcttggattcttcttcgttacagttataatgctcttacagaacattactcatatgtagttgatggcattgattacattggatgttgcaggggatgattacaagattaaagtttggaactacaaaactcacaggtgtcttttcactcttctcgggcatcttgattatatccgcactgtccaatttcaccacgaaaacccatggattgtgagtgctagtgacgatcagactatccgcatttggaactggcagtctaggacttgtatttccgtgttgactggtcacaatcattatgttatgtgtgcttctttccatccaaaggaagatcttgttgtatcagcatcactggatcagactgtccgtgtttgggacattggtgctcttaagaagaagtcagcatctcctgctgatgacctcatgcgatttagtcagatgaattctgatctttttggaggggttgacgctatagttaagtacgtccttgaaggtcatgatagaggagtcaactgggcttcttttcatcccacacttcctctcattgtctctggtgccgatgaccgccaagtaaagctgtggcgtatgaatggtatttcttatggatatctgtcttcttcttcacagaaagttaattttatgaatcattgaggtactgatgcgtttcaattttgttgcagaaactaaagcttgggaggtggatacattgcgaggtcatatgaataacgtttcatccgttatgttccatgcaaaacaggacattatcgtgtcaaactctgaggataaaagcatccgtgtctgggatgctaccaagcgaactggaatccaaacttttcgtcgtgagcatgaccgattctggattcttgcagttcaccctgagattaatctacttgcagcaggacatgacaatggtatgattgttttcaaacttgagagagaacgtcctgcatttgctttgagtggtgattcgttattctatgccaaagatagatttctgcggtactatgaatattcaactcaaaaagattcccaagttattcctatacggcgtcctggtaccccaagcttgaatcaaagtccgaggactttatcctacagtccgacagaaaatgcagtcttaatctgctcagatctggatggtggttcttacgagttgtacatcataccgaaagatagcgttggcaggagtgatgttgtacaagatgcaaagagggggacagggggttctgcggtgttcattgctcgaaatcggtttgctgttctggagaaaagcaccagccaggtgttagtgaagaatctaaagaatgaggtggttaaaaagagttctttacctattcccacagatgctatcttttatgctgggactggaaatttgctttgtagatctgaggataaagtggttatatttgaccttcaacaaaggcttgttcttggtgagcttcagacaccgtttgttaggtacgttgtttggtctaacgatatggagagtgttgctttgctcagcaaacatactatcattattgcgagcaaaaaacttgtcctacagtgcacgcttcatgagacaatacgtgtgaaaagtggagcatgggacgacaatggtgtcttcatttacactactctgaaccacatcaagtactgtctgcctaatggagatagtggaatcatcagaaccctggatgtcccaatctacatcaccaaggtgtctggaaatacaatcttttgcttggaccgggatgggaaaaacagggctatcaccattaatgcaaccgaatacattttcaagcttgcactactgagaaagaaatatgatcatgtcatgagcatgataaagaactcccagctatgtggacaggctatgatcgcttatcttcagcagaaaggatttcctgaagttgccctacactttgttgaagacgagaggatccgattcaacttggctcttgaaagtggcaacatcagtgtagctgttgcatccgctacagagattaatgagaaagaccactggtatagactcggagtggaagctcttcgtcaaggaaattctagaattgttgagtttgcgtaccagcagacaaagaactttgagaggttatcttttctatatctcattactggcaatttagacaagctgtcaaagttgatgaagattgcagaggtgaagaacaatgtaatgggtcagtttcacaatgcactctacctaggagatgttaaagagcgtgttaagatactagagaatgctggtcatttgcctctagcttatatcacagcttcggttcatggtttaactgacattgctgagcgactagcaattgagctaggagacaatgtgccttcattgcctgaagggaagactccatcgcttttaatgccaccgtctcccatcatgtgtggtggtgattggcctctactgagagtgatgaaaggaatatttgaaggaggacttgagagtgcaaacagaggggctgttgatgaagaagaagaagatgttgaaggcgactggggtgagggacttgacaaattcgatgttgatggaatggagaacacagacatcgaagccatattggatggtgcagaagcaggtgaagaagaagacgacgaggaaggtggatggggacttgacttggatcttccaccagagcttgacactcctaaagcctctgctaacgcacgttcatctacttttgtgacacctcctcaaggtatgcccgtaagtcagatttggagtcagaaatcttcccttgctgctgagcaggctgcagcaggaagcttcgacactgcaatgcgtttgctccacaggcagcttggcattaagaactttgcgcctttgaaatcgatgtttcttgatctgttcagtgggagccatagctatctgcgtgccttttcttcatctcctgtggttcctcttgccattgagcgtggatggagtgagtcttccagtcctaacgtccgtggcccgccagctcttgtttttgatttctctcagcttgaagcaaagctcaaatccggctacaaagctacaacagctgggaaactatctgaggctcttcgtgtcttcctctctattctccaaaccatcccattggtggtagttgagtcaagaagagaagtagatgaggttaaggaactggtcatcattgttaaagaatatgtcctcggtcttcaattggagctcaagaggagagagatgaaagatgatccggtgaggcagcaagagctcgctgcttacttcactcactgtaaacttcaaacacctcacctacggctcgcgtacttcagtgcaatgaccgtctgctacaagtcaaagaacatggctactgctgctcacttcgccagaagtttgttggatacaaacccaactattgagagccaggccaggacggctagacaagttatgcaagcagctgaacgcaacatgacagatgcaacaacactcaactacgactttagaaacccgtttgtgatatgcgggtccacttatgtgccaatctacaaaggacagaaagacgttgcatgtccttactgcactgcccggtttgtaccaagccaggaaggtaacatttgctcggtctgtgatcttgcagtcattggcgcagacgcatctggcttgctatgctctgcctctcaagtccggtgaacaagtcagaatgattatgtgcttcaatcgtgaggtaagtacgagatgctcttttatggaagaagagtgttgagcttttggtgtttgtgaattttccgctgcaacttctattactctttaaagtctttatgttgtttcttatcttagtaacaaacgcatgagaactttatcttcttgctttatctctttttgtttgattttatttttacagtctcaggacatttcatttaggcttatcggattttaaactcgattgagaaatatagacgtaatattttataaattttcagaattgtatccattttcttttggtgaattttcagttgatgcctaatttactattccaaatacttataaaattatcgaaaaagttagaaatatccaataaatgtggttagttagatgaaccgttaagactggtagataagctcacggacaaactctcgaaatgactcgatcacagctgcctctttacttcttttctgttttttaatttgtccggtcgcttgaatttgagtgtgagagaattttccacacatttgtcttccaaaactatcaagatcatgtagctgcttcatggatcctcaaagcaactacatgaacgcttcctagcgaaacatgaccgttgatagtcatgccagtcatgtcatggaaccccctccggcacacgaatgatggagttttgtccactgtcaaactgcattctaaaaagctttccaacttctggataaacagaatcctatgatgaacaccatccatatcaatcgacgaatctcaagttctcgtccaaaacattaaacattcgtgatctggtccaaaacactaaagactaaaaattcacttgattagagttaaactgtttaagaacttcccacctttcaaatcgatgtttcttgatctgttcactgagagccatagctatctgcgtgcctgtcctaaaggtgatttttggtttgtgttccatactatttctatatatagaggctgatatagtgtgatgatgtagcttatatggacggattgagagcatgattctgcaaatatgatatttttatgtaatcgagttacaaaaatttgacacaataatcttgatttataccaagcaatttgcaaggaatatgaataaaattacggccgacaatggtacaaagcatcgatcatttataattcatatagaaaatataaccataagagccccactcatcatcattataagaaatctgtgggatagatatacatgagtataatatagttttatatgtaaccggataaaattattccgttgttgtatagtggagaaaaaccgcataaacttcccgaaaatagaaaagaataagcaacccccacacaacttttgcgataaaactaatcactacaagagttgtcactgaaagcatctaaaaatggttaagttggggaatgcaaaaaacttcacacctgaaaccacataaagactactaaacccctacaaatttctagttatattcagggtatttaactatttattattgtaattgaaccatcatttagtattgtaatttttgtttgaaccacttaaactgtagctaccaatcaaattcattaaaaagctttaaaaaataacaataactttccagttattcatagaaggaaaagcaaagaactataaaaaaagacttattctctttctctttttgtacataaagaggaagcaaacaaagagagccaaaatggtcgacatcttctaacaattatttatactaaattatatattcacacatatcatgcttatatatatatacacatgtatataatgggaaggcagaggtaatgatgatgatgataatggggagaaaatgtgaagattgtgggaatcaagcgaagaaagattgtgtgtacatgagatgcagaacttgctgcaaatccaaagccttccattgccaaactcacatcaagagcacttgggttcctgcctatagaagatctcatcacaaacaccaatcgcaaccgctctctactagtatcccaaaaggtatgagagagcaacaacaactttcaaattcttgtccttcatcaggttcttatctcctactcttatttaattatgctcatgtataagtgcatgttaatttttttctctcaccataaaacatctgaatttttggggtctttcaaatttcatttcatttctgagttaattgtatatgtcctaaagatagagaaatgagattttcggatctcatgaactttaaacaagacttgctagtaagtgcaaataagtacactacatattgatgtatccttgtgtgttgtgatgatgtttagtgatctatgtctatttttatatcaatcgataaggaattaggttttttcttctcctctattctcgatgttactatttgatcatgtaaaatgatcacaatcctgcttttgattttagatttttggtattcttttttgtattcttgatttttgaagtggattacgtagtaaatatataaacaaacgtctctagttatgatctttgacaaattgagaaatgtaggaatcttgttttttcactaattactttaatggcttacttaagaaaaataattgatgctaataaaattattagacaaacagacttatcgtgttgaaacattctttcctattttaggtgtacaaatccacactactcctggacattttccggcagagttgagttccctagcagatttccgatgcgtaaaagtgagttcaatcgatgatggaaaagagcaatatgcttatcagaccacggtgaacattggaggacatgttttcagagggattcttcacgatcaaggactccacaaagtgatggtagatcatcattataataaaaatagtaataatcatcaagagttacttactccttcaacttcttcatgtcccttgaagatcacaagtccttttaccgatttcatgttcggtacccgattttcttcggtcctaagaagatagataaattttaatggatggaatgatgcctagctatttcaagttagggcccatcgtatgttgttactttacttgctcccatatcttacaatttttttttatttattaccacgaggttcagaactagacctaatttatgtggatccgaagtcagtatttagtttcttctctttggaaacactactcatcccaagaaagatcaagataggggtacaatggaagtaacttcaagtgctaaccactaacctaccacacttttgtaaggatcgagctacaaaaatagagaagtagtacatataaagagtttagtattagtttatggatggtgatgataaatttagagcatctttcaaagtctgaactatatgatttaatttgtgtccataatattatagacaaatgagtatgtttaacaggtggcccatgagggtatcggattaactttcgtctttacctactagcctactttatttactcaatttcattattgtcctaactatagatatatagttaagtatttttgtttttaatggttacataatcaaattaaactgatctacatgttaataatctaactagctatcaccaataactaacatatccaaaataacaaaacaattcataatcgtaccacgtaccgtgaagaatcataagttttcagctaaaattaagtatgagtaaatagattaacaaaatgtatacacatctttggtaaagtatcttatgttttttttaactcgtcttatgtcaatttcataagtgagatttctaacacgtttagtcgataataattttccttactgttagtcagtcacaattttcattttgactttaaacatttattgtaatattcttttcttatgattaagtacatctctatttattatactttgctataaaatttaaaataagaaagaagattatcattaatcatgtaatgttaaaataaaaagtacatatgttcgtcttgttaaatgtgatatttaaaaaacagtcgtgttaattatgtgatatttatcatcaagagtttccaaaggcaaaagtggagaaaaaacattcaatcttgttttgcataaaaaggctacgtacgtatatgtttgtttgcaagtaaagttaggtgtgtctttagtctttacttatattagtgtcttagtgaatcattctttagcaaatcttaattaagtttccttaaacaggtgtcgagatcgtacattatgtggtgcgatttccatttagcattagctttttggaattattccctcccataaaaaaaagtgttgtattattgtagcaacaaaacttttaaggtttttaaatttggcttagttaaaggcgttaatgggaatcacaccctatatgatgtagcctatgcatgtaaagctaagctatagattaatatatataacccacaagtttaatagattactacttcttggttatttttaaaaagacagattaagaataggaattaaaaccaaaaatatccaccccggatgtgtatgcttgagatatagatgacatccaataacaaaaagagaggggttctctataatgttgaaagtcaaaaatgaaatttgtgactgactaattgtggttaattcgatatttagtgaggttagaatggatcggagttttgtaggagactagtgcggttgggagattgtttcccaccatagtttttttgtaagaaacgaacgtaatctccgacttcatttttgatacatattttctatgtaacgagagaacgttctattaacggggttaatcggcgagttaacattttgggattttggccaggtcaacgtttaaaggaaattctttacttcttctttacttgcagttttgtagtgaccacctcttctttacttgcagtttcacttctgcaatttgggtagatttagcgagaggaattttcaaaacacagtacacttcacactgacaatcgataattgaagccattacaaactctcagcatcaccgtgtggaatggtttctccgccgctatgttttccaagccacaatctacattgtgtggagggagcggaatggtaggcgtcacggcgagcctccgaacacagcatctcaactcgttggttggatagataaacaaattagaaatcagctgtcctctatctgtctcaagggggacaagcgttatgatggaagtctccaagtttggtttcagtcaagaagttaatctcttagctctgtttctttcttttgttcaaaactattctcagctctaattctcaaaaccaagctgcacttgttgtaaaaacgtttttctttggaatataatttaacattatttttaaaaaaaaaaacaaaatggctgatcaacgtttttatcatgtttaatttggccgacctcagaattcacgtatggaatgagcactttttgaaagttcacgtataaaacaacatttttcccgatctttatgatatcatttttattgatatgtttctttttttctttttgttaaaggatttgttcttattttgtgacaataatatataataagagttcttgattatgatcaaagtaaactttttttgtagaacccatgacataacatacatgatacaaccaattattcccactttgaggttcctttcactaatattcaactaatattagattattattttattagcttctatacttttaaaaagtttacaataaaaaagtgaacataatctttaaaacagttatttatcgtgaattattttgaaaatagcatttattaacacacattttctcttaaatatctttaatttcgtatttatttcatcaaaataacaatatttaatcgtaattacgaaaattcaaaattggaataaattgttttgctaatcgttatttattgggccataaccagtagagaaagcccgaactaaatatgggccgatacagagagaccctaactcaaatctggaaacaaggacaaaatggtaattcagacaactagtaatgatttatcataattgattcatgatgaatcatcatcatatgtgtaatggtatggtcaaaactgtgttaaaaagatacattaaacaaatacgtggcagtaacaacaacaaagttacctctggctcaaaattgtcccttcttagctcatcattgatccactgagagagaggattacgaatacgagatcggagacatggcggagagtcacggtggtggtggtggttgctgtccgccgatggatctgatgcggtcagaaccgatgcaactcgttcaagtcattgttcccatggaatctgctcatcttaccgtctcttatctcggcgatctcggtctcgtccagttcaaagatgtacgtatagagtttactctctccatgatcgtctctctcgagtgttaagttttattgtattgcgattgcattagaggatatctttagtgaatgttgaactagtttagttgttcttcttatatcggctatttttgatgttcatttcagcttaattctgagaagagcccatttcaaaggacttatgctgctcaggttagttcaagtttatgcgaatgctgaaatgattattatgctatttacacctattgtgtgtgtaatggtggatttgatggatgaagataaaaagatgtggggaaatggcacgaaaaatacgtttctttaaagagcaaatgtcaaaggctggagttactcccaaagagaccctagatagagaaaatgatattgatttggatgatgtagaggtgagaggaggtgcctgcttttgattttgggacattcattatgcttcccgtttcttcaatgcttatatttttcttctttctcccttttcaggtaaagcttgaagagcttgaagctgaacttgttgaaatcaatgctaataacgacaagttgcagcggtcttataatgaacttgtggagtacaagctcgttcttgagaaggtaatgtcttttcattttacttgttagtaaatgttgcattgccttatgtgtattcttctgatttgggttgtaactcatttgacagttttctggttctgtaaatatattgaactagattctaaggctaccactctaatataaaatccttgttccaccggtgttttagtgactgtaaagggtcttctgtagtacaaaaatgcatatttatactgttatagtatagtgtttgatctgcatctcgggctatattcatgtggatgttttggttttcaggctggtgagttttttgcttcagcccatagaagtgctaccgctcaacagagtgagatagaaacagaacaagtgggtgaagacctcctggaggctcctctgttgcaggaagtacgaagtctgcgactcgtttccttcttcaagttgtgttctcacaaaactagccttacaaactttcctttttaacaggagaagtctgttgatcccacaaagcaagtaaagcttggattcctcactggactagtgcctcgtgaaaagtctatggtgttcgagaggatcctatttcgtgcaactaggggcaacatcttcatacgacagtctgtcattgaggagtctgttgttgatcccaactctggggagaaggttagttgcttatgttctactcctagacatataacgtgcggcctttttctattgtaggacttcagtgtctttcatactgtttatagtttctatttccccataggctcatgcaaaataacgtttttaattctttgtgtaattcttacgttctcatattcacatactatcatatatcatactatcatatacctcataccgagctacctatccaagatattttctacatggaatcctggttctgtcagaaaaaatatactcattctgtttgcctttgctaggaattgacttttgatctaaactaatgttacaggctgagaaaaatgtatttgtcgtcttctattctggggaaagagcaaaaagcaaaattcttaagatatgtgaagcttttggggccaatcgctatcctttcagtgaagatctgggcaaacaagctcaaatgatgactgaggtatgtattatcctctgatatatgagggattccgcgatttttcgtatgtctcttagtcatatatttctatgcatttcttttatttgtacaacttttagcttctttttttttctgggcatgaattacagatgataaccatatggagctgtagttaattgttttggaagaataataccaacaattaacaattgatttatagatatcctctctgcgtaatgtttattgggggttgcattgagtagtttaatatctagtcattgtggattttatcctcgcagtaattagcctgtgatgagaatgtaaccatttctatgttgaacagttgctatatacagtatcttgggatttgcgttaataggtctctgagagtttttttggtaaggaggagaaaagcatgttagggaccttccttgtacctttttgtgctcaaatgttattttggagctttctttgggtgggatatgtttgtgcacacacggttaacatccatgagagagtacatattatgccagtgatttatctgctgtcacgtttcactatattgatgatagtatatccagtcctcagaacccattaaccttgtttagtcttcttataatgtatcaggtttcaggtcggttatcagagcttaaaactaccataggtgctgggttggatcagcgcaacattcttttagagaccattggagataagtttgagcaatggaacctcaaggtattatcctctttggacctttgttctcgctagcagagtgctcattgatacttattatcagtgacagataaaatcaattatcattattaatcttcacctatgcagattcgcaaagaaaaagctatctatcacaccttgaacatgcttagtcttgatgtgactaagaagtgccttgtgggtgaaggctggagtcctgtctttgcagcaacagaagtgagttactttagttccatatagttaaaatgtttgcatatttattagtgccatagtgagtttaaagttttgcatctgcagattcaagatgcattgcatcgtgctgcggttgactccaattctcaagttggatcaattttccaagtcctgaggaccaaagagatgcctccgacttttttccgcacaaacaaatttactactgctttccaggaaattgttgatgcatacgggtaagcatcttttctggagcttcatctgctgtttaggaaagaggaaattggaattaggattggtaataagtaacatttttataggattagcggatacttgataatatatctttgcctcttatacactcaataagatataaatttatgttttgatttcacctgtttctaactttgtattagcttccgttttcttaatatggaataccactgaatattttcaaataagctttttcgatgatcaattcagatgatagaaacaacctttcttgcttactttattttttcttctgcaatatccatttgtgttagtgttcgtctcttgaatttcatggatcttctttgatcactacattgcagtgtggccaaatatcaggaggccaatcctagtgtattcacaattgttaccttccccttcctgtttgctgttatgtttggtgactggggtcatggaatctgcctgctgcttgcaactatgtatttaatattgagagaaaagaaactttccagccaggtaatacccctaattgacagcatctattttccgactgagcacagtataagattggtttctgtttcagaaaaagttgtgtgcaaatttcaaattcaagaaaattattttgagagttgttactttgattggtcatcaatgtttgtctttcttgcaagttctagatgctaaaccatcaatccttgcttcgtgacaacagaaacttggggatattatggaaatggcttttggtggccgttacgttatttttatgatgtcactattctcaatatacactggtttaatctacaacgagttcttctctataccatatccattgtttgctagctcagcatacgattgccgtgatgtctcttgcaggtatgtcaacttgttctcaaacccctttaaaggaatgcattaaaggaatatctttaagattctgagtttctgtcttctgctctcttgttcagtgaggctactacaattggtctgatcaaaacccgagacacttatccatttggtgtggatcctgtgtggcatggtacccgcagtgagctaccattcctaaattcgcttaagatgaaaatgtcaattcttattggagttgcacaaatgaacctcggaatcataatgagcttctttaatgcaaaattcttcaaaagtgctgtaaacatatggtgagtattcaattttctgcccttgtcattacgtacttctcccagttcttcaattatctgcccttgtctgatctcacatggttccaggttccagttcgttccccagatgatattcttgaactgcttgtttggctatctttcggtcctcatcatcataaagtggtgcactggttctcaagcagatttatatcacgtaatgatctacatgtttctgagccctatggatgatttaggagagaatcagctgttccctaaccagaaaatagtacaggtttgcattgatacctaacgatgtactctctctgtatcaaaaatcatatgccttagtctcatctaattcctttcctattccagctcacattcctctttctggctctggtttctgtgccgtggatgttgttgccaaagccattcatcctgaaaaaacaacatgaagctgtgagtccctgccctcgtcgatatacttaaaagctttgatattgaaatttgtgctgaccgttactgaaaggtgatttatgttttctccagagacatcaaggactgtcatatgcacagcttgacgagacagatgagagtcttcaagtagaaacaaatgggggaggacatggacacgaagagtttgaattcagcgaaatctttgtgcaccaactcattcacaccattgagtttgtgcttggagctgtttccaacactgcttcttatcttcgtctctgggctctcaggtacaaaatactacttgctttcaaatagtcctgattgtcatctaccagatagtcctaccaaaactagcacttgtcaatatcatctagcagtagtattctgttaaattcattggttcttgatggcttaatgtcgaagtattggtttgcgcatttcgtgactaatctttatgctttgctgggattcctattcagtctcgcccactcggagttgtcgtcagtcttctatgagaaggtccttcttatggcttgggggtaagtaaatgcatctacaatcttttagcctccgtatgcaaatgtcaactaatacgctgtagaaggtgttaataacaatctctatctgaccccaaacagtttcaacaatgtcttcatctggatcgttggaattctcgtcttcatatttgcgactgtgggagtgcttcttgtgatggagacattgagtgcattccttcacgcgttgcgtcttcactgggtggagtaccagaacaagttctacgaaggcgatggttacaagtttgctcctttcactttcactctcgtcggaaacgaagacgagtgattgatgttccgatgtatcagaaatgacttcttctgcgtgtgcatatataaggtatgggaaggattctgagttccttccctaatcatttttttaaaaaatttaagaaaataaatttggatgttttttcttcccctttttccttattagaaggttatattgaatttatttacctttgccgaggaaaaattagtgaaaataaaagaaaaattagggggcggagtgggattatttgaaggtaaaattcccatttgttgttgtttttttggtagttaaagataatgaaactcagtcaataattaagttaattaagcacataatggttgcacagttctatgagagcatgtcataggacataaatgataaatgactgtaacttactcttcccttgcactctcatcgacccactcgtgaacaaacaaattcgtggcaattgagaggaacttatatatcgtccatgtgtgtatgtgaaaaccatgccgcaaatgacataacttaaactgatttcaaaagccacactaagggacaacaatcctaaaagtctatcagaaccttctcaatcaattcaactatatatccaactatccaatgtatgtgaagctttctgtatatcatgtcatatagaagaatatgcatatattaaaaaaagttagaaatgatatatctaagatgcttcaataaatgttcaacattttaaggtcaaagaagtaatagttgtgtaatgaataatataaatctgagcaaatattgatacaaatatatttttaagtgttcctatttctattttattttgttgaatgtttggatattatttagttaataatatgggccataattcatatctctcataataaattattaggtatttgaaacagattgtatagagcttgtctcaatggtgcaatacctttaagaattgttagttttctccaatttttttgataagattttgtgcttaattttcttatttctcgtctttctcgctttcttggttgtttagttcagtagtcttcccaaattttttaacttctacctctcctaattagactttcgatgctattcttcgtttatgtaattctaaagcgaatagtttagttagatcctctaaatttttatcttttgaaattaattttgtaaccaactatggagttgatttttcatagatgtgtggttgacaaaaaaataaaagtaaatagactaccaattaatgagtaatttttaattaatgtgaagttgaaaaagaacgtgttgtgtgcttcgaaaaaaaagagttaatgtcttattattggcttaaaataattaatgatgacatgaaagaaaagttggatagttctacttttaagactaaaaataataaataccataagttaaatttggtaaaaaaatccgtaaaaaatgtatatttatgaacaacctcacagtttacaagcaagtaaatccctcaattcaaactttctaaaaggtagcaattaatgagatttaattttacaactttgcaacgaagctcgaaactctctctcttcctctatatatagagtcatactttacctagaaaatatatgcaccaaacaaccatggaaaaacatgatctaactttgatttccaaaaaacggaggatagattttgcgacaaccggagatatcccaaaccttaaaggcgagggtgtttctatggtcgctgaatctgcttctgcgtcaaatatttttgcggacagtctagtctatagattgttctttaagggtttggtgagtgatgaaacaactaccgacatggaagagattgtgaaggctggatttgggatagcaatttgcgacgaggcaaatactttgttgtataatatgaagaaatcactgaacggcgatgatgtgattaatcccgaagaagtagagattaaagcactgatctgtgtgttaaatgtctcaattcaaatggagcttagaaatgtcatgatttgctgtggtgactatcaaatattccaaatcgtaagtgttattttttttttttgttatttttttttttgtcagcaactgatttactttctttgtatttgagtagtacaagttgacatagtaatataacgaggttgtgcaaaataaaaataacgataacttttacttagataacttaaatgattcttaccaaaaaaagataacttaaatgatatttttatcctcgtatttacaatctcattggatggttaaattcatttcttatcttattaaaatatttacaaaaaaatccttaattcttataaagtagcgttactttttctttgatcatacaatagtatactttttattttattgaaatatatatatatatatatatatatatatatattttatattatttgtagtgtcacatcgttaccattatttttactttttgtaattgcattttggaaaattggaagttttggtcccaaacaattgattgtaaatgacactagaatatatatgccctctcgctttagatgggttattaactaatttgttggcttgcatctgatttttcattccagcttactggtagagggaagcctcagcagaacattgtccatctggtggaacaagtccaacaccttagagggaagctatcttctactgaagttgttttggttccgcgagctgatgttattatacttgcaatagaggcaataggaggagaaacttgttgcatttgtcgtgaaaacaccgatgctgatcgcatgttctttacggagaattgctttcaccgtcaatgcttttcttgcgtgaataggcatgtgcaacgtatgctgctttgcggaatttcacccacatgccttcattttccttgcaactctgagctcacgtttgaaagctgtagcaaggttttgacaccaaatctgattgagttttggaaacgaaagattgaagaggacttagttccggctgcggacaaaatctattgcccatatcgaagatgctcaatgttgatgtccaaaaccgcgctttcccgtgaaaccgaccaatccaatgtccgggcatgtatcaaatgctgtagactcttctgcattgactgcaaagtaccatcgcatgctggtttgtcgtgtgttgattacaagaaacttaaccctgatcctctatatgatgtcaagctcaagtctctagcaaacaagaagaagtggcgtcaatgtgtccagtgtagcaacttggttgaactttttgaaggttgcaaccacataacttgcaggtatatatatatatcgcatccaattaagcctacttcaaatcgtatgaatacttgtatttcacaatgtttttgtgtgtgcattgtgtagatgtggatttgagttttgctacgtatgtgggaaagaatggaaccaacgaggatgcctttctcctggttgcgatgatgatgatgatgatgatgatgatgatgacgatgatgatgacgatgatgatgatgatgacgatgatgatgacgacgatgaggatgatgaagacgacggctatattgacagcgatgatgatgatgttgacggagatgacaatgatgatggctcagaattagatgggattaactttgaagattttgcggttcacctacccaaagatgtcaatgagcagaaagatgagagcaactgaagtgctaggagaggtattaatgtgaaagtcatgaaatgttttctttttcagtttttcttttgaaatttagataataagataagtcatgtaatgctaaagacctcttaaggaatttgtaagcctatggcattgttgtttcgaattcaccaagaaatatgtttttgttaatcatttatttacagactttaaatagcattgcagcagaataatgaaaagctcaagaagtggtagcagcgacggtggagaccaaactgtcaacaccgcaaatgttacgacctttacatatcttatagaaaccattctcaccccaagactcaccccacgagttcttgatgatccaatacggtttttcctttaaccttgcttgagaaaacccagccgagccataacctaccaacaacacaccgtggttgagccgcctcgagcatatgtaaggacacgagactcctccaatgtaggtttgcatataagctgcattgatcgccacagctagaggaccgtttttgataaggtttgcagctatttgatcttcgttgatggacacaacactaaagttggagacagaggcaacgatcttagacctgtctaacttgcagctccctccatcagtaccggtgtaaggataatctttctctcgcataagccctccggttttaagcgtgtattcaaaggcactgttcataagcccaccgttacaaccagaatcacatgaaccttcctcttctggatcacactgcaagtaacagctgagattatgacttgtaatcttctaaagataatggcacattgttgcataactcaaatcgtaaccacagaaactacgtatttcttggataacaagtaagtatgaacaatcaaacagagcttccatcaagcaagaggagacgcatatatattcatacctcgtgatcacaatcgacgagctgttgttcactgagactaacgagtttgccagtagcgaggaagtgagcaccttcaagggcacctgtagtgctaaaactccagcaagaaccacaagatccctaataaacagtgatcattcaagtccattattattcatattctccaaatgacatcattatcatcacattgatgattgaattacctggtttttcacgggagtaaccgcgccgcgatctctccaatcaaactcctccggaagattctgagtagggagaatcggggcttgattagcgtctttaggaagcttaaacccacctttaacccctaaatgctttctccgaaactcagaacgagtcagatccgaaaactgcgttacgccgtgacgagcagaaggatccatcttctggtgacgcatcgctcgcaggagatttgctttgaaaacagagaatctgtaataatgctcctcaatggaaccgtaaaccttgccgaatttcttcttgaagagagtaaagtgatcctccgatgacaaaactttcggctctgtttcatcaaccacttgcctgatcaacacatcttcgtctccacaaaccgaaacagagacgaacacaaagataagagaaacagagaacaaaaccctaagatgataatccatgactttttaaaaaattatggagagaagaaaacagagctgagggattaaataaaaaaatattcgaagacgaaatcgaaaaaatcggacggtttggaaccaatgataatttgacacgtggaaatgtatgacctgtagttgtgatgtttagttggcacacgcctacggagtcttcggtagttaggtaaataaccgttataggctttatctaactatgtcgacaaaaccggttcggttcaaaacaataaattctgttttgttaaggttcaagttcggtctagttttgacgatacaaatacaaaacaaggttgtgttcgcagcattcactacttcggagatttttcagacagaatcaaaaaacagatacaaggaaacttaaaaatatcaaaacttacatttgtttgattcaagtctcaagattcgaaccacctcctgacttgaccggaactctgtttttgtgggccggttttggctgagctctgcgagaacttagacctgtatttctcaatcaacagatcaagtttgtccacaacttctgcaccaccttgaccttgaccttgcttcttcctcttcctctgcccatttctattctcttcacctctatcctccccgaacttcctcttccttggttcgctcaaatctttggaaattttcggatctggtttctcagttgtctctttctgtctcatcaattggcctttcttgtttgaagacggtttttcctgtgtgcgtataggtctcttcttctctgctgcattatcttttactgctatattggattttgcttcttctttactctcttcacgtggtcccttcttaaacctggctgcattctctttccttggaccagtgttatccccttccctcgtttttcgtttgtatttattgtcaggtgcctgtgcttcgccgttcgcctgctgctgatcagattcattgtgtttctcgcgttgctgaaactgctgctgcttagcttctcgtatcttcagcttctggacattatcaacagcaaattctatgacagggcggtgttgaggaccaaatgtctctgcagagataaccaaaacgattaccataacatgaaaattattattcttggacattgcatcctaaatcgtaagctaaagtgatacatgtctcatccgattggtgagataaccataaaatcatcaaatagcatatcatttggaaaaaagtacttgaatttcgaaggaaatttagctttcagcaagatcaattaccaggattgttgttaagtactctcagggctacaagagcatgttcatgctccgtgaactcaacaaaggcaactccacgggagtagttcttagtatcaactttacctttcttctcattttgtaagaacttgatctgcgtagaaaacaaagaaactaggttcagataatagaactatgtttgaattgtagcacaaaggcgaatagctgacctgtcgaatacacggcttctgctttgtagctcgtgaggtaacagcatcaactaagagcctgtttagttgctttggattcatggacttgggcaaattataaatcacaagccttgtccgagatacatggaagttaggagactgaagcattttcatcttgttttcatgcaatctgcgaggacaatcacatgctcactcttctctcatcccaaagcactagacagtaacatgcatatctgagaaagtaagaaaagtttaccttcgtcgcttgtccatatcttccgcagacacaccctcagcagcaggtgtatcatcaaggatctgaccttcctgtggaagtcaaaacaggatgatatattagttcgtatttgaaaagcaggcagataatacaatttcccagtatttgtgagggagagggagaagtgtgtactttagcaagataaagattccgatggtcaacattcttctcctctgtctttttgagttctatgtcctttgcagctttcttacccacagctctcataacgtttagttgcctgcctttaagaaggacaccgacacctgaggcagtatcggcagctgaaatggctgcaactgatgcatctgctgttttgaacttgacaaaagcagtcccttctggccgtctgagaaagaaaacacagggagaaaaaatgtaaagctttgggagcttggaaattttttgatgattgaatgaatttcaaagtatataaggatacatactttgtgaccttgtggagaaccagggataaagattcaacttccccaaatactgtaaacctctgtttgacttcttccttagtaacatcaaatgggaggtttcttataaataaagttctctcaaaatcatcattatcctgcgtctctttaggagccaccactttagttttaccggatttcaaaggttcagatacaccagaagagtcagcaactggcttagttgatgaacttttcagtttacttttatccgattcctctgtctctccctcaggtgtagcagtagaaccttttgaagaagcaagcaagttcttaagaacctttctggcaacatctgcttcatcttcaaagttcatatcggtcccaacatctttgtccagtgcatctgattcagtcagtttgttactgccgtcctcatcatcatcagtatcatctcctggaggagggtggctttctacagcttcatcaacctcctccaaatcaacactactgttttcactgtccccatcacttccttctttgtcacctgccaaggatcgcgtcaaaaagtatgacgatctgttaggaggagataaaacaaaacttcggccactgactgtatctgtttccctcatttacaagttgagtaaaaaaattgtttataattaacaagtttttaaaaactccagtgataaaaggaaaaacaatacggtaacataccatctgctgaagcagtagtggcatcagcagcaccattgtaaatatttttaggtaccgcccagtctacagctataggccttttaccaaacatgtgcccattgaactttttaattgcctgaaaatgcaaaattaattaagacaagtgatccgaatggaggataaccaaatcaagatacccatgttactagatcttacatttgctgcatctttcttacacgtgaatttgacaaatgcaaaacccttaggtagcctgccaaaatattacaccaaaatgaggataatatacaatgatttattcataatcaagaaatcactcagacgagttagaacatacccagtttcaaaatttttaggaataaaaacatcccagacaaaccctactgctgaaaagaccactttaatatcactaggtttagcctgcaaaattcagaaaaatccttgagaagcaacgcatttattaatgaaattgtagagataacaaaaaaaaattcgagttttaagaacctggaaaggaagatttcggataataagtttccacttctgagcctttgaaccctgcctccaaataaaataccaataaattaggaactgattcacatgctaatcggttaacttcccaatagagctacagtggtgaaaagtaaatgatgttcacctccccaccaagctgacgagcccaaatgagatttccctttacttctgtttgatgtaattttgcaacagcggcacaagcagatttgacactcgtaaagagaacagctgatgcttctgccctgcatccgtcttgggtaagacctgaaaaagtaatagttcttttgcttaataaatgcatcatgagcacaaagtctggcatgctcttataagaaaaccaaataagtttatagctacatgcccacagtaattattaacaagagaatagaatgtcttgcaaactttcttcaaatactaaaaagggtatgtgcacacaggatttatgacgtgctatatataacaaatagacgtagttaagtgaagatataaagtaacaagatagaattaagccacaagataaaggaccgggaggcaaccagcatcaaaagaaaactaattaatggaaaacatgagcaggagatgcattccaacagcgatattttaaaaatcaaccccataaacctcgactagaggaagaaaggtgtttatacttatcttacgaacttgttatagctaatataatctaataatcaacagatattcatgtcccaatagtgttcattgagactagccattttgtgcactgacgatttcgtatgcatagatcacacagctttgaaggaaaatttgacagtgaactcagattttaacatcatttacgaaataaaaaccttgtagctgataaatataactaataaacttagttagggtatgcaaacaggcctttgcctccattttctttacaagattcttaccattttgttggagctcttctttgggtaggggatatctgacagagcacacagtgccaatctctttgactcgactatggactacctctgccatctcagcattagcaagcccaccaaatattacagttcttgcaactcttcacccatttaaaaaagtaaacatatataaacaagaaaaacaagaacaacaaatctttctaattacatgcttaatctcaacaaaggcaataataaattcattgaggatatatatatctagacaaaaatcagcacattattataaaaatcatacctttgcttatctgaacatgtttctttatcaggtaaatcaacatgaagctttgttggtcttttgcgctcaattggcttctctacttgtttgcgctcaactggcttctctacttgtttgcgctcaactggcttctctacttgtttgcgctcaaatggcttctctacttgtttgagctcaattggcttctctgcttttttgcgctcaactggcttctctacttgtttgcgctcaattggtttctctacttttttgcgctcaactggcttctctaattttttctcgggtggagatactgatgcaaatacaaatttaatgataaactagaacctaacaaactaacttagactcaaaaccaaatgtaggcaagcttatacctttctcgtctgtctcagggattgaagtgtccttgtcactctgtccctgggaattatcaggtacagagatccctgattcggaaaaagtaagaaaaatagaaatgttagacaagaaaaattaatgtcaaaggataggtgaatgctgagataacaataggtgaataccaaccttcagctgcttttgttcgacgctcttgaagagaaggtcgatgtgcagcctgtttaacagtaatcctacggcccccaacagtagaaccgttcttcaactcaatggcacgattaacatcttcttgtaaagcactaaaaggaagaaatttgggattgtaagaaccaatatcatcacttttcccagtaagaagatagttttcaacaagtgattagcttacaatttaacaaacgcaaagccgcggtgttcatcagaccctgcaaaatcaaacaaagatcatcattagctcctgataagcatgattataacttaaaaacttcaatttgtagtgacatcaaattctcacctttatttgtgaccagaaagcaacgcctgactgggccaacttcactaaaggcttcttcaagctgaaaccatttgaagattacaccaataagattcaaaaatgtcatcgatttacagctctccaatccaaacaccgaattttcgattcaaaaggatcaacaaaggtacctgtgcgttggtgatggaataaggcaagccagagacgcaaacagtggcggcagcgtgtggagatttctcttctccatctttcctctctctcttgtttttccccattgataccttaagactgactcaaccgagagattacgattagggtttttcacaatcttattttttgagttgcagagagatagaggaagagctgagctcaagatgatgtgaagaagaaatctagggtttatctattaaatcactaaacccatgttaaccgactaatccagataaaattactccgaatcgaatggtacgatttgggtcggttcaatttttcggtttagtttatttattttactattcttttttggcattagtgatcggttttattttactgtatttttataaactcaacaaaagtgtatataattgaaaattcaaatgaatataaactcaaaatttttactagaaaagtgtttcagattcaaaagaaaacaaccaatagaaaccggaatctcgttgaaccatcaaacgagattcaatttcaattcggttcatctcttaaacccaaatgtctacaaaatataaaaacttaaaaaagtatgaaaatattatgttatcatctaattgaccaaacgaaatatccggtttaaaccggttataatcggttatcaaatcagtttacctttgtgtataaacacttgatatcttccttcatcttggtcgtttcaagaaacgcatcaccggagtgatcagcatcaatggctctaaacccaaaatcctctcttcctgatccaacattccactcgaaccacatcttcgacatcatctctttacgcgtacatgtttcgtagttctcttcctctggtgaatccgcagctacgagcttgtacgcatatactttcctcttctgtcctggtctataagctcgagccacggcttgctgagtcactgatgggttcagatgaacatcaagaatcagaacccgtgatgcacccactagtgatattccttccccacaagctttgatcgatccgaaaaacactttagcctctagtgaattgttgaatctctccattgaccattctctctgttcattgcttgaatcacctgtgattgtgaacatctctttccctaaacgccaacctttcattgagctcatgagtctctcgagagtctttattggaacaatgtattggctaaacaccaagagcttctctcctgttgattcacacagagctaagaggttgaggaagaatttcatcttcaccccatctctcacattgatctttttcagcatcttgtccagcttcataactgttgtattgttatcagaaaaacccttttccccgttggaagggttttcctccaagaaagatttgagctttgggtgtatatacaaagcagcaccaagagagatctgcttgaacagttccattttcctcagaccttttacttcatctctctgaattgagctcaggttgagcatgacagtgaactcactaagccccggaagcaagccgctaaaatctgctttgtgataatgcaagatattacgggtcatttcgcgtagatcctttatcaagctggctttggcagaaaagtttgtactcctctgtaatgtaagctctactgcagcaaagaaagtcccctcgatactactactactctggttcacctgttttcctcttggtatctctgccttgctcatgatacgagaaacaatctcccgagttccagggcgcttcaagaacttgggacgaacaagatccaaaatgttaaacacttcttcaacgttgttttggaacaaggtacctgtgagaaccacctttcgacgagtcttgacacgagcaagcgaactaagcatgtaggtctccttattccttgaggtatgaccctcatcaagtataagcaacgttggcttctcaagcaatatcagcttacaatcttctgaagctgcctcaaagttatcatcgcagatgatcctcgtaaactgttggtaaccaagaaacagaatgcttctctccttgatccattgccccaaaaccttcagttgctgcttccgtgattctgctttcacgctgtagaaatcaagcaggggaatcttctcaacttcccacaaagtaaactctctcttccatgactctatgatcccctttggtagcacaaccaatggtctagcctgcggatccatagccatgaaactctgcagaaagctgatgagcagaaatgtcttgcctgatcccggagcatgagctaatatgcatccacctggctcatctgctgcaaggttgttacataaaaatctaaatccttcagtctggtgaggcctcatctcctgatcatgccatgggtgaatgaacattttttctcccaaaatgtttgtatgagaagactggattcctgagaaatccctgctcgtttccccattttctttttcacgcatataagttctcctcgatctcttttgctacaccaggaaagaaagtagattgaacttctgaatatttgtaacaaaatcaatatatttcagacacagttatcagtgatcactaaccttgttgaacacaacctcaatcatgctctcaattggtttcttgataagtccacaaacacgacacacttctccaatatcgtccttgcaaatgaaggaatggtcacagtcttcgatttgtttgtgatcattactttgtgaatcctccaccgttacctagccatgaacataggcaaagatcagcggaaaacgctggacagagaagcagacaccgtacctgctccagaactcgaatctatatgcaaattagaggtggtcttctattcactgaaaatgcttaccttaattgattcttgagcaaaagccatcttcctccaaagttcttcttcttcttctgcatccacatatagactttgattgtcaatatcagtagaattcctcgatgaatcctcctcgtcataaccttgtggactcgagtcagatcctgagctatctccattcttcacaacaatcacttccttgagcttcttcagccttttttctagaggctgaaaaatgcaaaacgagatcataaagatttaaacttggcaacaaaagatgaaaccatataataaacaaacattaatttgagtaactgattcttgaggcaactcgtcatctgaatcgatgataagattatgagaagacttggctcgtttgttgtcttgtctagcttcgatatcttccaatgagatggaaccattcaaatattcctgtctcagcttacaaagtctctttacatcatcagcaagacgtccgtataaaccatcttcaagcccatcaaggagattcggtagacagaatgggtcaggacgcttggcaagttcttcttgagtaatgctcctgctacgtgaccttaaattccaagctgtgaacatcatcaataacgagtaaaaattagaagcagaaacaaaaggcatcagcaccaaaatgggtttaatttcttcaaacaaacccaaaaaagaaacgatttttttagttgaaaatctcaaccactaggaaagctacagccagaaatgaacttagtggaaaacaaaaccccatgtatgatacaatcaaaaacataattgaatcaacagattcggtttagctttagaaatcatgcaaaacccatttggctttttagatttgcacactcaaaagtctgaatctttgaactttccataaacagagagactaatcttcttctttgtcacaccattgaacaacaagagaggttacagaagaaaaagaaacgagtgtaagtagtatataaacgtacgcgtctctctcggcttcgaaaatgaaaactgattagtacccaccatgtttgatcttcgctaaacagagctccttaaatcaaaactacgactccaaacatgttaaagactagaaagatgcaagctttatgcatgaatcagagagatttcaagcaaagaagacaaatagatctactttttttctggaaaaactgaagcgtctttttgtttcccataatagtaattagtcatggtggcaaagtggcaaaggagagagacaagaacaatgacggtttcggaaagtcaataagacaaaactatatatctacatctataatatctatacacttcaacttgctctctactctactgtatctttgtgtgtaagatatatatgaatgtgttcttcaaacttatgcttagtgtactcatattttggtggacacatggttatgtctatctctcttacatatttttctatgtttgaatagaaatgagctatataccttggacaaaaaaaatgatctatatacatacatgtgctaatctttttacaaattggtgttacatgattcagtgtcgttctttcggggacatccaataaaaaaaatgattatgtgctaatacttcaattggtgtattagggattccctaaatcaaaaagttttaaattttgacggtaaagaagaaactaactaaccgtttcgatctctataaaaagctaataaaaaaaaaaaatgaacgcctttaaataattagtttttgtgggaagatttaaaataccgttatgtatatatataacctagcatattaattatttttatttgatatatttgaatcatgtttatggtcaattttggaatattttcacataaagtgacaaatagtttcaccttcacatatatgtccttaatatctggttagatatgttcttcaccttcacatagattatatattttttaattatacatatcaaatttaaccttagtcaaattttaacccaaaaaaaacacccttagtcaaacactcaatcctattaagttttgaaattgttttggcaaattattcaaacatcactagtcattttccaattttcatacttatttacctaatatagactcgtcaatatggtaatactattttattttttcaacagctagtataaaattaaaattatacttttatttaataaagcaagaattgctcgttgaatacaaatatattcaaattatatttaattataggaaataatattaagaaagtgcatcagacgacaacaaccaaaaaaaaaaaaacttcttcattcttcaacttgtttgtgatcattacttggtaaatcctccactgttacctaaccaagaacatatgcaaaaaaagtcagccggaaactctaaccagatattcaagaactctaatctatatatgcaaagagagctatgtgattgactgaattaaaatgtaaaagaagtaaccataattgattcttgagcaaaatccatctgcctctaatgttcttcttatttttttgcctctacatatagaggagtttgattgtcattatcaatagaattcctcgatgaaccctccccaacacaaccttcttgaagacatcctgagctatttccatacatcacaacatcataagaactgtttcgaacagcattactagtagaagccgagcctatagtcaacttatcattagcataaaaccaaggctcatcatcatccacaacaatcacttccttgagcttcttcgatcgtttatcatctggaggctgaaaaataatgcaaaacgtgattataagtatttactaaacaaaagatgaaatcaaattaatcaacaaacgttaaaagcttacaataactgattcttgaggcaacacatcatctgaatcgatgataataatatcagcagacttggctggttcgctgataataatattagtagacttggttggttcgctaataataatattagcagacttggctggttttttctcttctctagcttcaatatctgccagcgagatataaccactcgagtagtcacgtttcagcttacaaagtctcacaacatcatcaacaagcaatccgtatttactatcttcaaacccatcaaagagattaggtagatagaatgggtcaaggcgcttggcaagatctccttgagtaatgctcttgctaagtggatttggaggccaagctgttcatcatcaatcacgagtaaaaattagaagcataaacaaaaggaatcaaacatttacaccaaaaatatttttttcatttattcaaacaaatccaaaaaaagaaaatatagaagaccttaagtagattggttttcgcgggaatatttaaaataccgttatgtttgtatcatctaacatattattcgataatttgtataacatgaactatggtcaatttcgaaagaccataaacatgatgtacaaaaagaaagaacatgaaacatgcttcttcttcaaatcaattgagatgggctcttacacatctacaagtactattttttttttcatgttatcccttctactcttccaatataaaaatttaagatccatattgtatagatgatttatgaataagagtctaattaagattcacattggtgatgaaaaacaaaaaagaaggggattatacaaataagaacatctctttatttctaatactttttgaaaaacaataataagaaaaaggacattctttaaaaagaatggagaatattgtatgtagacacaagatcataaatatatctataaagaagaaacaaaatcagatctgcatttgcagcaaacaatgtgtgtgtgtgtgtgtgttgtgtatgaattcatataacattggataacaatgatccatacctttcttttgtggattttgttgattagcatccattgaatcaagcagaagattcagaaatttttcttagttttgtttggaatgtgtttgttatcaagaatcagagaaaacaaaaactttttgatatagaaaatgatgttcttgactcatttatttatatcataaaaaaggaactaaaaatgcaattactttaccaaaaacgaaaaatatgatataagtaaataaaatttataaaattagtataaaatgaaaaatataataataataataagaataatattaataataaagaagtatagaataagatgtttaagctagctactttttgtttctagtttgttaataataatacacacaaaaaacaattcataaacttctaccaaaaattagaactaataaaatactaatttattaattaatttattgttaacaacgtaacttcaaacgattggcgcgaacatttaaatgacttataattttaaacagttttgtgggcaatattcaaaaatatcgttaatattacgatattcactaagttattttattagttatttttcaaaaatctatgagtgtagtattttttatttatcattggatttaatatatatatatatatatatatatatgagttattatttattttcttgcaaatgtttgcttttttgtttatatgaaatgaacaatgattattttatgtatggttaattatctggttaacaataatattttcttatttccatgtaatttgttttgatataaaattgtaacctgttaattattttaaccttagtcaaattgtaaccaaaaagaacccttagtcaaacctgttaattattttcaaaattggtaaattattcaaaacgccaacagtcaattttcatacgtatttaccttacatatattttcaatacattaatactaatttattttatcatattaaaatcaaatacaaatacaccaaaatatctatacaaaatttgccggttgactacaaatatattctttctttttttgtcaaactactaccactatattcaaattataaatataggaaagtatattaagagagagcttgataccacaacaaaaattactgtttctaaaaactaacaaaattactacacttccaattataaattgttgacttcaatgagtttttctttttttttggatagctaattaacgaatgttcaatcaatataaggagaaagctttatatatttgcttttgaagtaaataaaaagtatatggttgactactacaaatatcagtgttaagcattaattgtttcaaattagcacttagctattattgttttttcgtaattgacttcaaattgatgtgaccacatgatgaaattctaacattcttgtcgctaacaaactgcattattgtttcttattaaccctaactctctcactaatcgataccgcaataaacgtaactcatactaggattcatctaacctataatacgtctttccgtaattctttataatttggtgcaaccttgatggatctcccgataacagatatttttatatagtttgtcattgttgacacacttgccattactttgacatgtatttgtttttcatcatttggcatgcaaaaagcaagaaacaaaatgaacctaattaaaaggagacattccactcgattatggcataaggcattccaagactcacgcgatcaaataaggagtccaaagactgctagaccaaaaaggccagagatattgtatagagaaccaaggaaagtccatggatccttccaaaaggagatacatcgagtcatcgaccatgacagagcctcaagatttggttcaaggggtctccgaaaatggcaaatgtaattcagctgagggtttagttccataaagctcgctacaattaaaattaaacctgtaaggatttcttgacctcaagctgtcgacttaacttgagagtaagccccacaaaaccaagaacagaaaggacggataagagcttgaatgagagacagagaaaacagatcaataggtgagtgtttttgtgtgtgagataataagaagaacacagagagtttgttaacccagttcaccaccgaagtagctacgtctgggtcgagtatgatactcggaatccactaggttcaatatagaacttacacctagaaacaataagtgacgcacaccaatgcccttcactagcacttgatgttcactctatgtgtttctagccttagagaatacaagaaaagtttaagcttattacaagtattctctccttagtctatatcactcaatctcactctacactctctcaaacctaacaagcctcttatatagcaacaagaggtaacctatgcaatgacctaaagcagccgctcctctcactttgtcgctgagcacagctcataggagtcgccatcaccaaatcaagacaaagactgctttaaccaattgggagcaccagaggacgaacgagtacggactccttgctgtaaatgtagccgtttcccctatctgtggtcccaaaagcagtttcaccatggtctcatttacattcacctcagtaaaacatttaaatccaatgagtcatcatcttgatgggactagtagcttgatcatcaaggtttcatcttcacaaatctccacctgaaacttgatgataaaaccaaaaacttgcacaaactgtcaatgagagagataagagagtaccccgagaacctagttgtaggattccatactcggattcctcctgagttttactactcaggcttgacctgtaacaaggtcaaagccgcctgaaacttgtttacaggcacgatcttggtgaagatatcagctggattcttttcagtgtcaatcttcaccacatcaccatcaccattagcaattatgtcccgaatatattgatatcgaacatctatatgcttcgttctttcatgatgaacattattcttggagagtgcaatagcactttgagaatcacaaaagatctccacgctcttttgttcataaccaaattccttcaacaaacccttcatccacactgcttctttcacagcttcagttagagacatgtactctgcctctgtagttgagagagctacaactctctgttgacctgatttccaactgatagtgcttcctccaagagtaaacacaagccctgtaattgatcttctccgatctttacatgcagcgtggtcagcatcgcagtatcccacaaccttaaagtcactgcttctcttgtattgcaacttagttcccagtgagcctttgatgtacctcaagacccatttgactccaagccagtgttctctagccggttgactcatgtagcgactaatgattccaacaggataagctagatcagggcgagtacctatcattgcgtacatgatacttcctactgcacttgagtagggaattgacttcatgtagtcctcgtcttgctcttgcttctcaactgtggctgctcgcatcttcaagtgagctccaagtggtgtcaccacatgttttgactctgccatgttgtaagtctcaagaattttattcagatagccattctgtgacagccacagagtgttctcttctctatttctgataatctccataccgaggattcttttagcagcccccaaatccttcatgtcgaatctctgactgagttcttctttaagctgagatatatcttctttgttcttagctgccactagcatatcgtccacatacagaagcagataaacccttgaaccatcactcaattccttaatgtatgcgcaactgtcatacaaactccttataaagccaatctcagacatgtaagcattaaacttctcattccattgctttggagcttgcttgagtccatacagtgacttattaagaagacaaacttcatcttctttaaacatttcttcataaccttcaggaggtaccatgtaaatcttctctttcagctcaccgtgtagaaatgctgtctttacatcaagttgttccagctccaagtcttcttgagcaacaatagacatcagtattctaatggagacatgtttcacaacaggagcaaagatctcatggtaatcgattcctttacgttgagcataccctttggcaacaagccttgccttgaatctaccttcttcaactccaggaatcccaagtttaaacttgtagatccacctactaccaataaccttctgatgttgaggtcttttgaccactgtccaagtatggtttttgatctgtgactccatttcttcattcatagcaagtttccacttattccaattcatgcttcttttagcttcactgtaatctgcaggttctatttctccactgtcttctgtagtatagagagcttcagcgagatagtcttcatcatcaaacctcactggagctctgattgttcttctatctcgatctctcaccagttgataactcagtggtgactgaattatatcagtttctgagttaactccttcactgtaggtttgagtggttgccggacttggattgaatggagactgagcttcgacaatcggatcatctccacctgaggtgataacttcttcatgatcaagatccaaatccaaataagagcttggtggtgcctcgttttcatctttctcagcatctttactctgcatcatgtccttgtaagatgcattttcttgaaaaatcacatttctgctcaccacacacttcttctcttctaacaaccaaatcttgtaacccttaacaccaataggatatcctactagtattcctttcttagctctcggattgagctttccatcgtcagtgtgaacaaacgcaatgcacccgaatcttcttaagtagctgtagattggtgacttccctgaccatctcttgtctggtacttcatagtttagagctgatgatggggttttgttgatgagtatagctgtcgtatgagtagcctctgcccaaaacttctttggaagaccagaatcactaagcatactcctgactttctccattaaggtcctgttcatgcgctctgcaacaccattctgttgtggcgtgtatgcacacgttctatgccatagaatccctttctgtgagcagaactcatcaaatgacctgttacaaaactcaagaccattgtctgttctaagagtttttatcctcttgtcagtttggttctcaacaaggttagcccattcaacaaatttatcaaatgcctcatccttagtcttcaggaaataaatcctaacttttctagtgtaatcatcaataaacgatatgaagtattgacatttacctagagagaatggcactgatggagctccccataaatccgaatgcacatactccagcttctctcttgtatcatgttgagctaagttgaatccaatcctcttagctttcccgtatatgcagtcctcacatgtctccagcttggacacttttttcttgtccaaaagaccttttttcagcaataaatccatgttcttttgactcatgtgtcccaatcttcgatgccacaagattgtgtcatcttgtctcttcaccacagagagagactcttctgttactggtctccactgtaacaggtagagtgtataacaccttcttactgtgagtagaacactgtctcccgcaatgatgctcagtgttccattttctaacttgaaactgtagccagacttctcaaatgttcccagagataaaagattcctatccatttctggaatgtatctcacatttgtaagacgaaccaccattcctgcttcattcttaacccggattgtgcctattcctctgacctttgaaacagtcttgtttcccatcctcacagacccaccagcatcctcattcaaatcttcaaaccattcacgcttgtatgtcatgtggtaactacagccagtgtccatgacccattcgtcctcaagatgtatgtctgtagaagacaaagcttcagaaacataaagcccattagcttcagagtagttactgctaccgtttgatgattcacctttgttgttgttgttagttgtctttgtctgaggttgtgttttgttcttgttaggacatgaactcttgaagtgtctgtgagacccagtcccggacgtctcggcgtccggcgaccgtgtactcaagttcgcgcctctccccggccgaaccccttaatttttcgcgattcaacatagaattgcctttacgaggctaaattctataatcgctctcttattacacagcggaagtctttctaaccttggtttaattctaaccaactcttgtaccagtttcatcgtctttgtcccttagacttagatcgatcctttactcggtcaagacatccatatgttcgctaaccattctaagccaaacaatcgcatattcctttatcctactttcacggtcaattaccaaacgtctatcttaactaataagctagatcgttacataccttggccaatatgtggatttgattccttagcccgtttgtcgccttactccattcgttcaacgactcgttatcggtcgtgaattgatgaaccaatccctatcgttacttagccatacaaccaaccaaccccactggtctaagtacaacgatagagattggggatcgtacgattcccttggtttccgatggccgaatcaagctcttggcttattggtccattcgttctccaaacgtacgcccctccggctacatggtggacgattgagccctcggcttatcgaaccatccatgtttccgttccggtcgtttaacactacgaccgcccacggtttactaaccgtttacccgttcggtccatggtggtcgataaagctttcagcttaatgatccatccatgcggtccgaacgatatccttatcacacccaacggtccgtggattcatccactggatcatcgtaggctagcccatgaaatctttcttccgtcggtcttaggtttgcttgtgggtccaacatccgttttgtccatcggttcccaccgtggactttcccgttggttatccgtcgagtcaccctttggacttaccgatctctgatcggtttcaccatggctaaggagatagatacatgaaggcggccgcgatgttgatcctatatggtgaatcacgttccttacccattcttggtgctttctccctttatcggtaagattgcatccatgggcgacccttgggtgtgttcggatgcacttatccttgtgcttcctcgaacacttttctcgatccatcccatccgacgattggtctgtctgacccgttccgtcagacgatcggcttgtcccatccgacccgtccgacgatcggtctgtcccatccgtctggccgatctgatccgtctgacgatcggtctgaccgatcctatccaacgatctgtctaccagatccgattcgtctctaagacgaacggtctaccctctccatcctctacactccatcgaatcgttggaccggaaggtagcatgcgcatcagttcgattgagttatactcgccgagccgcaccccctttccgaccaacaactctaggatgtgttgggactcctttaagaatgttttatgatgttttggatgttgtgagatgatgtgagattattccaaaggccttgggcgtcctcccttatatagggggcgaatagatgcttcccaaagcatcacatccgttccttgcacccttccgaaaggtcacatccgttcctttcacccttccgaaaggtcacatccattccttgcatccttccaaaaggtcacatccgttttttgcatctattgggcgatgcaaccgttcgttggtacccgctcgaccttacacgttttggccgagacacctcttcacccgtgagctaccacagtccaccagctcgagtgtcagctgactggaccacccagctgggtcagtacccgatcagctcactgagctcaatcgagctgtcggtctgctcacctagctgagctagctagtcttccagctggtttagctcacctagcttagctagctaattcatcctagcttgtctagctcacctagctggttcagcttgaactttctcgttcttccgactaagtattttagtccgtttcttgaccatggtctagttttctcctaaaacaacctggcctctttatgaacgcgggacgcgatcgttacagtgtccctcttcaccgcaaatccaacaacccttcttagatctagatttggatctagacttcttgttgttgttgttgttgcctcgctgttcagtccttcctcttgtctcagtcttttccttgacaaagagaccttcagcctgacccttaatactcttcttgttagaccctaactctagttccttagagtagatagctgctacaacctcatctaacgataaagtgactcttcctaacccatacttcagagtatctctaagttgatcaaacggcttaggtaatgacatgagtagtaatatagcttggtcttcatcagaaactaacacgttcgtgttctctaaatcagctataatacgcaagaactcatctatattaccttctatgctgaggttttctgacatcttgaagctgtaaagcttctgtttttggtagattctgtttggtagcgccttagacatgtacagtttgtcaagcacgcctagcatagcagctgcagactgctccttcttaatcttcctcaagactctatcagtaacactcagcacaatggcgcttctcgcctttctccttttttcttccaagagctctcgtctcagtacctcttccttctcttcttcttcagtaagctgcatctctgcaactttctccaccaaatcgtcttcttccttaagagccacactcaggcctagaatgtctagatgcgccatgagcttctctttccacatcgtgtaatccccacgaccatcaaacttttcaacctctattcttgctgcagacatagttcaggatctttgaatctttagagatccacagaacaatgaacctatggctctgataccactctgtaaggatttcttgacctcaagctgtcgacttaacttgagagtaagccccacaaaaccaagaacagaaaggacggataagagcttgaatgagagacagagaaaacagatcaataggtgagtgtttttgtgtgtgagataacaagaagaacacagagagtttgttaacccagttcaccaccgaagtagctacgtctgggtcgagtatgatactcggaatccactaggttcaatatagaacttacacctagaaacaataagtgacgcacaccaatgcccttcactagcacttgatgttcactctatgtgtttctagccttagagaatacaagaaaagtttaagcttattacaagtattctctccttagtctatatcactcaatctcactctacactctctcaaacctaacaagcctcttatatagcaacaagaggtaacctatgcaatgacctaaagcagccgctcctttcactttgtcgctgagcacagctcataggagtcgccatcaccaaatcaagacaaagactgctttaaccaattgggagcaccagaggacgaacgagtacggactccttgctgtcaatgtagccgtttcccctatctgtggtcccaaaagcagtttcatcatggtctcatttacattcacctcagtaaaacatttaaacccaatgagtcatcatcttgatgggactagtagcttgatcatcaaggtttcatcttcacaaaaccataacacgtaatatatggtccccaattgaatgatttaattaagaccgtaaaacattattgatttatgatttaatattattgatttttcatggatcttttgtctaaaattctctttatgatattttttttgatgttttacttttggtatttcaaattattctttatatattttgtttgtttgagctttgattctattttaaaatattagaatttcttatttataaatcacaatatttcatttcttatagcatatatgaacgtttaaatcgcctacaatcatctagattgcgattaggtgttccaacgcttcctcaaacagctctacaaatacattctccaacaacgcaaccataataaaagtctttttggcatcgatgagattggggacaatcacgatccgtcttgcaccgatccaccttcgtcggcttaatctcagctgttagactctcttttaatgtcgagctagtggcttgaattccagatatattcaccaacagcgtgcctataaaatgcaaacatataccacattttatttagtctcttagattgatttaatcaatatatatatagagagagagagagaagctaacatgaaagacaaagaacgaaaacgatgaagattgtagtttttgatgcggccatgtctttagcttgaaatatttggatatgaggattatttatggtttagagtttataaaacacgttatgatatctgtatgtggtggtttggatgcttatatattgtgccttggagcatgaaattggtaatttaattaatacataatagaactttgacaaataagattttggcaattaatttattagtgaagactgaagactacgaaggagaaagttaggaataatttactttcctatgatcttatactatttaaaataatattttatgtaattccttctcattcataatttgttataccatttggaagtaatatttgatatatatgagatttacataatttatccacctcatttggaatcatatcacaaaaatatttttcaccaaatttgacaaggaacaaaaagaaacaatattctttccttttataaaaaatgtaatattaatttatttaacaaaatggattatttacaagaaaatatacaaatttcacgaaataaaagaaatatttcttataaattccatgaaatttgtttttttttgtaaataaaccattttgtaaaattaattaatattacattttttaaaaagtaacaaaggttttattccctgtagtttgttctatttcatttctcttcattctttcttctttttgttcctattattttaggagttattattaaaaataggcatttgttgggttggaaattagagattaggaaattttgtaatgctttacagaattaaacatttctggttttgtgtcttgacaattttacccttcattccactagagcgaataatgaaaatttaacttagctttctaatgactgaagtgaatgccaataattgtagatcgattatgtgctaggatttgttgctgttgggattagtggacaagattaattttcatttacaatggatatgtttaagctacgaagttgttgtgtacaattgtagatttttgaaactgtaaaacaagattagaaaagaagaacatcacaggagaaacctgattgaggtcacaatattacaaaatttacaacttttgcagaaacgaatattggtttgggtgtatacaccaccgagacattagtagtatttggttcatgaaatgaaatcatttttttttttttttgaataccagagattctgggtcaaagtccgtaatcctcccaaatctgaaaccacagcatataatattagtttagtctcaagcgtcactcgaaccggcaacctctaagcttcacctagggtttttaccaattaagctaacgatatttggtataaatgaattcttttttagttacactcagatggatactaggctttacagacaaagaagtcgagagtgcacaagcaccaatcctactaaatccattttgatcacttcacaacatgatatcaagtgaaatggatattatttatgaggaagtgtaatttaataatctaggttacacctatgtgtatataatgcaacaaacaatcaattagtaaaactacaccccaaagcgaattacaagatcaacacaaagagtcacataaatgtgcattcaagaaatgacaataaacactaaggtcttgaatatgggagaacccaattagacgagataaaatgcaagccaataacaggtaattaggactacaaaacaaagagataaaatgcataacatgattcaaaattggaaactaaattgaacaatcaatgagctaactagggctattagagtaatcaacacaagagaatgcatcaaggtaaagaaggagaatcaagcacatacattagtcgtatgtgactaacgaccaatgaattagtgaaactaaaccctaaagtcaattacaagtatcatcccgagggaattacataaacacctattgaagaaaggaaatactaaagaccagagaacccaatgggcatgataaaacacaaggcaaagagctctaagtatcatgacagagaagaagaggtaacacaccgaattcaacacacaatgaagaaagaacattacaccatgagagacgtacgatgcttccattcagtatccattgtaggaattcatcaaaccagagaaagcattacttgaatatacattccatcaaccaagcaaaaagtcgtgactgaaataaactacaaattcaacaaaacaaacgtgttttgtttttatcaaaacgtcattgtctagatttattgaattaagctttaactcttagcaaatgattgagatagtttaaacaaatatcaagaacttaacctaacgtaagctataaactctatataaaaaaatccatcagtagagatagtttataaaatttgaaaagaaaaaaattaaaaggcttgagtccgatcaaactactaattaaaagccatcactaaattgagcaagaaggtgtaaagacatttatatgaaaaaaaatatatatctttttaattaatgtttttcaaacataagtttacataaaaaataaaaattcactcgaatcaaaattttgttttgactcgaatcgaattgaattaaaaaagtcaactacactaaatattcgaaagaggaaactaacaagtttacacacaaaaaagcccacgtgactcttttttctccaagagacgtctcttttcctcttctctcctttgttctttcttccaaatttcccaaatccctccacaataaaccctagaaaatcaaaattcgctactatttctctgttccctaatttctttcgatttcaattcattagtcctaaaaagctttaatttttctaatcccccagttctccttcttctgcttctgaatcgtcgtttaacgtattgctccgtcttttcactttctccgccatggctacgcaacaacagcaatccgccattaaagtaagctctgaaggtgaacttaagcttctttttattggggtgttttcaaattgaagtcttttcaattctcctgtgtttggttttagggcgcgaaagtgcttatggttggagctggtgggattggttgcgagttacttaagactcttgctctttctggattcgaggacattcatattgtaagtttctcaatttctttccactttttctgttttcgtgacttttagtattcttaacttgtgatttcttcttcttctctattgagattctgggtcacagacgaaagtttaagcatttcaaatctcctattgtgctactggatttgattggcatttagggttattgatgatttgagtaatttcaacatctttgagcttttagatcaagttaagtttgacttggaagatggaatcatatgtctctaggaggactctctgtttagctgtcttcgccaataggtttagtgtaatttctaagactagttaggctatttataatttggtgtgcatgaattgcttctgttttaattttcggattttgtagatttatgattgatgttttgtatcagaaaccatcggatttcacctgtgctcctactggatttctgtatgaatagagcagggacttataagattagtttgtaaccgtgattaagttactgaactcttgtgttacagattgacatggacactattgaagtcagtaacctgaataggcaatttctattccgtcgttctcatgttgggcagtctaaggctaaggtaattttgcttgagctaagtccaaggaaagccagttcataagagttaatatatttttaccatatcaccaggttgccagagatgcagtcttgagatttaggcctaacattaatataagatcataccatgcaaatgtgaagaatcccgagtttgatgttgattttttcaagcaatttgatgttgttctgaatgggctggacaacttggacgcaaggcgtcatgtgaatcgcctttgtcttgcagctgatgttcctcttgtagaaagtgggacaacgggcttccttggacaggttattctgcttgccttttggtcttgcagctcttctttctcttatcattattctatgagttagatgcactacaatgttaggcttgaatggtgtactgttgtcatttctctcgtatctgactttgcaatacttgcttgtaaaaatcaggtaactgtgcatataaagggaaaaacagaatgttatgagtgccaaaccaaacctgctccaaagacttatcctgtgtgtacaataaccagcacgccaactaaggtattaacactgtcttgtttgttccaaatttttgtgaatcttggggaaattatattctatcttggcttatatagtattatcctaagcatagagcttgtttttgatgtgccgatgaattttgaattgattctgcagtttgtgcactgtattgtatgggcaaaagacctgctctttgcaaagttgtttggcgacaagaatcaagataatgatcttaatgtgcgatccaacaattctgcaagctcatccaaagaaacagaagatgtatttgaacgttcagaagatgaagatattgagcagtatggtaggaagatatatgatcatgtgtttggttctaacattgaagcggctttgtccaatgaagagacatggaaaaatcgcagacgaccaaggcctatatacagtaaggatgtcttgcctgaaagtctgactcaacaaaatggaagcactcagaattgttctgttactgatggtgatttaatggtctctgccatgccatcgcttggcctgaagaatccacaggaattgtggggtctaacgcagaattctcttgtgttcatagaagcattgaagttgttcttcgccaagagaaagaaggtctgtgtggtcctttttgtaaactctccttgtctatagataagtttcggtgcactgattaattcatggttttatcgatatgctgccacaggaaataggacaccttacttttgacaaagatgatcagttagctgtagaatttgttactgctgctgcaaatatccgtgctgagtctttcggaattcctttgcacagcctttttgaagcgaaaggtattgctggaaacattgttcatgctgttgctacgaccaacgccattattgctggtttaattgtcattgaagcaatcaaagtgctgaaaaaggatgtggacaagttcaggtttgttactttgaaatcgtctgtgtttcataaggttttagcgttcttgatatctatttaaaaatcatttttgttctctctagaatgacatattgcttagaacacccaagcaaaaagctgctgcttatgccaatcgagccatatgaacctaatcctgcttgctatgtctgttccgaggtatacacatcattgttgtttagccttctttcataagcttccttgtattaccagtcatctgattttctttgtggtttttatcaacagaccccattagtactcgagatcaatactcggaaatcaaaactacgggatctagttgataaaattgtgaaaaccaagcttggaatgaacctaccgttgattatgcacgggaattcgcttctgtatgaagttggcgatgatcttgatgatattatggttgcaaactacaacgctaatcttgagaaggtttggtcttgattgttctaccatttgcaattaaaacacaggtttagatatcgcaatttctcacatgcttgtaatctttttcagtatctatcagaacttccttctcccattcttaacggaagcattctcacagtcgaagatcttcaacaagagctatcttgcaagataaatgtcaagcacaggtttttttctgaaattttgaatcctgttttaaattcagtttggtttctgattatattaccatcgactttccctaaactcttccatttcactgaatcacgaaatcaagatgggttatcattagacatcatcctaggattctcaaatgtaactattaggagagtccttaccatgtttgaaactggcagacgtttaacgcatcctttacttattctgttctgtcacagggaagaatttgacgaggaaaaagaacctgaaggaatggtactctctggatggacaccatctccagctaccaatggcgagagcgcatcaacatcaaacaacgagaacccagttgatgttacagagagttcctcaggatccgagcctgcttctaagaagagaagactctctgagaccgaggccagtaatcataagaaagaaacagagaacgtcgagagtgaagatgatgatatcatggaggttgaaaatcccatgatggtgagcaaaaagaagataagagttgaataggccccttttttgaaagatctgatccctaaatgcttgctttatttattagcttctttttacttcgatctaactttctactttctgaaattatgccacaagaattacaaagtatgatttagggattctttgatgaagaagaaaactactcagattgttaaatatttactaggacaggatcctttggatgaggagctcaggaactcattttaaggaagcaatttttgctttccagagattcctgttatgttttcactaactgtaagagctcccttgtatctttatttcttcgagttatcaaattttctgtttttttttttgtttttttttgtttaagaaatctcaaactactttttcaatattaatagactaaagaatcggttgattatgaaaagatttacatacagtttatttgaaaatttgttttttgaaactaagtatcaacaataacctattacaccgctgtagaatacatttccgttacaaagcaagataaaaaaaaaagaaaaaaatttaccttacaaattatacaacaaatccgattacctcaagaggatcaatgtttcatttttctaactcttcacaccgtttggtttggtgcaaatgcttcatcagtttattatcttccgttaaggctagcaaactgagtaaacatggtggttccagagtgttggtccaccgttgagtcatccttctcttcagtctgagaaactggacgttcacttgctgcagcagtggtggcagcaggtgaagtcggcgcagcagcagggacagccacaggcttgggagtctcaacctcctcagcctcagctttaccctgagaaaaagcctcttgaagctgaagagcatattctaagttccacaatacatctcccattgttggtctatcaacaccataatctgctaaacacttctctgcagcttctgcaaactttttcattgattcaggattcacagcaccaacgagatgagggtcgatgatcttttcgagtaaacctttttgtttccatagcatagcccattcggctaagttaacttgttcccttggaagctgaggattaatggctggtcttgcacatagagcttctagtagaacaacaccaaaggaataaacatcggatttgtctgtaagttgctgtctcctgaagtattccgggtctaaatacccaaaactacctttcacagccgtactaacatggttttgtccaaaggcaacgtctttggagagaccaaagtcagcaacttttgcaactaaagcttcatcaagaagaatatttgtggatttgacgtcacgatggataatgccttgagctgttcctgtgtgtaaatagtgaagtccacgagcagctccaatgcagatctccagtctttgtttccaagtcaaaggagaaagattcttcccataaagatgatctctaaaaggaccattggacatgtattcgtatacaaggatcatctctgcgttctcatcgcagtatccaatcaatgagactaagtgtctgtgtctaagcttagatagcatctgaatctctgtatgaaactctgtgatcccttgctctgactgtggattgcctcgtttgatagcaacttgagttccatcgtcaatggtaccaatgtaaacgttaccaaatccaccaacaccgatgatctctgatgcatcgaagttctttgtgacttcttgaagctcagagagggagaaatagcgtccgaggccaagcgcggaattgtacaagttggatttgtgagaacctgttttgcttgtcatgaaggtactgtcaccagcgtgtattggaagtaaccaagaagagaaactgtttctcttctgccaatcttgtggtctcttcttccacttgtaaaccattgctccaagacctacgaaggctccaaacatcatcacaaaacccgcggttgcaaccatcccctgcttccccatactcgctctttgaccatccactccaaattctccatcaagactgttcacagagttgctcatcttcaagacctcgacaccgttcaagatcgcgttctttttcccagtgtcttctcccataggaccaatctggacctgaagctcagatgtcataagtgtcgagttcaccacaatgtctttgtagtaaggagcagaaagatctccagctacagtggacaaatctagcccggaaatagcggtctttccattgatgtaaacgttgaagtagaggtcattaagagacttgctgatgatgtcacagaaatgaagacgaatgaagtagtgaaatgatgggtttgatgggaaattccatgtaacattgaagttaggatctatggtttgagaatcagccatctctgctcctgttgcgtaaaccgtttgtggcgctatcagcggtgtaactccaggaggatagatgatcgctgtagggtttgttttaacatccttagctagattctcatcttttaagtattctttgtcaggtgtccaagttcttcctagtgtgtcattctgtggcgtgatcaaggggccaccaacattaaccctgtaaacggactggtatgcgtaatcagacaaacccgaaaaaccgttgacagggaaaagagaagtgcctgcatcagagataagttcgtctggagctgacacaagttctataccgttgatgaaagccgcagagcctttcataggcttgaaccttagggcgaattgtgcatcggtcatgttgaggaggtactctttctgaacagtagcttggctatcattgttgtcgttacttagtttaaagttatgaagcaagacatacttctctgttaaaacagagaaagttgcttgttggagatcaaacttgtcattgggaaaggcaaagaaatggagacgaacccaatgccaaccaggacgggtcaaatggaacttgtaaatggcttcttcgcggaagattttcgcggtaaggtaaataggagaagggagtttatctgaaggtggagcagagacctgaatatcgtctttggcttctatgtactgaaccgtttctgagtcactcttaaagactctaccttcaggggttttggttgatgacttgctaccacaatcaatgagaatgtcatcagccggtttgaaaccagcagttgggctaccaccgacggcgccaaccgctgaagctaggccggttaagaagaggaggatggtgaagaggagagtcatgaagggcctggaagaagaatctaagacaagacacatgggtatgtttggtttctttcttatctccatccctccttcgtgaagggagagagagaagagagaagaatgaggaagaaaatgacaagacgaaaggaaacgagattgttgggatgcttgtggttgaagaaagagcgagggaaaaaagggtacgaaagagagttgttatgtgtggctagtattcttattgtgtttggttataaatagtgatgtttctatttttagtaaactgttaagttgactttgtgaaaatgattctctatttcaagaaaaatgaagaactaggagaggaaatctaactagatctagttatcaaggtttcgaagttcaagaagatgatctttgagagcatgaagcaaaaaccaagtagaaatacattgaatccacatagtgtatatagtgtgtacaatggccaaacagatgttcttggccagacaattgaaaataaaagaaaatagccatgggtgtcgtgtagttatgagttatgacttatgataagctctttttgtgtcgtttgaacatttctcggtaagtcgcagtaatttgatcccatccggttaaaaaaacgtatggtcgcttctcgtacgtctagcactttctattttctttttcctttttactgtaaagagttctgagggaaattattcactagagcggccgttgtcaattgagaaaaaaatgctagcaaaatacagttccttctttataaataaacaagaacatgataacacgatggtcacattcacaaactgcaagcaaacacaactaaaatttagtaaacttcactagacatatatattgattcttcataagccctaatgaaattcgtgcaaacgatttattcatgtaacaaagacgtcatatgattggtgttcatgggtggttgtggttatggtggcctggaagcttgtccttgatcttctcgagaatgcccttcttctcgtgaggttggtcggtagtggcaggtcctgttgttgtggcggtcgctggtgtttgttcgtccttgtgtttgccgctaccgaacttctctttaattttctcctttatgctcttcttcctcctccctccttgcccatcatcctcctatttcaacatcatatgcatatatatcgttaaaagatcaatccaaatacataaaacggttttatagaaaaggcgcctatcatatgactggttttggatttcttttttttctttcaagtttgataccttgcgataatttgtttttagagtatcaacaacaaatatgaaatttcattttcattgtatctatatagttgtaaatatgagagtgcgggaaagtgttaactactacaacttatatctagttttttatttgaaaagaaaagaatctcaccgagctagagctagatgaacttccagaccgacgaagatgctcttcaagcgacccatggtgttgctgccctgtggtggttgctccagtaccagcagagactcctgtcgcagtggcagcggtggcagcaccagcaccagctggagcagctgccggatgtgtttctccaacggtgctagtagggtgctctgcaatgtcgctggtagtactctccttatgctgaggagtggagctaacaacaccggttaggtacatggggttaccgtgctcatcagtcaggtcgacaattgggtttccctgtgtgtcagttagatggatcggattacctttttcgtccctcaaatccgccattatattattaccttttagcttctgatctgttttgtgtgtgagatatataccctttcaaatacagctttgaagaaaacttggtttgggattgattcaagtaggcatgcatatatattagacatgttaatctgcatggatatgatacgtggcgtatttaatgtgaaatgtttgccacgcacggatagaattagagttccatgtgtcatgtgtgtactttgaaatgtgtacgtcacgaatccgacatagtaataacgttttgccttttttgatagattcggtagataacgttatcttttaagtacggtgctttctatgttccatggacacatgtggatttgatcagggcttagaaccgctaaagaaggtcggtgttccgagttttaaattcttgacgtattctgattggtaagtgcaagtttgtgttggtaactaatttcataaagcactaaacaaacgaaccatggaagttaacgttggatcataatacaaatctgtttagattggttttgaactgaaacatttgtttagaaatggtttgtagaagtatataaaaatcgtataatacgatcccacaccaaataaaccaaaacatataaatataaatccctcgatctgattaacccaattcacacctactggtgcacagccagatcatttttaccttatattgttataattatatatttacaagtgtaattgggaatgcacaaacaaaaaaataatgggagactagtgagaaacttttctgtaatacatacacaaacaagtgtgtacctttgataagtaaaacgttacgttgacttcggccctagcttacgaactaagaagagacacagcatccagattctgaaacatgattcaacaattatagagtgactcgttattttgagttcagattcatgagagagagaggagcttacagtttcaaattttgctagatttggtccaaaagaagcctttctttctaagagagctcggggaatgaatctcttttggggatttaacactattacttctggacccgaaagagaagtgtctagcaaggaaaggctttggggaatagcttctcaagcttgaacttgatatcagctttggggttttacctttgtatcctactgccgcttcgtggttgttattaaacttgacaaattcatcgctgtccacaacgcggtttcttagtctcttgttgtgtctagctttcatttccaaatctgcctttaatgctttttccgacagtttgaatgttttcttctcacccagtgtgcagatgggacaagaaggatcgaatttgtcgatttcaggtgtcatctgctctaaacactctgaatgatagacgtgcccacatgctagaatcgcagctacggagagctcgttagtggcaaagattttttggctactcaacaaagatttctcagacaaggatctcgagcaagcaccacagttttgctgatcattggactttctacttccaagattgtctatcttgtcacgacgaagcccaaagcactcgttatcgtaagagcaagactctctgcgagaatacgccatcatttcagaaaaagcttgcatggaccaaccatcagactgagattcattccccagcctctcttcagttgctgagcttctgctcggtgaggtgaatccaaagatttgaccatatgagacttgctttgatagacgagggggcggtgtcagctttaattgggatgaacttgcaggtggcattggcaagtgggactgacttgacagtggtgacactgagaaggatgatggttgagaagccaatgaaagagacagttttgcaggagatggataataagtagggtcggttgaatcatttgttttttgggtgatctaaaacagtaacataggagtcatattaacagagatacataacaaatatatagctagcagtgaaacaaagcttttaagtatttacctgttcagagacagagtcaatagaggcaattcttgaaaatgattgatctgccacaacaataacgtgatatcacaacatggaaaagtcatagtttaacaataaaagcaagtcaagaaacaaacaagagaacagtttatgtcaacaaacatatcaatgtcattttcactcattaacagtctctgtagaaaagtaatcctaaattctaagcgggttggtcaaaaagaaggtgcctacattttcccatcaagtctacattttttgacaaatcaaagaggtattgcctgtaagcagcaataaaggaatttaccagaagcaggagatttctgccatgactgcgtctgaaaattgtccaaaggagaaccttgtgatgatacaagagcagtttcagatttgacatcagagacatcgttacgactaatccgatcagataacaaactaacagaggtctcttcccctgccacgcgtcctcctctattatcccatcggaagctccagttaggagaatacctcacattgtttctttgaaaattctcgactgctgatgtattaggcacaaccattttgtctcgagtagcaacacaacaagcattccccataactgaagcgtgttattgaaaactactaagcaccgtacaacgacactccggttagatgttttggcgcataaaaccacctcaaaaccttccaacaaaaaaaaacacaattttaagaactcaatcagaatcaattatgactataacctcaacaataacactaaaaaaaagagcttaccattaatctacacaataacttaaactggccatggccaagataaatgaagttcaaagtagaatgaaaataaagagagaatcaaatccagtaatccattgctgactaacatgtaggtgagtgaactgtgatgactattcttcactaagaaaatccaaaatgaaaaatcttctcaaaggcactaaaaatagaaattgaatcgggcaatatctacataactaacattaaacagatccgatattatggccaagggacttgcaaaccaagtcgagattacccaaaatagaaactaaaaaaaaaactaaataacaaaatcgaaaagaattaagcatgtgagaggacaagtgatgaacaccgaacctgctctcggaagtcggaaaacgtcgccggaaagttttataacgaagatagtttcttcacatagctagcgagcgaggttttttgcttcgttctctctctctttttttttccttgtgaaggaaagagacgaataaaagtcttctctgaccggttttgtttaacgccgttagactcccattggcttgtaccggttaaagacccataaaccgttccgattggcgtgtggtttaggttgaggacccataaaccgtaccaaatgaaatgtcgagtgtcagcagaccggtttgattagtattcggtttaatagaaccaaacactgcattttaacttgttttggtctgttgtcgttagttttagcggaattaggctaacgatggcacgtcatgttaaaacgatcacaacgcggaaagatggaaagggaataaaaacgcgattcaaacacgcccaaatacatacaatattactattcactattattttttctttaccgaaagtaaattgtaaattttgttccttagatcatttcatcactagctctgaatgtataagaaatttgaataatgtgacgaaaagattttaatgagaatgcagtaatgcaccaccttaaatgtaacatctacacgaaaaaaaagttaacatagaaagcaatctctacaaaactggggaaagtaaaaaacgaaggacaaatccaacttcaaccaataaaagaaacagcattttaagttccggagtttcaagacgtcgcctttgaagaacctccggtgtccattttcacggtggtggcttcccgacgcaagctgcttcctctcgtgtacggcttcttagcacccttcaaagaaaaagaacagagaaattcactaaggttttgagttacatgtttttttcaaaaagttttttttttggctctcgacatcttaaatctaaacacaatgagtgtttcttttatgttatgatacgaacccttttgttcttcttgctcacctggaagatcgttccaagtttcttcagtcctatggcacgagctcgaagaacatccttcgaaacacttggatctttaagcacctgtgagagaaagatacatatataattaacaacaagattaattcgtcgattgttgctacaaaagaaatggtcatataatgtatgatgaagcatagtatcttacagattggcaaacacgagatagcgtggattcgatgtcgagaacattgatttgccaaagagattgaagcaaagcatccattttagcttcaatagctttctgaatatgttcctctttgttctctccttggtgttcattcaacttgtttacttcatcctgcaactgaagtaacgaaaccgcacctacagatccaaaacaaaatcatccaaagcaattagtaaggattttgtttaagttagaaaaccaaaacattttggtttatatttagctttgtttcataccagaagcagccatcacttgagatttcatatggtggcctttgtcacgcacccattcagctaagaatggtactttcatatatcgcttgtctttcccgatttctttagcagcttttcttgtgtaaatgtaaccaatagtatgcatcattgcctcgccaaaaccttaaacatccagagcaagaagatgtaaatctttctagtttatatatatacattgaaagactttcctctatagcttaaatgcaaaacttaccggcagaagaaagccgctttgcctcttcgtttgcccattcgataaattcatctgtttgtctttccacaaagggttcaagtttgtttttcaatgtagcggcgagcttgtcttccctctccttttgaagagcctgcacacaaatcccacgttaatatatggagaaaagtagctaaaaaacatcgacatgtgttaaaatagaacgataaataaacaatgtactttgatcttgtcttgaagcatttgctttctgatttcagggtcatgtgattctaagtcagcttcgatagatgccaaataagcaagtgcaagctggccaacgtattcttcaaagacttcgcttccgaaaagcataccaaatacagctgcaggatcaaccattgcatccctgcaaatgaaaaatcaatcacaaaccgaagttggagatgcaaagttgtaaacagagaggacaaaacatactgttggaccccttctttgccatatttgtcataagctgctcgcttatccggattgcttagaacctgataagcctcacctaaaacctttttcattcatgaaaatcaacaaatgagagacgtcatcagcaatttgatgtgattccagtaaaacaacatataaagaccctggaaagaaacagtaacaatatgacaaaacacctgaaagtttttagcagcttgagggtctccagggttcttgtctggatgaactttccttgcctgaagagcaagcaaagaaaggatattcacaatataaaatttacattataacttaaagccgagtttttgcacacaaaaagaaaagaaaaaaggacttacttttaagtagtaagcctttttaatctcagcatctgaagcatcagttttgacgcctaagatctcgtagtattcagtctctttcaccatgacttttgtcaaccaatgtgaaacaaaacacaaatcaacaccaagattgcagatttgatcatgataccaatgtatgcggaaatgttttacgatttatttccccaattttcttgagatcatcgaaaagggatcaaagatcgattttccagataaaccagaattggggataaaaaaaagaaaagaagagaaacagatttgagtggcaagatcatgaatctacaatctagacataagaaaacagagagaaaaggcagagaaacgtactgatgatcgtgcagaaatgtaaatgggggcaacaatatctctcgattctacttcaggtttgttgttttatacgacgcgcaagagtttacggttttggtttttgataccagcatcacaacgaagtagatttgatagagatagtcgaaacgtgtgaccgtgtccgtgacgtacacatctctctatataattaatacacacgtgtccgagaatgttacgactcaaccgtgttcgagggaagaaaaaaaatatatatatctttttagggagcgagtccatggagtatcgaaccctgctcttcagagccaaaagaatagtgtctgaaccactaggctgtgagtaactttttgcaatttaaaaatcaactctttgcttagatctgatctcttcgaccatcggaagttgaaaccctagtttctttgcgagggtaaacccagaatacatctaagagccaaggaaggtaatgtattcatttttcaacttatcttgtttgtatttggaagaaaagtgagagttctagtcttctagatgttttatattgttcttcatttactcaattttttcacgcagtgcaaacattattctcaagatgacacagagaacttcgagtcagatgagtacagagaaaaccaagaaagtagcagagttaaaccagactcaccggttaactatcaaacctacttgcagtattgtttgtttgaaaagctgcatgcgatcattcatcttaattgttcggtttcttactcctctgcaaatcatacttattaccataacgtgatctagaagtttcaacaagaggctgatgcatagaaagctgatgaagaagctgaaactgcgggtaatgtaagaagtcactgctttgctcattttatcatatgctttagtgatgaacctcctttttgtaaaatcatatttgtttgtccggttctgtttgtgcatgtatattcagcaactacgatttgtcgatttaacctgaaaatttgattttttggcctggttttgtttcaaccaactggattagtttactcaaaattcatttcagaaaatgatcatttaaatgttgtggttcttgcaggcgaaatgcgaggaaacgcaggtgcgaggtgtgttgctcaagtagaaaccgagaacggtccaagatcagaccgtacagagttccaacggtggattatttagcaagacaaattctgggcttctttttgattatttagcaagacaaattctgattttcaagacttgatctagaatgtaattactattttttgtccaactggatgcattttgtgggttacattattgtattgaaataaaatatagtgtggttatgttgaaaaatgattagagcaatgattgattaaaaattctactaccagaacgaacgtactaaccaatcataacacaactgatcattacgaagtctaaaccgaaagtcaatatttcgtgctgttcagattcaattaatgaaacttgtctaattttcttttgtcaaaattcactatctgttgatttctgtaatataaaaatggatatatattgtgaaagtaaaacaaattaagtaataaatatattcgaactagaaatgggaaggcctaacgaccgttgaccctccctttaattgctccgtatttaattgatttttcttctaatcttgttatcatcctccgctatccgccacgtgttgtatgggtcccacggtacgggcaatgagagaaactacactttgctccctattttaattaataattcacattttgctacacaacatcttctaattgtcaaaactcaaaactaacaatcatggtcatttaaaacaagctatatacatttttcaaatctgtatttcaaaaaatcaaataaaaatcatcttaagtcactaacctatgtgattaatcaaagtggagtaaaattttccgaaataacatttgcaaaaaattgttgaaatctaaattgacaatagttataataaaatatccaaaattaagtggggtcatattgtaaagaatatttcattttccacctcctgttttgacgtttctcttcttttttttccaacaaaaaaaacaaaagcaattaaatagtgtttgtcgtttagttggcggaattctctcagttgaattttgttataaaaatcttacaggtatacaggtctactgtccatagatccgttaaaagttttacctacggccattaatgaccgtccgatcttcctttgttgatgatgacgaggaccaactatctctgcactttctcggtttctccttatttaactacttttaatattactccaaattcacaccccataattatgcttctttttgcatatttgatcaaaaactagttctagtgacagaattaacctcaatttccgtaaaccaagttttaatatatatcaaatgcaatactcgatatcacacattattcactaaatgtgggagactttcatattttttgttttgtcacacactataatatgaagaatgaaagtaacatgatatttttgttctaggtgtaatttaatttccaaaacattaaaaattcctgacacaaaatactgtaccaccgtcaatttggggggtagattgaaagaaaataaagtgtggggctcacagataaaaacgaatgtaacagttggggtctcattaaatagcggtgcaaatacaaacttctctataacaaaaatctactactattaaaaaataattaaattcgagaggcagtttaggtgagaagaaactgagaaagttcggtccgaattctaatcccacttttgtctctcaatttgtttcccctttctctctctctctctccttcaaatttttttagcgatttttctgggtttcatgtaaatgtgagaagtagatagattctcaacaagaaaaaaaggttttttttttttttttttttggattcgtggatcagccatcttctcgaaagatttgggaaagatccaaagaatcacaatattttttcgatatttagtcgaaaggaatttaacatgtcaggtccacttgatcgatttgcaagaccatgtaagagatctcaatcttctttgtaatgttcttgcttctgggttagcttttttctaggtttactgtagcttaaacttggaattgtgtctaatataataatgagaatctaaaaattgtgtctctttgctttctcgtgtcttcaatatatgttgttgagctggttaaataatgtgtattgctttagataatttttaatgtgtctcatcaaatcaaaacagctttcactacaggttttgagggattcttgagcagtgatgagaaaaaggaaagaaagtcagattttgagaattcagaggatgagaggagaacaagaatcggttccttgaaaaagaaagccattaatgcctctactaagttcaagcattctcttaagaaaaagagcggaagaagaaaaagtgatggtcgagtgagttctgtatccattgaggatgtgagggatgtcgaggagctacaagctgttgatgcgtttcgacagtcgttgttaatggacgagttgcttcctgatagacacgatgattatcatatgatgttgaggttcttgaaagcgaggaaatttgatgttgagaaagctaaacaaatgtgggctgatatgattcaatggaggaaagagtttggtactgacactattattcaggtatgctattaaatagaagatagtagtttaaaccattgttgtctgtttttgtaacgttttatttctctcgttaggattttgatttcgaagagattaatgaagttttgaaacattacccacaatgttatcacggtgttgacaaagaaggtagacctatttacattgaaaggctagggaaagttgatcctaacagactcatgcaagttacaagcatggatcgatatgtaagatatcatgtaaaggagtttgagaggagctttatgatcaagtttccttcctgcactatttctgcaaagaggcatattgattcaagtacaactattcttgatgttcaaggagtggtaagtattttctacagttcatgatattagttgtgaaatgagtttttttctcatgtgtttatataacttcatattcagggattgaaaaactttaacaagtctgctcgagatcttatcacacgattacaaaagattgatggagacaattatcctgaggtattagttaattggagcttctaatacttgatctcaggtatcaaatgctaatcttggctttgtggtatttcatgcagactctccaccaaatgtttattatcaatgcagggcctggatttaggctactctggaacactgtcaagagctttcttgaccctaagacatctgctaaaattcatgtatgagagatctaagttatatctctatttaaaagtcttgtctttgattatatagaattcaatatggactattctattgtttatgtaggtactcggatacaagtatctaagcaaattgcttgaagtcattgatgtcaagtatgtgaaccttgacccacccttatttgatctgttctatcgaaagctgcacgtttttttgtttttgcttatgttcaaaatggtctgcacttttttatagcgagttgcctgagttcttgggaggtgcatgtacttgcgcagatcaaggcggttgcatgctttctgacaagggaccttggaaaaacccggaaattgtgaaggtcatttacttagactaatctctttttggattctatttgtatcatccaagttggaatctgagacatttggttttcttctcattatttcagatggtgcttcatggaggagcacatcgagcgaggcaggtggtgaaagtgttgaacagcgaagggaaagtcattgcttatgcaaaaccttcatatacatgggtacgtagttattaaatcctataactagtcaatctttaacttgtggctgaccatattgtgcctaaactctgctctgtcataaacatagataaagggaagtgacacatccactgcagagtcaggatctgacgctgaagatatcggttctccgaaggctataaagagtttctctcatctccgcttgacacctgttcgtgaggaggtaacttttttctctttctttctatcttctagttggggaagtagtagatgtttatcctgaggctttgcaggcaaagatagctggtgaaacaagcttggctggtagttttccgggttatgacgagtatgtacctatggtggacaaagccgttgacgccacctggaaggtgaaacccgccatccagagagttgcctcaagaggttagttagttagctgctatatgctttacgtaccagtaggctccggtttagaaccaaatactgaaggaaaagaatttaacctaatccttgtttacataggatttattttcttattaggattgttttggagttggttataaaaacagagtttttttggtctttctttgtttggtgatcttaactcttatctgtttccttcaggagctttaatgtctcccaccgttccaaaagatcatgaaggcatcaaggctcgagtcctagtaatgttcatggcattcttgatggcggttttcacattcttccgcactgtaacaaagaaacttccagcgactactacttcttccccagcagaaacccaaggaaacgcaatagaacttggttctaacggtgaaggagttaaagaggagtgtcgtcctccttctcctgtaccagacctcacggaaactgatctactaaactgtgtgacgaagaaactgacagagctggaaggtaaaatcggaacgctccaatcaaagccaaatgagatgccatacgagaaagaagaactgttaaacgcagccgtctgcagagtagacgcacttgaagcagagctcatagctactaaaaaggccctttacgaagctttgatgagacaggaagagttacttgcttacattgatcgtcaagaagaagctcagttccagaagatgaagaagaagaagaagaaacatctcttttgcttctgaagcaaagccaagaaaaaccagcaccaggcatcaaaatctccctctttcgtaattcgctgttcttaagtataaacaacaaaacaaaacaaaaactcttatatctgatttgatgttaaagctaatacagagagctctgtttccttctgtgattatgagccactttatattatatgttttatttttataatcataaaaaaatctgtaactgtaaacttgttaatgcaaaacgaaaaaagagtatcgaaattattaatcaggattctgtttttttttaggattttgtttttatccagatacaagatattgtagccacatatcccatatagtgattatctcttaacgtatctcaaaagtttttgcatttttctttacttcatattttgtttttgtaagatcaatcagtttttatgaagagaaaatggagataacaatatcccaattgtgctctcgagttaagttttcatcatcatcatcatcatcatcacttttctgtttctatggaaacagtaatagaaacaacctaaatggagctgtttcagtaaactgcttgagagagaatgagcagatcagtaatattagcttcattgcgaagaaaccaagaagtcatgcaccggtggtgagaacaacacgcgcctccttggatgagaatcaatccccaacttccggaggagaacggtggcttctcaaaccagttggtcagaggctatttttttgtttctctaggtttaatatcaatgagcttctttaatctttttgagtcttgaaagtctttttgcctgaaaacttataggcgatggagacacaagacacattggttacaaagtggcaatgcctgctccttttgagatctcctctgtaagaaactatacattccactagattgattgattttgatgagtttttagtttttgctaagatcacaaaaatgggtattgagcagggccaagttaccatcggacggctaccggaaaaggctgacgtcgtgattcctgttgccaccggtatttctctgttcttgtggttttcggttttcttgaatttgtaatcaaagtgaatttggttttaatatgaatcaatttgatatagttttggtttcgggtttaggttcggattcggtactagattttcgattgtagatggtttattgctttagtttggatcagaatccaacactcctagtcttttaacctcagtgtcaggagtccatgcgacaatcaatacgaatgaaaagaaccttcttgtgacggatatgaacagcaccaacggtacattcatcgaagacaaacgtctaattcctggtgttgctgctcctgcctttcccggaacacgaatcacctttggtacaccaatcttttcgcatgattttccatctctctctctgtgaatgtgatggaccgatcaatgaggttaaactctttgtgtgacttgcaggagatacaaatctagcaattttccgtgttttcaagctccaagatagtgaagaatccatagagaaaccaactacagagtaacacaaaacccgagaattgcttatctttgcttgcaattaaccggtttttgttgaaattctaagttgttttacaacattgttgatttatatatatatgaacaatagctttttatataatattataacatatatatttttgtttttggtacgttacaaattaggtgtgaaagaattgataagtggtaaacataagctttcagatatttccagagggacaaacaacaaaacatttacagaaagaaaatttcccacatttttatctgtaaaaactcttcacgaataatatttatgtttatatatataataaatatggatttatatatatttttccaggtttcttcaaagtcttgaggcattatcaagtctttcagaatccaaagaactgaaaacaaaaacaaaaaaaacatataaatacgtaaacaaaatcaagtacgaataaatcttgaaaaagagtgttttaaaatgtgttagtttgttgttaccttcttcttctttttcttcttgtcgatataagccattatcacatgctgcgttgccatggtttcctccagcgtctgaattttcaacaaaataaaattgatttataacaggattatgaaaatggtctaaattttagatcaaaagaattaaaatagcttttaacttttataaatgaacaaaatagtctaaattcaaacttctaaactctaaaataagaaactagttatggaggctgtttaactttgtacctttttggtctgagccaactgaagctctagctcgtcgacacggctgagagcagcggtgagaatctgttctttctctggcgagaacgctgcaggctgattgtccaaagacctacatttctcctccaactcggccattctcttcaccatcgacatatactcttggtttgacaccattgtagtctctgctttgtccacttcaccaccgtaaatggcagcctcagtgagcttccttggcatgttcttcgttagcctcaccacagtcattaaccccatcaccaaagacatcactcccccgaataaataaccttctcctcctctcctctgcgatggcttcacggcagagtataaatctgcgacggcaagaacacatttaggtaataagtggtattcttgttgaagagtgtagcggtatagtataatagcagaatctcttttcaaagacatgaaactatgatgaatgtttggaatggtaataaaaaaaagaatcatgttttcaaaacgtgaaaacacgaataaatttagtgtagtgtcaatgtttcaatgtagtgtaccttcaggttcaggatagtttgacttgtggagatttgtaggccatgtagaagcattcacagttttgtcaatcatcggtatgaattttgtgttctctgcatcgaatttgttcttctgccaataggattttcaaaatcagtcatacagagaaagagagagctaaagaagtaacctttattattgacaaaagagagaaactcaccgcaaaggaatcagatttcttcaagcaaaaatatgagaatgttagatattactgtaaattttaaagatcaaagatatttttgtattttgcttttaccattgttgtgttctcgtccactgagattgtcttctcttcaatgtttgacaaagtcttccttgggcactttccttctccgttctgaaccatctgtatatagttcaagattcagcttctcagttcatcgtttcgttaaacggttttcgaagattctctacttatcctacaaattaccttgaagatgtcagggtcgttccatggacctttgtcagaacgcatacatccacctttgtctgcacaagtgcagttaccacccaagaactcaggaagttcactaaacacaaataaagaacagatagttttcagattacgaatttgcagctaaaatgcagagttatggagctctgttactctcttacttggagtcgataatctcaagcagcttgctttggtatttgttgccaagaacctgtacatgagggacatgagatttcggacaaccgtagaccttaaagtttggatctttgaagtgacacaaaacagaaaaaaagcttacgtgaatctttgcggtggtctttgggtcaaggaaagatttcacagtgctccacagaagcctgaatccactaccagcgttgataatgaacatacggttcaatgtctatatgatccataaacacaaaaacaattcttagtgccattttaacttgatagagataattacaaactatttcaaaaccattaagaaaacaacatagtaacctcagggtagttatcgctatcgatcttctggatacgctgaagaagatcccttgcagccttactgaagctcttcaacccctagaaatccaaaacaataccagaagaatcactcactcattctctctttctctttgatctgtataaccaaaacaaatgtggctagagattagagtgcataccacgccttgcacatccaagatggtggtgctctgatcaatatgcttcttggcagcaatggaacaagctggtaatttgatattgaaagtcttctcaaactctctcacatggtacttgacatacctatcgatggtagtgacttgcatcagctttgtggcatcaacttggcctagcctctcaatgtaaacaggccttccatctttgtcaacaccatggtaaccttgagggtagtacttgaggacttcatcaatctccttgaaatcaaagtccttttgaaagaagaagtaaaaaggatcagactttaattaaaggagaagaaaaagaagatgatcttaaaatgtttaggacctccatgattgtgtcaacaccaaactctttcctccaatggatcatatcagtccacatttgctttgctttctcaagatcaaacttccttgccctcagaaacctcagcatcatgtgatgatcatcgtgtttggaagggagaagctcgtctaggataagagcttgacggaaagcgtcaacagcttgaagctcttcaagatcaatatcgtcaacaatagagacagacatgactcggctgttccttcgagttctcttggtgaaggagtgtttgaatttgttggaggcattgattgctttcttcttgagggaacaaagctttgttttcttttcatcctctgagccgtcataatctgcaaaacaaaaaaaaaacttagatttcagaatctttgctacaaaaagagtctcctccattgcagaaagattcctccttaccaagcttattatgtcgatccatatgagcagacattgtatccgtcatggttaaagtctggatttaagatttctgttgtcacataaacacacataaatacaggttaaaatccatagattatacagcagaatccaatctaatttcatcaagagatgcaaataaacaaaaggtttcagttttacaagagagtttccttggaaaacaatcaatcgataaaaacaagaactagagacacccatttagacatttgatcaaacagagaaatcttgaggactaaaacagagattcaagatcatctgaataagaatcaaacccacattttttgttataagaaacagaaaattgaaataatcaatcagggaggttggaaacaatcggaatattcaaacatttagcgattgaggttggtggaggaaacaaatgaagaagaaaaagttatagagaagaaggttcttgatttttacctaataaggatcaaaagctaaggaaaggagaaagaagggagaaagagaggtgtatatacttctctttggttctctcttacccccccaaaaaaaggacggctccagatttagaatgcgaaacctcagagaaacaaatctaaaagagagagaaagcttataaggatattgacaaaaaggttttacctttgttttgaaaatccaaagagagagagagttttagcacaatccattaaaagggttttattggaaaaaaggtttgacctttatttacattgtaacttgtccctggtaagagaaagagaaagagaagaagccatttttgtagggagaagaagaaaggcgcgtgttttgccgtttttctggtaagatatttgtaaatggaagagaaaacattattactactgttttcaaatgtttttattttcctaatggtacccaatttagttttccaccctaaataatattttacaataattatgaactaatagtaactgtcaaaaaaattaaataaattatgaactactagtaattcggtttcttaaatgaatagattttcttctctttttaaatagcttttattaatatttttgaagttaatactatttcactaactctaattaatatatatactggacataaaaaaaaaatattagacaaagatatatattttgatatgttatataatacatttataacagtaattttaaatgataaacaaacaaacttatgtaaggacttaaaaagagagaatgtaaatgaaaattagaatcatgctgtatttttttctttatgactctaaaaaagaaaattaatgattaggaagagagctggttttcttactttgaaattgttaactaaattttttatttccgacaatataattatgaacggcatggctgatggcttttggctttctcaaataaataaaattaagagaaattgataaaattaaaacagttatcattaattttcatttttattttttttagtgtcaacaagttagtagtatcatttatttcttccagcgaaatacaataaactgtctcatttaaattttgatatatggaccgaccgaccatcatgaatgaccccaagcttccagctcccaatattaattgactttttaatattcacattaatgataagactagactacttatttcaaaaaaatattgtgtattctcgtttgttaaataaagtaacatttttgtaaaataatactaaaaatttctcaatttcgagaaataaattaagaaaaattaaccttggtaaaatcaggtcaacaaatacttttatgtggttgctccactaatcaaagttaaaatagattttaacccgcggtacaccgcgagaacaatttatttttcaaagttaatatatataaaagtttgtaaattgtatttatttataaaatatagtttacaatggttattaagtaacttcctgtcaaactcgtcccgccaacccgtccgtaaaaaactatttattttattaatgttgatcttatttatgatatgtttatgaattattgtctaaatattttgtaattttgtagtaattaaatgctatcaaatatctctgcggtttgatgattataatcgaattgttatagtcatggagaaaagcaatatcaaaaatgataattttgtagtaatttaatgatattaaatattttggaagttttattttagtaactaatcgtgtagttaatatggagagatttagggaagattgttaaatgtcaaatatttaattcgaagattttttttctaattatcaaaaacaaacattaaaatccagtggcagcaatagtaaataagtctcaaatacaggatttatttcacaaaatggctgaaaaatgtatatgtagataatttaccttgcactattaattgcatacagtcacactatttaagggttaacttaccaaaccttgggcctaaaatgtgaggctatctcggcctcatactttttctaagtgtcactaacattgaaaggcccagtcacggcccaaataaagtgattattttggtttgattcactctactccaacagtcaatttactttctgatttcgcagccttctttatttgtcgatggctacttttgctgctacggcgattccgatggctatgaagaaggatacattacttctccggcatcgactactcggaaaaaagacaagctagtgtcctcactgatataattattactatttttttttcctcactcatataattgatatttggattttacgtgaataaagtcatgtaatggtcctacttgagtctgctgctgctgaagcatttacgactgcgtagtatgtataggtcctgacttactgataggagaatgtttaatttttaaaaaatcagattcatatgcatgtgtaatcaactttaacttccttttttattttggttaaagaatcaacttgaacttaattattccacttgcatctccatgaaattgcattttttcaaccaaaagttgatttataaatcatggtgttagtaaacaaaattcacttcttacataaaaatctagtgggatttgtcaaaaaattggtccaaattttaacataaatttgtttagcttgtaaatccatatggaccattccacaccactagtcattctttaatcttatgttagatggaattgacttgtaaagattgcattattaatttcattttaaaattattttgccgacttttcgaggaaggtccattgttactcttcagagaatgttacttctaattcaagttttttttttaatgtatacacaagtttcaagactgtttaagctaactttagatacattatttccttcctcctcctatacgttgactattttagtttttcctttgattccagtttttgatccatccaagattcctttattgcataattctaatcgctcatagattttgcagttgatcgatcataaaaagcttattacaggatctttctagatttcaagaaaactccattacttgcagttgttgtgtctttttatcagctcattggattcttggttgatttttaagtttcagaatatggcttctactggtgaaactatatgtaacaatggccaaagcgcagtttcagtaacaaggaggaggagttaccaagttgtaatagcggcgacaagagacatgggtcttggtatggacatgaaacttccttgggatctaccttcagagtatcagtttttccaagatgttacaactaggacatccgatcccacgaagaggaacgcgactataatgggaagaaaatcatgggaatctactcctctagagattcgtcctcttcctggtcggctcaatattgtcttgacaaagtctagctgccacaacattgccattgatgagaatgtactggtgtctagtagcatggaatcggctcttgaacttctagccactgagccctattccttgtccattgagaaggtctttgtcataggaggcggcgagttgttaaggtttgcatcttctttccacaagggttttgttctttttctaaaaacacatgtttatgtcttgatataagcgtgtcatgcgatgtttgagactttagaccttgaggtttgatgtcttgatttgattgatggtacaatgattgaagttcttttaaggccttaagttagatggttgaagtttagtactgtgaatgagagaatgattaattgttgtggtttctctacaggaattatatgaatgcatccatctgtgatgctatccacctaaccgaaatcgatataagcgtgccatgtgacgcatttgcaccgagagtggatacttctctgtaccgtccgtggtactcatcatttccagttgtggaaaatggaattc

SEQ ID NO: 261 - DNA, 54433 bp, Arabidopsis thaliana
aaaaatctacttaccataagaactgctacactttcactaatcccttcttcttcgagttccgctgtcgtggctctagccttttcaataacctttccctcttctctagattgattcactgcactctcaagagacgcaagcatttcttctttatcagtcactttgaccaccttctccttgcatatatcttcaccctcttcttttatcatgtcaccaagctgatccatgttcatattcctcaatatggagctagcactacacgggtttctggtagtgcctatctttagactaatctctgcgagctcctcaagtacatagtctccctttggaacttcctcaaacaaactaaatattaaaaagttttttggatccgggggagaaattcttaacatctcgcgggctgcgtgcaaccgtattattcccaagattgttcttgaatggatttcccatgattgcaagggagactcaacattgaatttcctcaagaacttgtgcattaatgttatttcttttacaagcataagccaatgatctcgtctcgttgagcttgtcatctccggaaactctatgactattccctcctcactaaaaatgcatcaaaagaaaaattttctgttataattcatacacaaataagccaacatgttccataaattgatgaattcttacaaatctggagactcgtagacaatggccttgtcaaaaagaggagcacccaatggaccagtggacataggctttgtagacttttcattgtccttagaaagatctatctttatagcatcttcatagtttataattcccgcggcttcgaagtatagtgcatagtttgtcaaagtaagcctacctacaaaattcaagacatttttttttcatcaaacttgagacatacataacataaggaaacaataatgaaactaaacctggccagcttgtttctttaatgtggcgaatcactctctgtgaagccattgttccttcaacgtgcaatataatttcatcatccgctaattcgatccctttaggcgtcgattgcttttgcaaatgcttcatacaccttgattgatacatggtaaataatacgaaattaaatcaaatagatagaaaagaagacatcatatgtattgagcctagaaaccaactatgctatgtataagaataattacttgtgtatttctttgacaaacatatcataagctgggaagtgaagttggtgaccggtcggagcagttagagtctcaaatgtgtatcttccgttgatgatatccacgggaagaggaatgattgagcctaaatagacaaaagcatcttcacccacacttggttcatgatcaaccttcacatgatatataaaagttgagaggtactataaactactatttataaaagttaatccgatgtcacagttcgaaaaacaaacattgcttacgagaagcggcatcatgtctgaataaaaaagcgagatgtcatcttgctctggggataaagttgcttgaatcctcttgtcttcactctctttacctactgcttcctttgaacacaagtaaaaacatgacttgagaaccaagaaactttaagtgatcatatcaagttacagttaggtatataccttataagactcattatcatctgcgtcaggttgttgccacgcaagcatcatatcgaacgtgagacgtgtaaaggaaccatcttttattctctcaagtatgttttcacaaacccgactcgtcacctttgagttgcaaaattccacaaacttcttcgagtaagtacctcccgtgcttcctggcttccattgacattcaaattctttcactaaatcatcaatggttgtctctagttccctacaacatcaatcatcacaaaattcatagattaaaacgatgctaaaccgggtgtaaccggtttgctgttcttttggctttaccatcaaggaaaagaaatcccataaattgtttgacttccatgattttgattatgatccagtacactataatttctattaatcaaaacatagatctgcaaataagtatatagacaaggagaaaagaaatactgtgagcatctctgaacgacatcgtttgcaatggaggacaagtgcttcatcttcctcatcgttttcttgctctcgtgatctctgagaatcctctgttttagttttttgcttttgctattttttttccttttcgcattcggttttagtgacgttgaggtagagagaataactcgttcactggcaacttctccacatgccacgtggcactcccatgcaaatagccgaaaactgagaatcatactaaaacgatgtcatttcagtcaatagctgaagaaaaattattttcaacttaaggacccgaagttatcgctatagattaaaaaagtcccaatactctctaatctatcaattatacactcacttctggttaaccctaaaccgactctctctttatttgaaatatatacggcggagttgagagaatcaagagcaccggaagagaaaagatggcggaggaggcgattgagcgtttggtttcacaaactgtaaaagtgctttttcgaattcttaggacatgaaagaacaagtattctcattttagtatttataaatatagactcattcacacattcgttcgtttataattgtgttaaactgtacagaactattcattatgctaaatcctcttcattctgtcaaatcctcttcttcttccgcttcgtctgagaaagcaatctcctgatcggagatgttctcatccgacggttgagaatcctcagagtcgaggccagcttcgaatctctctcttctctccactttatctctcactctcctctcaaactcttcatccgtacaagccaacatgtatctgagcttgaagttaactctgttctcaaccataatggtgtgccttgggattatccgacgctctagtgagtagctaaaaaatctgttacaagtgccatggttctcaaaagctacactttgaagggattatttttatcaattctttttctggtacctgggaaactctatgagatcttgaagcggacggatcattgttcttcgcaagtaacggtattttgggcgcagattatcaacgttataccgaagcagcatcgggaaatcagcaatcatttcgcctagttgataaaatcgaattcccaatgatatatagtatctcatgttgggttctagcttcgtccctatgctgcatccaaggagagctggatccattgctataactttaccgatatccttttgggttactccggctctggttaagagaaaaatcacctgtacaaccacaacttgtacaatatcagatgcagcttctgaaatcatcatatgttatgagtaacaacactaacataacaacattcgatggaacatctttgtttcatagaggaagtaattactaaccacaggtcggattttcttgtagaggctatttgtaagtaaagaaggaaactttactaacatgtttccaatggcttcattagggatacccatctcctgcaaaaatcttacctttaaaaacacaagagagaagctgagttaatggaatctgctgtgtgtatggtatagggagttcatacgttataacgaagttcaactacctttggggcgatcgtcttctccaaatcaatgcagtaaagaattggtttcacgacaaggattcttttcattccttctttggggattccaaggtagtagaaatatttgactagaggcttccatctttcttcaatactgcatcccattaggtgtggcttgtaggctaatagtctcccaacttcttctgtgctaaggccaaactctttcaggtaattgatctggtttaatacaagcaacacaattatgaacttaaacgacaatcttaacgctggagtattaaaaagagctttcagtacctttttctccatcacttggaatgagaagaagccaattatctttggataatcatagaccatagtgccaaagtcattctgattcatacccattttcaagaagaaatcaacacggcttttcacttcttccatgctgaaagacagcaactcaggacatcttccaaccacataacccatccaatccctcctcacaccattgctctctagatactcaacaatttcgtttagttcctcacggttacgttgcaatatattatccccagatctcaagaacgcaactgcaatgaattcacccttcacatgaatgctcttcagccactcgatcatgatccttatggagtcgagatttccttttgacatgcatatgatcttcgctattctattatatgacaactcatggtgcttcaaccacctgcacaattcagaaacatagttaaaaatattctactacttctttgaacttgtttctaagagacatattatcgaacaacttatgtgcactaatatacacaaacccagaagcacaaaaaaatggagcttgaccttacaagaggaacgaaattggagtcttcaataaccgtcctagcgcgaagattgaatctagactctgaaaattccggcaaccgtttcaacgccgcagcttgaatcataacatgatcaacgaaatcacccaaacgatcagtgacattagtcgcatacgtaatcccaaatctacctttcctaaccaaagactctttgataatctctttcgtcactttccttctaatctcaagcgctttaactatcatctccctctcactctctccatcatcatcaccatcagagccgagaaaattacgaagcgaaggaagagaagaagcaatatcagcatcagaagcagattgagcgtagattgaaccaggaaattgtggagttcttctagttacaagagagagctcaagtagcttggatcggttttcaccgtctaaatctcgccgcggaggaggaggaggaggaacaaaggtttcttgagattcgttagggtttttgttgagctttaggtctcgattatggcggatgtatagagaaatggatctagcattgtggcggcgacggattactgtatcttgtgaatcgtcggcgttgtcttgacggcggagagatgaggagatgaaggaaaacgttgaggtgtagtagctaacgttgcagtggagaagcattagagcaacgttgtcggagagaattgagagagatggttttacagtgaacggagaaagtagtaaaatggaaaagagatagagcaaagcaacggctcggagaagatgaaataaaacaagtataaataaataataagttagatacgtatcaattggttctatggtctagcggttaggacattggactctgaatccagtaacccgagttcaattctcggtagaacctatatttttgcattttttgggctcggtagaacctatactttatctttgatatatctctttcaaacaatggctacaaatgttgaatacacttgctttgttcgtggtcttgatcaggacaccgatgaaaaagatcttacggatatattttcaaagtttggcaacgtgatcgattctaaagtccgttatctatacatgaccttaagaattgagattgatctatgaatatcctttcacgtttttggtatcaacttttttattgttggagttcttactgatttgttttgatttttctatgtttttttcacagatcatttacgatcgtgacactggaaagtcaagaagattcggatttgttactttcgaggaggaaaaatctatgacagatgccattatgattatggacgtggaagagtctcgaagtaaatgtgttaatgttggatccatcactgtggaagtagctaggcaacggcgcaaaaacaggtctgctgaatttgcactagagttagttaggttgataaacgaaaagcagaagaagatggctggattataagaggttttaatatgagaataataaaatgttatgtaatcgctatcggtaatgttatgaaaatgatcttgagagggttattctctggatttgtggacattatcgattgcaagatccgcaatgttttgcttgattcagatttctttggttaatctttcttacacttgcaataattacttgaattacatattcaaaagtaaacagaaagaacgtgacaccttgttactgtaagtaaactgtttaattcctcttcaacatgtctaattctaaagatacttttctatgaaagctaattttattttgtttaaatgtctgaaaatctgaaatcttcatcatcaaaagtacttttactaaaagcatactcatcactgaagcatacctgaattctgcaaagagtaacagttcgacaacgcttaaaattcactgtccaaaaaccactaactggatgttcgccggaaaccttgtaaaccctcaagagtttccaatacttgtccttttgatcatacacgattattgaactatatacctttgagtcatcaagattaacagaaaaaaacaacttctcaacccctgaagattattgaacacatgcttaactaaattacgcatgtgttcttcttttttcttcatatatcctctgtttcttgtgttctgttttaagtcttgcgctttcaatatttgtggttacttgcggaggaattatatatctaaaagcagacagaaataacttgagaccaagttaaatatggctagctaaagatacatttcaacaaatttagtaagaacatttcattaaggtcaaaaacaatggcctaaccttttttacagcttaagagttgtacagaagactaattctataagagtattttattatcaattcacattgtgcaaaaaggttactcttgaggcttcagataacagcttcttcttagccactctgcttgatcttagtagatgtaatatatatccttcacctgcaagtttcattaaaacctaactaagtcttgaaactagagacaatttataaacatctgaattcatcaacaacagtacttaaagaagcataccctgcatgaaaccatcccatatgtatcatatcaaaccgtaacagttccacaaatgtcaacagaagtcgtctttgctggtgtaagcacaaccgccactgattcgaccttcccccaaaatgtaccatcttcctttctttcccaagcaatctctatgcaccaaatctctcttttcctacagtcataccgcctaagccggtgcacatcagcgctcaaaatcaccaacttcccgccaaaattagccattttatatccatccacaaagagaccattagctggaaaaccttgtaaaccttgcaagtaaaaccaagtcttcttctctggatcatatatttttattggccatccaaggaaatacactgatgtattgatgcaaaacagcaaattatcaaccacacaagacgaatcattccaagaagcactcaacggtccatgagtccaagactcccatttactttccttaggatcataaatatgaatattgcgagtaagatccaaacagtaaatcttctccttcatcaccgcatatgtcagaaactctcctcttccaaacgcttcagggtacggacctggcacagaactccaactctgtttctttaaatcgaacacttcaacccaatcagatgttcgtaccttacgacctccgatcacataaatctttccgtcaattacacccgcggctgcgcgacagcgagccatcttcatactcgggagggagcgatactcgtgaaatctgcagtttatgtgagtcacatccgagatgcgtcgttcgcctgcgtgtccacctcttatggatgtctcgccgcggcgtccaccgcttatgggtttattatagcctacgcctacatcttctaaaagtttctcgccgacgcgtccaccaatgacatagatatccgatccgatagtgacgacagtagatccccaaggcatgggagggagggaatcgattttgcacaatttcaacgaaatcgtgttaggcaagtttcgatagggtttacgatggagaatgtaccagctagggttttcaacaggagggaatccaacgtaggcgtaaagaacgttttcggtgtagccgagacgcaagcgatcatcgtagagcttcgacatgagactatggaaggatctgcagacgagggaaagcgacgggtggtgacatctccgaacgagtaggaagcaacgtaagatgagttcttctggaattggtagcgacacctgaaccttttctttcaatttcttgtttcgatcctcttcttttttaggtttcttgatttgatgatcgccgccagtagagccgtcgtcggaagtttcagagattaaaaccatcaccgtgtgagttggtagcgaattaacggaaagtctaagtcaagattttttaaaaagaaatttatgtgtgaaaagaagccgttgtgtatatttatataatttagaaaatgtttcatcattttaattaaaaaattaataatttgtagaagaaagaagcattttttatacataaatcatttaccttctttactgtgtttttcttcacttacttcatttttacttttttacaaaaaagtgaaaagtaaattacgtaattggtaacataaattcactttaaatttgcatatgttttgttttcttcggaaactatatcgaaaagcaaacggaaagaacttcacaaaaaaccctagctaactaaagacgcatgtgttcttcttattcttcatatatcctctgtttcttgtgttctgttttgagtcttacattttcaatatctgactctgattactatatctaaaagggaacatgaagaacttgagaccatgttaaactgtacaatgccttcaaacatggctaactaaagatacattagatggctttacagtgtgtaatgcttattatctttaggttttttaaatcccttgtattaagttatttaccaaattatgttcttgtactgcttattggcttggttgttgtgtgctttgtaaacaacacctttggctttatttcatcctttgtaaacctactggtctttgttcagctcctcttggaagtgagtttgtatgcctggaacgggttttaatggagtgtttatcgacaaaaaaaaaatgtagcttttgaaatcacagagagtagttttatattcaaattacatgcatgcaactaagtagcaacaaagttgatatggccgagttggtctaaggcgccagattaaggttctggtccgaaagggcgtgggttcaaatcccactgtcaacattctctttttctcaaattaatatttttctgcctcaatggttcaggcccaattatactagactactatcgcgactaaaatagggactagccgaattgatccggcccagtatcagttgtgtatcaccacgttatttcaaatttcaaactaagggataaagatgtcatttgacatatgagatatttttttgctccactgagatatttttctttgtcccaagataaaatatcttttctcgcatcgtcgtctttccatttgcgcattaaaccaaaaagtgtcacgtgatatgtccccaaccactacgaattttaactacagatttaaccatggttaaaccagaattcacgtaaaccgactctaaacctagaaaatatctaaaccttggttaatatctcagcccccttataaataacgagacttcgtctacatcgttctacacatctcactgctcactactctcactgtaatcccttagatcttcttttcaaatttcaatggcgtccggtgatgttgagtatcggtgcttcgttggaggtctagcatgggccactgatgacagagctcttgagactgccttcgctcaatacggcgacgttattgattccaaggtctgttacacgccgagatcggactccgagtgatatcgatgatctcatcctcgacggatctgttccgatcttgtgtttctctgttacttgattcgattactctgttactattctcgttctttgttactactactactactactgttacttgtattttcccaaatcggtacgttcatcttcctgcttctgtgagcccggagatcgatcggatttttttgtattttgtatatttgttgtagatctaaatgcttttgttcagttttgttggattgttttgctgatctggtttttgtattatttggataacagatcattaacgatcgtgagactggaagatcaaggggattcggattcgtcaccttcaaggatgagaaagccatgaaggatgcgattgagggaatgaacggacaagatctcgatggccgtagcatcactgttaacgaggctcagtcacgaggaagcggtggcggcggaggccaccgtggaggtggtggcggtggataccgcagcggcggtggtggaggttactccggtggaggtggtagctacggaggtggcggcggtagacgcgagggtggaggaggatacagcggcggcggcggcggttactcctcaagaggtggtggtggcggaagctacggtggtggaagacgtgagggaggaggaggatacggtggtggtgaaggaggaggttacggaggaagcggtggtggtggaggatggtaattcctttaattaggtttgggattaccaatgaatgttctctctctcgcttgttatgcttctacttggttttgtgtgttctctattttgttctggttctgctttagatttgatgtaacagttcgtgattaggtattttggtatctggaaacgtaatgttaagtcacttgtcattctctaaataacaaatttcttcggagatattatctctgttgattgattctatcatctaaatttcggaaatgctaatcggataccggaatggtgcctttgttacgattgagttacttacatcactgatacaacaatgaagtacttactgattatctttataccattcaccacactacctttgatattcaacaatgaagtagaaacctatttggttcattcgcatcaacaagagtactctgaaattactgattattttcgattttagactgctatggagatttccaactcaacttatgcatgttacaaaagctactatatttctgtgatccagtttaaagttaactcattgagtcactgttgttgttcttcctttagacgaaaatgtatttaactcatgaactttgtaaacaaaatgaagctattttagaccgtgtgtatcctactccccttcttcataatcatatcgaatgtgttcctatttggtaatttcattttggatttgctcaaacatatcaaatttatactttgaaaagaaaagaatcaacaaactaaagttatttcataatatatattttacttatctcataatccaaacatataatttatgaaataactttattttgttgattcttttcttttcaaagtatataatttacttatttcataatccaaacaattatatagaaactttcataacatgagttaatataagcctaacgctaaatttatatagaaactttcttaacatgagtcaaattaagtctaatgcgaaattttacattctaatttaatttttaatgatgtttaacatattaacatttgatcagcatatatgagtagattatcgattagaaagtgatttctaacaaagccacatatagccaagatatactcaaacggaaaatgtatgattcacaaatgaatagtgcacgattaaatttcattagctccatattagcgaagatatagaaagataatataccatgggtaggccacgaaggcacgaatacactctaagtgtgttatttaatcaaagaaaatataatgttagtgataatactgtatttatatgaccaaagatttctacatcttgtcaggccattttgtatcatatgtttgataagtaaaagcaaataaaattgttggtataattaatggttccatgttggcaaaagaaaaaactaaatcacataaaacaaaatcgattggaaataatagtattgttcaaataataaaattagttacatttttttaaccagaatatggtgaaacaactccaatttcggtggaacatctgttccatatctcattagttttggaaaaccttttagaagtaaaacgcctgagttcatacatttgaaaaaataatttcatatattccatgtgacattcctttccagctttcactatccccaaacaacaatctcttgaagcacttttgttctgaataatttcagccatcacttcttctatacatttatctgggacggccatctttttactgcagttcataagataatttatttgtttctttgaatatttactaccaacattttcgttataattgtccgatgtaggagatcttgccatcatagcatcaaactcgtcgtctgaaatgaggagtggcttgtcattatcgctttctttgccgaaagttggatgagaaaacgatagcaaaaccatgatcaaagaaaatatcataaacattgttttattctccattttaaaatattttgatattttattcttaattgattttctttgtttttgttttaccaatgaggatttatgcgtgtatttatagtgtcgaatgttcattaacattattatttagtaactctttaatagtaaaaataacatctttttttatttatctctcaccaacaatatcttattagttatcaacataatttacatcttttgacgttttatacccttataaatattattctttaatgcatttcaatttatgactatgaaataagttgaataaatttttttaaacgtatcgtatataaaaaactaggatttaagtctctttatatgtgcattttaagcttcgatgtagtaaacttattgtttgtattcaaatgaatttgtaaagaaattaaagaaaacaaaaatactctttgttcctttttaattgattttcccgaaaaaaaattgttttaaaaagattgatttttaggttttttatggggaaaaaagcaaaaaaaaaatcatttatttttaatttggccgtttaatatctgtagttttaaatttagaataaaatacctcacttattttttgttatcttttaaaaccatcatatttttaattttggtaatttcgaacctgatacttaacagccgtcaatgaacataacagaattatttgacagtgttaaattttaaccttacgtattttaattatataataacaggtttacaaaaaaatttgttcatattgtcttggtctagtggtaacgaacagtttgggtaatcccaatttctcggttcgagtccacatcccattcctattaatttttattttttatttttctgattcacttcgtcttcttcacgggtttttttttatctctagtaattgattttatttttcaactctcatcatttatggttatggtgatggagagagatgtgattgactgggggaaagacgaagaaagagttagggattttggttaaatgatatagattgatggggaagtgaagcaattgagggattttgaggaggaggaagtagcagcaggagatgaaatcgccattgaaatatgagaaaatttagggtttttggtgaattgaaggaatctttgaggagagtgtgagatttgtgttggttttgtgaaaaaggtgaggagataaaggaaaaattaattgcagggatggtgaagaagatgaagtgaaaaacaaaaaaataactaaatgggaaaaaggcggggttcgaacccgcgaactgaggattatcctacattattgttaccaccagaccaagacaacacgcacgtaattttctgcaaattcattgtttataaatatcacaacatgtagggttaaaatttaacgctgttaaatgattccgttacggccatcaacgcctgttaagtggtaggttcgaaactaccacaatttaaaagacaatggttttaagagacaataaaaaataaataaggtatttatattccaaatttaaaactataggtattaaacggccaaattaaaaataaatggagattttttcggtttttttcccgttttctatgcactatttattagttattattgatgaattttaaacttcaagacaaataattaaaaattattggtttagaattctagaaaaatgtaactcacaaaagttactacatttataatcagtttaaatatttttttttaattatctgtgtgtttttatctagaaaatcaattaaaaatgaacaaaggagtatgtatctgtttttttgacaaacaagttttggtgtacaaaactattttcaagactaacaagttttggtgaattgggtttacatatttgtgtttaacaactccatcacatacatcaaattttgaacatcgtttagactttacttggtccaacacttacagttcatctactctgggcgcatagttaaagaatagataacggaaatgcctcactaacatctttggaacattaattagagaaatatctaacaaaagataagcatgagactacttaaaaagcctcacttttttttttttctttcagaaatactgcaacgctcaattcccaattccccgaacatggtttggatcagagaatcacttctcaattccccgaacatggtttggacctctctcgtcttggttgatatattaaagaggaagttgtttagttacatatttggaacaatagttagaaacttagaacgtattattcaatcatcttaaacttaatgtgctatgtttgagaaaagatccaaaacaaagttttttgcccattattacatacttttaaagaaaataaaatactgtattttaccaaaaaaaaaaaagaagaatacggtgagagacatatacatgtattcgtatactgtaagaaggacacaaattcgtatccgcacggtatatgtgtgtataattagttaattgcacgtgacctatttttggaagcatcagatttcccgcccaattttaattatctacccagaaaataaaaaaaattgaaatttggggtttatctatgaaattcccaaattgaaactctcatcgatttcgctggaatttgaagattgcgatcagaaattgcagatttttcgaggtgagttcttctcgtcccgtgacattgttagattctccataaacagtgattcaccaattatcaacacttgagtttaaatattgaaacaattccccaatttcgaagaaccctaaaaatagagattggttaattgattcgttgatttcgagacttcttcttgtccgattcgcatactttgcattattggatgctccaatatatagttaagatcaatatttaattgatttatgaatttggatttttccattttgaagcaacattgattcagattggttgagagattgattcgttgatttcaaggtccgtgaacgaattactcgttttaagcataattgtaatatataattaacatttagacattggatttttcattacgaagaaccctaaatacagattttggttaacaaattcgagtgttattttttttttgttgcctcgaaaaaaaaaccatttcttagggaaaaacatgagaaattgcaagaaaaaaacattgattcgtcagacattgaaaaaaacacatctctctgaagtgattctcttttattttgacgatcatacgtagttaggttttgttgcttcttgtctcactgcagcttcatgcttctcatcctgcaataaaaaaaaaaaatgttaaacaggttaaaatgttgttggttcgagtttcatgatgatgagtgggtttatttttgtttctggaagtttcttaggggaaagatttgggaatcgattaatattagataccatattgacaaggaatgattctatttctaggcatattttttgttgtgggagcttttagttttggttctgataaagcctgaagaacactgagaagagaacacttggctgatttagagcctcttataactcaatatgatagaaagtcaagagaatctctgtaaagtaacaagctttatgctgaaacagacatgccctttatgttttcttgtcatggtattggaatagaacttgtctatagaagtatcttatagtgggctattatggataaacaaagttgattacttgttattagcataaattgtgtcttattagattgcaacaaatatacctcttttcctcatcacgcagcctgcctctgttgctgtttcctgtagtagtcttgtagtcagggaatggcacgtgaccattctcgatgctttcgatgtcacgaactagaaggtcatactgtctcttagcttcttctggtgttttaccaccaacagctctagcaacattgtgccaacggtccggagtgtcttggtcatagactgctagagcacgctcaaaggctttgttctgcttaacagtccatgagccagagccataagaagacattgagcctgatgccattgtttagtaactaaagttgatgatgtttggttttgtgtagtaataaacctagaaaagaaagagattctgaggaaatgatatgttgcacagatgtcgcagagtccttgctctttataaagaggttttggtgtggggtagggccagttgttaaaagatatctttgccaaaacaaagagaattttaagtctttgtctctatagctagaaaagaatatgagcaaatttttttgtggagatcagtatcaaagatccaaactaatcaaccaaagattgcgtttttccatccatatttggcatatgatgctccctagacacacttttctataaatgttataactaatatgtttacttttctttcccaattagtggttatgacgtcattctctagattaagcttcttgtcaaaaagaaacagtttaggtaataaatagttaggaaaatctctctacctatggtacttaattcatggaacagtctggtctctaatcagagcacaaagctcacgtgctcgcggaaaattacaagtctttggttgaaagttagggacaagtctctattgacagatgattttcattgactaatcagatttccttcttatcaaaaatctcagtgattttgaaacattgtgaggattaatttgtatccacaaacacaaagttggagcttttcgtgtgttcaccataagtcatatattctcttgtataagaagaattcttaaagaaaagtgggggcagagctttaccttgagattctctgccatgaaaaccatatcaatttatctagctgtattgatgatctttccgtacaatcatcgacatttttctgtgttttcttgttgttgaaaaaaataaacgtcaacattgtttacctacctttttttttccttggcttgttgggtccatctccttgaagttaggcaactgtgtttttcttggtcatatattgtctaatgtagattcttggttgttaatttgttaaataatcacttttcttggtggatattcaaattgtttcttctgttctttagtgtctgcattattgaatatgggcgggaaccaaaagttgtcgtattacaaaatacaaacattaatgtttcacatgaacactttaattaccttgtttggtaagaatccagggttgggatgggcaaatagattattgtcatataactaaattaggttgctaaataatgcacaataggactaataatatacatacttggcaaaaagacaacatgcataaatggtccacttgttgtttggttttatctcagaaagtgagcattttgtttcattctttaaaagatttgaagattttcttttcatgcaacaaaggttgttcattaatgatccacttgttgtttgatttttagttcataataaagttgacattttgatttaaagtctcaagattttccctctctcggaaacacaggtgattcaaagtcccatgggagatggaggaccatactcatatcttatcactattgaatcaggtttgttatcaaaagaccacaagactatataaagttattgtctacacactttttaaagtaaagctatttaagaaccatacttctcggatctttcttgataatagtgtttatccatttcactaaatgttattagttttgctaagtaagatgatattcctttacgtgtataggtcttatgatactttaatttgctctctttctggatatatgccaatataagcacttatattattaagatatttttattctagttatgataatggatggttctgtttctaagatgtcatggtttggtttcagggtaggggcggcgaaacttcttatcgagaaggaaaactttaaacagagaaagaatcttaacaataatgaggccttggggcacaatatattccagagagataatagattgcaagttgccaagaaattctgctagtaggcattggggcactactgatattctcatcgtcacgatgcttcacagcgaccttctttgcctaggtattgaaatggtaaaaaaggaacactttccccacatttaagtcataagtttaggtaaattctttagctgtgaaaacgataatcttgagttcataaggtcgattattttgttgttgagcaagatggttatttttactttctcactatgaatagttgcatcagtaaacgcttgagggttttattctgatatctccaggtcttgagtgatcattgctgagaatttacccggagtagcttacaaggaatctgtatgaaaaggaaggtaaaagagtaagcattttaatttgttacaaaattactgttgatatttggaacccttatccccaaatctagcaagaaacaaaaactaagtattctgattcctctcctagtggttgctctccttttgcaacttggaaaagaacccgaacctgaagtaatcactctataatggaagtttctgtagctcaaaatgttttcgaaggattttcgaggatagtggtgagatattattatcaacaaaagaatgatccctttacaaaattggattcggacaaactttacgcaaaagaaggaaatggcatattatcaccaggaatccataagagctagtcccatttgagggaaaaaagtatccacagacacaagcctggtccaaaatcagccatagtagcagcctataacagtagagttctttttattttcttgtttctcggaatctttgaataaagaacttaggaaatggagaatctccatgctcaggggtttttattggttgatgagagaatatataaggaaaaagatcttaatcattttcttttaagaattgatcttaatcttcttctcatctgacattgttaccatagaactgttgtttttgttcttttttttaagagtgattttatcagtaaactgccactgcttttgttgatttttgtctaacatttgtagcaatccaatacataaaactgttttctggaataagtatgttgttgttcaactagctcataatagcttgttctctaaaaagattgtttattttggttctgttttacaccacttctgattgtttttgatactcctgagttgtgtctggctgttactaaacaagataactcattacaataagatctaagttgtggttgaaaatgaaaattaggaaaacagaggaagtgaagtaactatgtgtataagtagttaactatttgggaatataacaatcatgtggatgtaaagttaattacattaggaaacatagatgactctatatgtaaaaatttagtacttgtcaatgtttaagttaacaacatatggatataatcaactatgtaaacgtatacttaactttacatccacataatgtggtaaattcttaagggaggaagagtcatgccatagtccgtcttccgagtgaggatcataaatgatagactcccatggagtcatatttctcttatgtttgatccttcgtaaagtgtaatttttgaatcgtctttatctttttttttttttttttttttttgtttgcttagaaagctattgcatcgatttatgttaaaacttaattaacagagattggtaattgtctttttgttaatttgtttctttattcaattgtagattttaaatttagagaatgaacaaatatccttttctttttgggcaaaaagaatgaacaaatatctatgattcaataacacacctttagactaaagaagaattattcttgagggacaagttaaaaatagtatgttttaagggggaaaaatttatgacaacaattgtatgtacattcttcttgagggacaagtaaatctataattttatcaaaaaaataattcacagaaggttaatcgtttcacaaacacagcactataacattgaaactaagatatatttctttcctcaaggatcattttttttattaatttcagtccaacggagtttcaagccaaacccacaaaaaaaatcagtaactttatttaagtttggcggtccatggtcatattttcatagcaaagtaataataatacgtaagtagggaatgataaagacttgcatattaaatgatattagtatagatgattaaacgcaatggtctagaaacaaattgtctgatttagaatgggttagagatagaagcaggttctaagagtattaacacccaaatacatgaaaaaagaaaacacactccatgattatttctgagctcacaagttgtgaaaatctctacttagtcactgctgtctgaagaggagagtgaatctcgaccacttccttagcctcaatttgcttctctgcaactgcctccgccttggagaagctcccgaatatctgagagatccaaccaaataagttaagagatagattaacactaaataacgagatagagataattatgcattctaagcatcttcaacattaatcaaacacataagcatgccaaatccacgatgtcatcaagcgatatagaggattgagaaataaccttgtccatggtgtttttgaaacaagtcttgtgttcatccattgaggcatgtatgaattcatccatgtgatccttgaggtttgcaaagaaagtggcgttatcatccttcaccctcttcctgcatgatgatgcaggcacttgcggttttggcgggttctcggtttcgattttcttggtatccaccacggtttgatttgtctgggaagccatctgaaaacagaaagaaatctcatgaatacgaatgatccaattaagatattacacaaagcaatcctcacatctatcaaaaccagttatgttaatccaataatcaaactcaagtctcaagaaccctaaagtctcacaaacataaacaaattcacctaacatctaaccaaaaccattcggattctcaacaaccaaaataatcagctcaagcccagcaagaaaattaaagcaataatcattagcaagaaacaccccgtgatactgaatcgaagcaaaaaacaacaattccaaaacgatttactaataaacaagatatccaccaagtgttcgaccaaattcctaagagagattcaaacaaaaactaacgaatttctcaaaatttgctgcggattcagtgaaacagaactcaccagcctcattatcgatcataagtaattcataagcaagaaattaatgaagagattcaaagcttgcagttacctgaatcttagtttctcttcttcgcttcttctttcttttttgctttctctgcaagttccttatctttttctgtttttatctttctctgcaagcacaaggacgacgtctatatctatatacagttatgaatgggttataatcacgtgcgagtagaacaagctagatctccttggagagcaagttactaaacgcagcgttttaaataacaataattggaccttaatttaactgttccttcaaatttgaccccttaacctttttgatagtgtaaaaggtaacccttgtattattgtatgtacattcttctaaattaagttttgaccctttaacttttatcaatcttcaattttcgcttatacaaatattttgtggctgaatgatatggagtatggggtttgttgctttttttcctttttacatttaagttattttggtgattttctttttgaaacttaagattaaggttttggtgtttttccttcttcatcaaggtttaagatagttttactttctcggtttagctaacatcatctgttttacttcttcatcaaggttttggtgtttttcctttttgatctcgtatgatcaatgtaaaaaacgaatcttgcctaaatctttttctcactttctcacgtaaacaacaaatagcaaagtcggtagctaaatggcaggcccatatcaatgaacaatgagtcgtctaagatgatcaagaaatacagacaagctaacatcatccgtgaaaacattactttggccggaaaaatgagcatctccatcacaaggattcagttttgctagaagaaaacgagcctgcaaaaatatacagcaagagaaagaaccacaaacaacaataataagcaatcaatgtcaaagaatgaatcagttactacatataatggaggcatgagcaaataaggtgaggtacctgtgaaccatactgatcgcatataacaagacgcggagtgggaaacctttcactcatgattgtgtctgcgtagtcacgaggtgactgcaacagatgcccaaatgcctggcacaaagaagacaagttgtatgaagatcagactctacaaggcaactactttgtatcatattatcttttaagatgatagatgatagttacctggtgttcaggttgattatggtatccagcttttcgccattgagcgattgtagagccgtgaaatattacaagggtgaagtatgaatccaacagtaagattctgtcagctgcaatggatgctacatcaagaagaattggctctggcggtgaatggaatgagaaagaaatcagtgaaggttgaatcatcacgactgaattagaaacgttctctctgtacaatatcattcgaaaatatgctgtctcgtctgggctgttgttaaagacctacaaaaggcaaagccaaatgagcccaaaaggataaaattgtgcgttaaaaagatttcagtcgatcgtgcatatagggacagtgtggataagtacctggacaaactgagatcggcgcaagtgaaacacaaactgcgggaaaattgataactgagaagataagctaaaggaagaaggattgcctttctggtaatctccaaaccaggtgcatagatttatcaacgctttatcgacccacctttggggattaaactcaggctgtaaaagaagaaataagaaacctaagaaacactaaaacatgataacatctatccgatattcagcttaaaaaatctaactagctctcatcatcgagtacctgagtctccattttggaggaaataagtcgtgccattactacagcagctgcttcttggtcaaaaccattgctcaactcctatacttaacatagcaatttccaaggaatagttaatgaccatagtcgggatcagtctagccatgtacaaaaccactgaccaattctcaaacctggtggcttctaatcactacttagaatggattacaaagaacataagatgatataagccataaagtttccacaatataactggtgtggcaactcgtttctcataaatattacacccaccaataatattgaagtggtaatataaatgctgtcctctaaacgactaaacgttataagaatcacttcccccacttcttccaatggactccctatttaacacaatagattctgaacatactactcgaaacttgcctgtaagctttcagttcccattacccatcttctagaaagagttgttacccggagtcttgtttgaccatttgagtgctgatagctgcagaaacatgagcgttgtaaagaaagtgtgtgacgttattatatccataacttgcaataataattttagttggaaaacttgcaatcccttactatgtcaaaaattgaaagtaaaactgattgctctgcgactgcaaaacaacatcagctgtatctattttagcaatttcaaaaaccaaacatatggaagtgttgttgtcgaggccacacatcttccatgcgcttgtgtgtccctgaccgatggcagtgtcagagcacaacggtcctttctgcaaataatcatcagatattgatcacaataagcgaaggaaaaatagatgcctttaacagttttatatgataccttttcgagagatgcgcaagggccaataattccctgaactttgatatcctttgagcagttaatttcaaatataccactgtaagagagaaacaaatcataagaaacaactcgctgaagctgaacatagcatacaaaagactgtttattttcgataaagaaaacatacatgaaagttaggtaagccattaccatgaggacaagcctagatcattttcacctgactgacacacgcgtttgagagaatctctaaatactgagtggccaaaactttcagcaagcacgacaaatccaccagtctgctcaactgcaactttgagctcagcaatgcctacctagagatgcacatattaaataaaagagatagctacaaaacaagaaagacagtactaacaatgacagatatttccacagaatcacctgatcaacagaactagcaaaaacatcaagaacatgaccttgatgaacaagttgtttcgcaagcatctcatagaattcaacagctttgtggtaatacatagcagaatctttatcaatatccttatgagaacgaataggatccgaaagctcccgagaaacaatctagaaaaaggcaacgaaagatcatcagcaagcagtagcactgagtttctagtaacggatatgaataacaagagaaaagacttacagctccagggccttgagtggaaggtccaccaataaaagccatgattctagcagcagagccaggaaagcaagctcctaagagactagcagcgatacggagagcaacaccagtgcatctcgcaggacggtgatcagctgcaacgggccagggactgtttcccagctcctcaagaacagagtgaagagtaaagtggcaatcagaggcaggtaacagaaaccgagcaatgtcgtcggaagagagaccatctctagcaccagcaatgacacctgaagaaggtttaggattcttgacgaagaaactcagctgatccaaaagctgatctttagtacagtctttgtttccatggaagaagtaagatttggtacagtgtgggaatccaagctcgtaaacacgaactaacgaatcaaacgtaatgagaccaaggatggaggtatcaggaagaagatcaagagcttggaagagagatgatttgaggaaatcgagttcttcagagatcaaacaagtatcaacaacgaagaggaaaacaggaggagaaggagaagagaaggaatcacagagatactcaacagttgtggaatgaggaaaaagctccggcgggagattgttatcggcgactgaagagtaatttagcgggaaaggattccgattgaagcagaaaggacaaccccaattacaagcggagaaatctacgacggagtaagggtttagaacggagcgacaagtccggcaacggagaggagagtaaggaaggagaagggattgagatctaagaggtttcagaggtgtgtaaatggcggaaactggaacttcggaatcgattgattgttcctttttcgttgcgacggggatgatgttccatggcattcttactccatcttgagcttcaagctctccaaactccgccatggttgactaacctctctagtaaacaacaaacaaatctgtaatctttctatatttcaccaagacgcacaccaagtgttcgatcaactgcgtaaaagaaatagtgtctgctataggcttgtttactgaaaagtctgaaacacatcacaccattgcatacaatacattcattcctgagcaaaggttttatacagaaattttgaaactacaaaaacccaaatcaaaacacatacacacacagagagacgaagaagaagcaatctaagatttttagggacatacagaaacaaagactgcaacagtagcgacagaaagatgaaaaacaaaacagtcttcgtggaaacaacacttgaactttttcttcagggtttaggatcttctgagcgtgtccagtccacgatcgactcgtctccagcttctgcattacaatcaaaaggtttctagttatatacaaatgaatgtgatgatcactccggttttaccatgattgattagtaatgtaccttttccaggaacgattatgacaggagcagatttgcaattgtggaaacaatactcgcttacgctcccctgtagcacgctgcacaagtatccaaaagagaatcatcgacttaggaaaggcaaaagagaagaaaaacaagacatagatcacacaactagtagttgtttttgtattataagttataaccaaccttcttactaagctcctgcctcgtgtgcctacaatcacagcagcaggcttcactttctctgcttccttgcagattactttaccagcatcgccttcaacaacacgagccacactctttacctaaacataacaaaatcagtatcaagttatgtcatcgaattcaaagaatatatctataaagtgtgtaccaaactcatttttctgattattctcatctaaaatcatcacaatattgatttccaagaatacatacaccagaggttttgtctctacgcagttggtagcaaatgcgacaaatgaatagactagaactagtgtttggattcaagagaagaactaagcaacgatctcaattctaagaactagtagttgttaggaaatgctactaatgaaacatctgattgaattggattctcagaccctaacttagcaatcaagaaacaacattatcaggcaaaccaaaaagagataatacaatataaaggttaccatggcaacttgatacgcctcaacagcaagtttctccatgagggcttggctcgtctcatacacaacatcgttcttaacacctgcgaagaaaatcaaaaaccagctttagaatctccgattccagatctggaaatgcaaatgaacacgaaatcggactatatactattcacattgaagagagaacgaacttgagacggcgtggacaagatggagagtatcggcgagacgacagaaatgaacaagagcccaatcaaaagcgtgtttgctattgggaccatgatcaacggctacgataacatctcttcctcttctcctctctccgctctctctctcaagttccggctccggcactaccggaatcaaagacggcaacactacttccctgaaactgtactcttcatcctccggcaaagcctccatctccgagcaaacaaaaaaaggaacaaactctcaacggatttcgagatttcgacttgtgggttttgttgggtcttcgattttggtttctgggtcttcgcgggttggatgaatcgagatgattggttttgtatttgaaagaaagttgcgtgtagagaatttgatttttgatttgattttattttggagtcgtttggttgctttttgacgcatcattgaaatttttttcatgtgagcccacaattttctgtcggctgctttccagaagatattataaattgacacttcttttttcttggataaaataagagagacactaaacgaaaataattgtttgttattgttcggattagagtctaatcattagaccatattttatttttagttaatgagttattatgactataatttcttccctacacaaaattgttacatatgcatacaaaagaataaatctaactaacaagaacataattcaaacagtaaacaaaatccgttgattttgagttttttgactatataggtttcgtttaccaatcgtgtcgtgttctacttggatgtataaaaataaaagataagactttggttttcttcatgtgacagtaacaatctgacaagcatccatatggctcgtttttttttttgtagttttgtagctgcaatgtgcaaatcaacatgtctactaccattagtgataaaaaacaaactattgggaatagtatatagacaaaagtgttgagtgcatctataattttctatagaagtagttttgttagtatgtgcctttagttttgggtttcggcccattactatatcgggatatatattcggcctttgacggaaaacatagatacacgcttttttttccttagttcttacattcaaacatacaaaaatactcattatagatctctttttgattgctaaaactaatgcacgaagcatgcaagccgccaaccctacacgtaaagtatatcttaagtattctctaatgacttaaatttaacaaaaaaaaaattggtaagcaattacatattaacgacgtaactcatagtttaatgtttgatttttttttttttaatgttcatattcaattaccatttaccaaacatacgtaagataaatgtagataaattgacgtatcgatgataaaaacttttcaagtgaaccaaaaacgtgtagtttattcaaatggaagattgttttgttggtcaagaggttagaaatcgaatttcagcccaacattattaaaaactggtttggttctgtttaattaggtcattgtagacgttgacacgttgtagtcttgtaggatgacaataaaatcctttttatacaagttttggagagtagtctaggttatgtaccatggttaaatatacaaatatatattcttgtgtgtatagaacttgtgtcttagagtttaaagtttgaatctgatatagaaaaaatctcttgtcaacgaaatgcaatctttcaacttcgatcataagaattcgaccgctggccaatcccaccacgtcatcttgatttttagtcaaccattggtatgtatataaaacaatctcctttatgtgcaaaccaaacttttcaaaattctaattttcacactcttgcttcactaattgaattcaatagttttcattttttatttctatcttgtatttgttttttttgtcctctgcacaatcgccaagacgtgaaacctcacatgggttatgccaagatgggactttataaaacgaagtccaaacgttcaattgctaactatcatcatatcataatcatcaatattttcatcctctcttcaatcacatcttcttccatggcttcttcttcttctccatcttccattgatttttcgactgcaattctaataagagttgatcaatcgggcaaaggagacttcagtaagattcaagaagcaattgaatctatccctcccaatctaaacaactctcaactctatttcatttgggttaagcctggaatttaccggtacatataaaatattttgttagattttctatatttaagtcgtcttaaggtttattaggtttttagaccttaatggtttagggtttagattttgttgatatttatcagctgggtattaggtactaggcttttttgacctactaatatatttatgattttttttcctaaatagtatatgttattgatgattagtttattctatgcttttaaagtatatagttttgagaattagcgatttcattgataacagagaaaaagtggtgatacctgcggagaaaccctacataacattgagtgggacacaagcttccaacacttttctcatatggagcgatggcgaagacattttggaatcacccactctcactatctttgcatccgattttgtatgccgatttctcactattcaggtcaatcttcatcatacatcgtatacattcattttataaaataccaattcaaagtagatcaccaaaatatcataagtaagtgaatcattattaattaacaaaaaaagaaagttactaatattgatgtgtttcgttttattgtaagtagaataagtttggaacggcgggacgtgcggttgcactgagggtggcggcggataaggcagcgttctacggatgcgtgataacgtcgtaccaagacactctccttgacgacaatggaaaccattacttcaagaactgctatattgaaggagccaccgatttcatttgtggaagcgcttcttctctatatgaagtaagtactaataactcattttacataatttgtaccaattaaaaatacacttcacataataatgatatatgatatatcccatgttttaatcactttttctacaactatttctaaagatcaattaaggatcgtcccagtgattagagttatttatttccatatttttgggatatatgcatgcatgaccagctcttagagagaaaaaaaaacatgttccatttatagataagagtcaactttctcatagttttaacatggaatgatctataactattcattacatgtttaattaatccttactttttttatggtttcatatgtagaggtgtcatttacactcgttgtcgccgaataatgggtctataacggcgcaaatgagaacgtcggccacagagaaatcaggctttacattcttgggatgcaagttaactggatcaggttccacatttttgggaagaccatggggagcttattctagggttgtctttgcttattccttcttctccaatgtcgtcgcacctcaaggatggaaccaatggggagattcaaccaaagaaaagtactttttaaccttttggtttgtggttaatgttcttatgaatatttttgactgatgtatactaattttgacaaaatttgttcagtactgtatattatggtgaatacaaatgttatggtcccggagcagacagggaacaaagagtagaatggtcaaaacagttatcggatgaagaagctaccgtcttcttgagcaaggactttatcggcggcaaagactggctccgacctgccccttctcacttcaagaatgctcccaaacaaacccaaaataaagaaattaattaataattccatcaattgattactatattttcttccttttttcttgtatataaaatcctttttatacaaatcgtttcttattagttgtgtgtaatatttttattgttgtatgtataattattgaaaacatgtggatattataataaatactctttgtaaaagaatttccatgaccaccaaacgaatcttttcgcctcatgaaaaggaagttttaatccgtaggataattattgttcaataaacagaagaatttattgaactcgttgaatctattagctcattgtagttaaaacgaaactatcaactagaatgagacaaatgacatgttttaaaaggaaaacaaaatgaatgaatttgtttcgaaataaaattgaattatatttacagcagaggtacttggattaaagggaactaacaaagaacaatattcctgcaacataaaaactaatgacccttttctgtttccttcttcttcattgtagaagcataacaatactagtaattcatcactacaaaacgttccaacgtgaaaacccaactttttttcattctttttctgcagaaaatgtggctgcaagttgaaatcaatcagcacgagagccgccgccgctgttcgcagaagatttccggccgctatatttctgccacacagatcaaacgtttgagatcaaattagcaactaacctcaaactctgtaactatgaatgtgaatgaatttgcagagacgttcgcaggattcaatagacaattgaaatgtgtttaatttattactaaacgaagtttgaaaatcaaagttgtgaaaaacggttacctgttttccgatgctgaaaggaatgtacttgtgcttgatcatgtgggctatttggcgtctcatggtgaggacaaagagaacgacccagtagcaaagcagtatgggccagaagacgggaacatcaaacaccgagaagaatgtcataagaaaggctatgcagaatgccttagtcatggagtacctgccacagattcaatcacattgtcaccaaaaatgaagaagctactgtgtgtagtcgggaagctcttagaacgaaaaaaaaaactgagcaataatatttaactgcaatagtgccacaacagattatgacaatgcaacacaaacattagtagcacaacttggttaggaagatggcatatggtttaaccacctgaatgctaatagaattttaaatccgactttatcacaacgaaaatgatagcataagcagttaggagatagggaataaggtaccagaatttaaactccgggagacggcggataaatggcttgaactcatcagaacctcgagtaggcagagtagctccatcagatacctcgagctcaggatcaacaagaggagacaaaaacccgataagcagattcaggaggtagattccaagaccataggagatgatgtagaatccgtgaatagagtaaaccctcaaacagtagataagaaagaaaacaagtgttccgatccacctgttagttgaatgaggtgtagtcttgtccagataatattggtaaaccctccatgcctcatgtactttcttttgtacaggcgtagccatcgaaccactgtcaccaccgcttccttccattgttattcttgaaacctagaaatgagcaaatacacaataccatcatattaaatcttcagagacaatcaatgaaatggcctctgcaactaacttaaccagctagtggaaagattaactcagcttataaacagaacaatgagcagattcttacactaatttatcacgaaactagctataacttgtaagcatagattatataagctaagagtatccagaacatttctcacgagaatgaagatctcgtgaatcttacgtataagatccagaagtccagaacaaagaatgaaggaaaaattaaccctagcttcgatttctccacttgttaagcacaacgaatcaacaaaacgccattaatcatctcttagctaaacaaatctcactagtgaatccaaaaaccctagaaacaaactatttctcatcggcgaaatagatttcaacaaatcgcgaaagttagatctggaatcggaacaatcggaactgaatagttcacaagtaatccccaaattcatcgaaagcagcattaaaacaacgagaaggagtgcgaggagagaatctacgaatcaatcggagaaagaagaaaatcgaagattctggaaaaatggagattgaaagacttacggatggtgaagaagaagaaggaattagcttcctcaaagagagacctctcgacgacgcagcgaaaaagaagcagatctggctttggctaaggaagagaagacgacgctcaatatcacaagaatccgttttttccctttttttttgttaattaaattaatttaaatgtttggttcaatgccttcaatgtaaccccacatcttagtttcgttttcatattcacccccttaactattattttgtcacttctaaaccctcaatctcacatttgattaactggaggtttgtttatggtttttgtattttaactgatttgaaaattcaatcaatatcattatgttggagtaccaaaatcttgttttatccattcaatgattttatataaatatgagttagtatgatgatatttagtatttgatttcaaattacattttaacaacaggttgattattgcttaagtatttagtttagaatgcggaagtgtgtggcacaatgacagaagatagtttgcttattttttgaataatattataaagagaatcagcaaagattcctaaatacaaaaggtgaaaagagagaaagactgctcggccggagcactgatcaatacttgactgtgtttcttattgttctctaaatctatatctctaaatttgagttcttctagttgtagatgcactgcgggaaagaaaagatcgaagctttctattttcattcaccggctagctaaaatgctttttaatctcagattgttgctcggtggacttactttcaagctctccattcatattacagtaccatcttgaattgtcgccttttcgactatcacagtgattcctgatcgaatgtagaatccttcctctggcctatctgcttcttgtacatcctgaaaacatcgaaataatgtcttttaggttttgatctttcttcaacagttggaaatctgaagggagaagaaattcacgaaacacttacgcctttgttcatgatgatcacgtttttaccgatcttagcattcttgtcaatgatgcatttcctataaaatccccagaaccaaaaaaaactcttcgcttcagacaaaaatctatcatttgaagagggttttttttggatgttatgtgctttttgcaaaccttacctgatttttgtgtctttaccaataccaattggaacctttccttctgctaatagagatgcaatctcagactcagtttggtagtaatctgcacctaacatcaatgtatcctttggaaaagaaagaaagaaaaccaagctcagtttgatcgcaacatacgtaaaataatttcgattgttttagatcaaagttaagagattcacctgaagctcaaccccgtagtctagacgtgatcgttcaccaatgattgaacgttggacgctgcattctcgcaggaaacatccatgtgagattattgaatctaccatctaacaaaatcatcaaaacagaaccatacttaattagcatttggaatcaaagaaacaaccataaagaaaaggatagttttgatgcatacccgacatttctcagcttttgttggtgggaggaaccgaggagaagtgtagaacggagtttctggatcatagaattcaaactttggtcgctgcagaaccagatcaagaacaaaaggttgagaaatgtatccaagatgtcataataaggtggagttgatgtacctcctcaacaagagctaaattagcctcataaaatgtctttatagttccaatatcctcccagtaatctctgaatatgtatccctagccaaaaacaatacgaaactgttagatcattcgttgtgttcaactggtaaaagaaagacaagacgtgagttttatagaatcttacttgaacatcgtgatctcttatggctgcaggaataacttcagatccaaagtcattggaactcggatactgtcttgttagaaggttcagcaaagcttcggttttgaaacaataaactcccattgatgcaatgtatggagaatctgttgcttcttgatgagacagtccaagcattgttgtgtctgtttgctgtaaataaacaaacagaaaagtttttaagttttgggagttgatttgttttaagaatcatagaaaactataccattgatttcaggtcgactcctgttggtttctcggagaaatggattacacgcccacctcgatcaatctttactagaccaaaatttgatgcacggctaaagaatccacaaaaactagttttaagaactgagatttctcatagaaaagacgtaaacgagattcaagaatactaacctttcactaactggtgcacacgaaagagtaatatccgcattactatccacatgagactattacaacagattgagttagtgcaactataaagagatttaagatgatgatgaacatatctatttaatttggataaatacctgaacaaagtccatgtagttcattctatagagatgatctccagacaaaataagtatgttctcaatgttcctgttcttggcatcctttttttataagaaatcaacagctttaagaccattcaaagttcacaaagaaactgacttcaataaaccagtaaaagtgaagttcatacctcaaacacccagaggaattttctgacagcatctgctgttccttgaaaccacttcttcccagcttcccctggtgtttgtgtagcagcaagaacctattcaataagattttacttttgctttttattcctcgaaaaaatcaagagtgctgagagttattattgtcatagtgtttgtacctctacgaaaccacctccaaagtttatgccattcccaaaataagttcgtgctaaatgtcgattaagggaagctgagttgaactgtgtcagcacaaatatcttgttgatgcagctgttaatacagttactcatcgggatatcgatcagcctgtagcatccaccaacaggaacctaacataatttgaagacacaagaatcttcagtacacaaaaaaaaactgtttcataaataagacccttgaggtcctaattcgatgaatgttatttacagtttcggtttattcggtaagagaaaacgaagtaagatgaatatttacagctggtgttgcggctctcattgtaagagggaagagtttagctccattgcctcctcctagaatgattgcagccacattttgcgggtctacctttcttctctcaaacatggaagtctttactgtctgaaaagacaaagcaaacagaatcaagaactctggacttttccaggaatcgattaagcagtcttcttgaggcaagtcttaagaattttgtctaatgccatttaagagaaaagagtaaactgatcaacataccatagccttttttggattatctgaagtggcaacagcgtaaacaacaccgtgcttgaacttttgattcctaaacttcttggagcccaaatctgatccaaaacgtttacacaaaccattgttgttgttcttctcaccataaaatctgttctctacattcctgaaactgagttttggcaaaatagaactacttgtccccaaggcaaaggagtaagaagaatccatctttttagctgcaaaacacacaaaaatgaaacaacagaaacctcggaaagttaatagcagatacgatttgctgagaagaataataaaagcttcaagtaaagtgaataacacacaaagcgtttcagttactatttacttaataatataatcaaatttagtaatagaataatccaaacccattgttcaaatctaagcaaagtgttaaagtgaaaccgaccagaaaaattctgaaaaaaaatctaaaagacatttcttgagagtacccaatagataaatcctcgaaagctacgaactttccacaaacccagatggttcacaaacacagatccctgaaattctcaaaacacaaaactctttgaagtttcaaaatactctaaagctcaaaattactatgaagcttgaatttgaacattaatggttttatgagtaccaggctttaaggatcattatactatgaagcttcaatttttcatcatgaaactaaaagaacatatcctaaagattaactttttttctagtgcacattggttaaaaactaaacccagagaagcaaaatcgataatgggaatgaaaaaacctcaaaagatagaaactttttacatgttgagaagctaacaacaacgatccagatagaagaatccgaaatttaaacagaaacttaagaaacaaccaaaaaccattataaacagcattgttagcagagtatataaactcacgagaaagtttaacacttttttctgattatgattatgataaaaatgtttgttgatcgtttgaaatcgaagactgaatcagtgaagtgcgtagttgacggaggaagctgttactttttctggttttgtcctgtgatcgccccacgagaaagtatacttttttgttgatgaataaatttgaatatttttttttattttaagagaaaaaatattgagaagatcatagtgatgtgactatgtgagtcatgtgactgttacacaaaacggacggctctggtttctcccatactctttctctactgctacacggacacgtttaacccctcagcccatattcatctaacacacgttctcttgtgtttaaaacaataagaataaaccaaatgctttcatttgaaaattttctacggtcagggtcagggttgcctagaagggtacaagaacaaatatctaaaacacctatcatgtgcaatgtcaagtgtgtgaaagtgacgttttttgtaaccatttgtatgactcaaaagtagtgaagcttgattgatgcttaatattattaatggtattgttttctgttgttgttgaactagttttacagccgcacaattgtcatagaactcattttggtggttttctccagcttttaactcgaatttctcacacgaaagttgatggaccacctcattgatctaaacatatccgagtagtttaataatttgaaggcttgggtatgttggtctcaaagataaaaatggatttaaatcctaaacgaatcaatgatgatatgttaatgataaattgataaggatgatgatacaaagaactacacgatatggtgatgatagtaaattagcgcttctacatcgaacggcacactttttttgtttacagacactttttcaactacgatacgaattaatactgattccggttaaactctgaaattcatatgactgttgagagggaaaaagcaactccgattaaagagacaatatctcaaaacaacattctaaagaggttctggagcacaaagtaacgagaaccaaaaaagaactataagagttctgatgattaatgtatacatcaaaagacaaaaaccaagaaaagagtcgagaaccaaaccattgaaaggtcacgctttttaggtgttggtggcacgagtgtagatctgctggctcgagtgtgcagagaccatcctgatcaaaccttttgccattagctccctaatcgccctcctcgcaagagacccattaatctgatttttaacaattcacaccataacaaagtcagatactaacatttgaatcatgaggaagtaacaccaaccatacagtttttaaaaaatgcaacagagataaaaaagattgtataccctcatacggtcggagaggattgatggagtgatgagcttgaacttgggagcttcagtgagaagcttgtcataagtgccttgatcaaacaacaccatgttgttcaccttctccttttgctttcccttgctccacttctgttttgtttaacaaacatttcattgaaaaaagaaaacaattaagcaccaaacacatgaagaatacaacataacacacaaagcaagacaaaaactgtatatacataaccaaagcttacgagaaatgaatcacagagactcaagtttctagatttgtatgaaatcagtgcaaacagaaacctagattttcagccaattcatactaaacctagatcaatctacgaaacctaattcaatttctcaaaactttagacataaacgtaggaattggagcgtcacgttgcttctaaatcgacattaaaagtagctatacaagtagtttaaaatggataatagaggaaaacggaccttcttcttctgttttccacctccagatttggccggctttgatgacggtggtggaaccttatccttctttggcgcctgaaaacacacaacatttcgaaattagattctctctttaagagcaacaaagcgatacagatagacagatcgagagtgagagagagtaaccatggtgatttcgacggagtaacgatcggcgagcagagaagagacgaaaggcaaagacgagaggcttaagagcagacgacagtgaggaagttttggttttgttatttatatattagggtttctgagtctctcagcgttaagaggcttcatttctcagagaaagcccattaatgttttcttctttgttcaacaagcccattaatgtttataaacccaatatatttattaagcccaattaaattatggtttatgaagaaaatgtgagaaacgtcggaaaactttaggacacaattgagagaacttacgaatagaaaatactcttttattattaatctgctttgttgattcacgttttctatgttttctacttttttctatctaattgcaaatgagtagttgaagatatttatgtagctcccaaactaaaagtatcgagataggttctttatccttaagctctatcatactataatatctagatattattgttgcaaatacagagatttttcctagcataatatctaaacattttaactaataaaatttccaaagtgataagtttctaaagtatttctagaaaaaactcttaaccatattattattactttgtaatcaaacacaaaagaacaaaaagagaacaaatgtattctcattcattatcacaatacaatcttaattgaaaaccaaaagttactgcattcatgatcgcagtggaacgtttcattacatttccccggaaatattttggtcgacttcatgcattccatagcctccacttctgcatttttccaaaaatttagtttattccatgaataattacattgtggtattgttaaacatgagaaaactgaccagagattgagagcagcactagggagcaatatcaggaggtactcttgcatttcgtgtgagaactgagacatacatcttcttcgtgtaatatccaatttgtgtaagaacttaaaaagccaaagcacatcaaatcaccttcgatatcttctcttgacttatattcgacgagagaacaattacatggacatttcatcacgtctactttgaatttatcaaatgcataatctaaaaaatgtttcacccctaatatataatcttgagataaatgtggtttgtttatccatgacttatccatcaaaacctgaaaaatgatttgtacactctataaactttagaaattcacaaaacatacactaaatttcaaaaccatttagaatctagtaataaatctatgtaacatgagaaccaatactcattaagaaccagacacagactagactaaaacaaaattgatgtaccaacatatatgtagtatcagagttttaactatcaaggtggatatatactttgttataagtgcagatacatgtttaacacaaattaaaattgtgttatacattacagagaaacaaaactaggataaaggagatgaatagatggctgaagctaatcgtagaatcaatgattcatcacaaaacttacctgatgagggacaaatcaatttgcgtcgaaaccccaaagaaaaaaaatagatatacctaactacgtctggttaaaacttaagaggcgtgatgatgatgatctcaatttttttttaggttacctctatttaagaaaataacccataaatgtatatattaacatcagtttttattattcaccaaaaaaaaaaaaaaaaagtttttattgatgtaaaattttgaattattttaaaaagtgatcttaacaaaaattaatagatacatcagttatctaaatgatgtaaatttctattttcttttaatttttttaaaaattgatacaaactaatagaaatggaatcattttatttagtttactgtaaacatctgttaatatattttttttgatattttttaatcgacaaagtccaatccataattaatctctattatgcgtgataacgcaatttagtagagtcgaacttcagtggggaaggtgaagtcaaatggacttaaccacttgagtaaaacagatccttatatcagttaatataattgatactaaataataaatatttgtttttaaaatataaatatgtaatttaaaataatatcatttaattttgtgatacaatttaagtgaattcatatacactcatattttggtaatgaattcattcgattttttctagaaaactattgacctaattttaaaaaaaaatgacttttgaatgcattctgtatctaaaacttttatgtgaatcttcttgtatatggatgaaacctccctatagtcccatgagctttacgtctagcgttaaatagatctcctagcattataagtctaaataacggttgaatacaattatgcgtaatgaacataccgaccttagctcagttggtagagcggaagactgtagtagttgctgtgatctttaggtcgctggttcgattccggcaggtcggattttttgtcacgtgacacaaaaatgttatttaaaaattgtttttatttatttattgtgcagtaactttcccttagcatggacacaattgctttctggataaatgaagtaaaacgcaacgtgtcagaaaattatttctttcttttactgaaactgtttgtcgtttttggattataattattttttattaaagattttaggtatagtataggcaattatacacatttacacagtgtagatcagcttagtgaaactgaatcagcatgcactcactgactcacatgcgatggcggaaacaaatgttataaaaaacctctatgatcaacttgagaattaaattatgtattgcgatatacgaatgcgatattaattatgaaactcgatcagattctggttctttatagatttgccaccagaaaaggagtcacattttcttcttcttagaataacattataacaataatttcatcaactaaattcatttgtgagtttgtgtgcagtaagctccataatctataaatctaagttcatattataaataaaagaaaacagtccatagattttaaaggcccacatatacattttatgtaaaagaaagtattctcttgtgcctcttgaggtccaatcaggtctccataataatttaaattatgaatcaaataacacaaaaacggtatctgtagtacaactcagattgtaaatttcaggtccaaaaatattttgtggacaactcaaattaattagcatctaaatcggttgataatatgaaataaaacgtaaaccatttatggataagtgtgatttatgtataagaacacgtagactagacatatacacttcattatttgcatcgtgttgattgaagcaccgaatgacacgttacacttatgagcaattatgaagatgtctttatgaaaaaaagaagtggggctttaatttttgttcaaagtgtatccaataacaaaattagaattgaaatgaaaccacatatacatacttttggttagaaagagacaagacataaataaagtgagaaacacattaacaaagagaagttgtggaagtagaagccatttctcaatctcttagtgaagaagtaatggtttcttctatatttttaattatgaattggagaagtagcatgttttgtgtggaaataagaaaaatgatatagattttataagtttcttaatatgcgactagaatagtatatattttatatcctaaagtatttttatttggcaccatagacatactttgtaccaatcattcaagtcctaaaacctttttgcaacaaaattcatttaaatatggtgatacgcattactttaagagattaatttgttgtgatcgaaatcaatgaaactttaaatgatggacatataaaactaatggtgggctgctttatgactcgagtaaataattacaaatggatgagatagctagtgctgtagtgcatgatctattttaccaatgaaacaacagatgtgattactaatttaatcataacttaatgagacatatcccacgcatatacgcaagtatctatcgcaatttgcatctatctatgtagaaagtttttagtcacttctacttgtcaacaatggttgcattttgcatgcatataataacacaacaaaattacaaatcattgtaagtgagtatatttcttttgtttccatagttaaaactattacatcttgttgcttctaatatgactactagtctacttctacttgtagaggtaatatctaatgccctttgcttaaaattcattttcactgcaaggaaatgtaaataacgcaaccataaattggagtattataattataacaagtgaagcatggctttttaactaacatattctttaggaactgcacactttccatgatcaaatagtatttataagaaaaagtgaatatgttacttgtttaattggcatactataacagagtgaaccacaattttgaattacctattaaaattatataataaattaatcatagtacatttttagtttgaccaaataaaataaaattaactacacatttattttgccaaaacaatcggttccaaatcattagcttctcatcatctcatttttcttcttcttactgtttattagtgaaagagctaatcttctttaaactagatatttctccaactaatcttctttattttgcaattaaaatatttgtgttaattttttaaaaaataaatattttaaagtttacttgtcaaacttctgaaaagtaaatcactaaccattacagcatctggttcgattgtttcaacgttgttatttacaagacaacaagagttatggtaatgatttttgcttgttaaaatataagctttatattactaaactattatgattttgctttgatgatacaaatcatatatcttacatataaacgtaaatacaatcttaaaaatacaacaagacaatggagtctatggagtcaaatgaaaatataaggacacaaaactatgatttttattagattttcagttcaagtagattcataatttaagggtgaaagatgaattaatttttctgtttttgtcaaataagaacataataactgtaatccaattgaaaaaagaaatggttcgtggaaaaagaaagcaaagcactcagtgactctttataaatactctcattgcaaagttacattctttcaagctaacaaaaaacacacaaacaaagagagagagaaaaacagacacacactcttctctgtttttttttgctccacaaacttaaaatcaaattctcctttttctctacaacatctttgtttgatcttcaaagaagatttaagcttgaagttacaaagcttctctccttcagatcctactgttttaagttaatctttttcccttcaacgccaatggattcgcttagtactcagaaggctaaaccaagaaagatgaaggttgttgtgaagaagtctcgggctcaagtactcttagatttgttttaccgggtgatcgagataactctagttataattactctagccaagctctgttaccaactagtcatcacggtagagagctctggtctcgcaagttttctcatcaaccgtcaccttgctttcgtcttggggaatacgatagtcatcaccatagtcgtcaagtgtgggttctttgcgaatcaagaaactgatgcacggagaaacagaaacgatttttacgacgagtttgttcgggagagctcaagaggagaacggaggttacacaccgatgtgatatgcagagaaaaacagagtgaagtcgagagcgttgcaaaacaaagcattgaagaaaacagagcaaaacagagcattgaagataagagacaaagcagagcaaaaccgagcatgtcagagaacagggcaaaacagagcactgaagaaaagagagagaaacttaaaaagtctgagatcagtggcagacagagcagtggcgatgagagtgagaagaaggacataactgtgaagaaacaaagacaaatcgttgctcaaaatcaagatagcccaatgaagagttacgaaaggagccggtcagagaatcacgagggctcgaagaagagttcttgtgtacaactgaagagatcagagacagagagacctgctgatagaattgtttctgatgatgagctacgatacaaaatcgagtctttcattgctagacagaggaggaaccaaaaggatgaagagttctgtattatctaaaatgtataaatactaaaaagcaaagaagaaaaaaagaaaaactttagtttatgcaataccattcacatatatttgtgagtgtttgtatatatatgggtaaaaatatttcaatgcccgagcataaattgttgttttagcttttctttttttggtttctttgtataattttgttaatcttatatattatgaagtataagttttctgtaaatttgtttatcttataaatgtaatgaagaagaagaaatctacaatgagtatataagaagagtctttgtgaagcaagttatatcctcatgagttccaaatcagaggcctcaaagttgtccatcttctttttctcagggttgattttcaaaatctgtttttaccgttaatacattagagacacacaagttatattgtttcctgatttgagagagagcaaaatatatttagtacttaccgggaagggtttaggggagatttgaagctgtttttgtatagccttgacgtgagctttgttaatataggcttgtccaatcacatggatgaaatcaccagctccaagatctgtcaagacaagaaaccatacaaaggtttcaactcttttactttagactcaagagctaataaaatgtgtacataccgcaaacatgagcgatgatgcatgtcaaaagagagtatgtagcgatactgaaaggaatcccgatactcgcttcggttgagctttggtatatttgacaagaaacttcaccatttgccacatagaactggcaacaacaaccaaaaaccaaatcattttcagttttgtatatcttgaaacgttgaaatgattttacaatggaaatgtaacaagtttcaagatgaaaaacgtgctaacctgtgtgaacgtatgacaaggagataccgacaacttgaaatctaatggattacaagcggcaagcatgatcctttgatcatgaggattgttctttattttgtttataacatcagagagctgactgaattcttgactggtaaaatgtaaaaccaatcagtcaaaagaggcacagcatatgagacaaacatccaaagaagagacatcacaaacctagcatcacaatgtttccagtgaagtccatgcaagaatgggttgtctccatcttcttcggtggcattcactccgaaactggaacataggcatggatgtgagttttgtataagtaaaagtgcattttaaattctaaagtttgtgcttgcctgtcaagatattcttttgcctcatcggtgtcccatatatgactaccgttttcctgaaagaacatatgagatataatctatatatacatttttgcagccattttgtgaaataaatcatcaagttgggacttatttacagtagctgccactgacatttaataattatttttgataattagaaagtaaatcttcgaattaaatatttgacatttaactatcttcccaaaatctctccacattaactacacaattagttactaaaataaaacttccaaaatatttaatatcatttaaacactacaaaattatcatttttgatattgcttttttcatgactataacaattcgattataagcatcaaactgcagaaatatttgatagcagttaattactacaaaattacaaaatatttatacaatgatttataaacatatcataaataaaatcaacattaataaaataaataggtttttacgagacgagtttgacaggacattatttaataacaattgtaaactttaaaataaaaatattttatatatagatacaatttgcaaacttttatatatattaaaaaattaattgtctccgcggtgtaccgcgggttaaaatctagtatgttacattctcggttttttatcaatatatcaaacaaagaaaacatatctttaacccaagaattttgggcatgatcattgtcatttactgtgtagtagcacaggtctctcttggttttaccttgggattgtttgaaccactgataagttgtagtatttcctctacaacaccaagccagaatattttctgaaaggcaacgggtacaaaaaccgacaaaatttatctctgtgatcaaataaaggtgaactactttgataagagatgtgaataaaagaagacatgccttggtcgtgagaagcgggaaagtcttgcgcagattgaaccgcatctgtaaatgaaccaaatcaagaacaaagaacatgtaagctcaattaaaggagaaagatactaacaaagattgagtgtagctctcacctgacagccaaatttagaaagagtactattgtcattcatgtctccactagatataatgttttgaacaagattcaagtaaccaaactcctcatgcctctcgaaaaccatcttaggcaaaaacgagtactccttcaaatctgactcagcaacacttttcttttcaccggagccaacaatggcatcttttcttcggacataagtgttgaaactataccgaattccattttccacaactggaaatgatgagtaccacggacggtacagagaagtatccactctcggtgcaaatgcgtcacatggcacgcttatatcgatttcggttaggtggatagcatcacagatggatgcattcatataattcctgtagagaaaccacaacaattaatcattctctcattcacagtactaaacttcaaccatctaacttaaggccttaaaagaacttcaatcattgtaccatcaatcaaatcaagacatcaaacctcaaggtctaaagtctcaaacatcgcatgacacgcttatatcaagacataaacatgtgtttttagaaaaagaacaaaacccttgtggaaagaagatgcaaaccttaacaactcgccgcctcctatgacaaagaccttctcaatggacaaggaatagggctcagtggctagaagttcaagagccgattccatgctactagacaccagtacattctcatcaatggcaatgttgtggcagctagactttgtcaagacaatattgagccgaccaggaagaggacgaatctctagaggagtagattcccatgattttcttcccattatagtcgcgttcctcttcgtgggatcggatgtcctagttgtaacatcttggaaaaactgatactctgaaggtagatcccaaggaagtttcatgtccataccaagacccatgtctcttgtcgccgctattacaacttggtaactcctcctccttgttactgaaactgcgctttggccattgttacatatagtttcaccagtagaagccatattctgaaacttaaaaatcaaccaagaatccaatgagctgataaaaagacacaacaactgcaagtaatggagttttcttgaaatctagaaagatcctgtaataagctttttatgatcgatcaactgcaaaatctatgagcgattagaattatgcaataaaggaatcttggatggatcaaaaactggaatcaaaggaaaaactaaaatagtcaacgtataggaggaggaaggaaataatgtatctaaagttagcttaaacagtcttgaaacttgtgtatacattaaaaaaaaaacttgaattagaagtaacattctctgaagagtaacaatggaccttcctcgaaaagtcggcaaaataattttaaaatgaaattaataatgcaatctttacaagtcaattccatctaacataagattaaagaatgactagtggtgtggaatggtccatatggatttacaagctaaacaaatttatgttaaaatttggaccaattttttgacaaatcccactagatttttatgtaagaagtgaattttgtttactaacaccatgatttataaatcaacttttggttgaaaaaatgcaatttcatggagatgcaagtggaataattaagttcaagttgattctttaaccaaaataaaaaaggaagttaaagttgattacacatgcatatgaatctgattttttaaaaattaaacattctcctatcagtaagtcaggacctatacatactacgcagtcgtaaatgcttcagcagcagcagactcaagtaggaccattacatgactttattcacgtaaaatccaaatatcaattatatgagtgaggaaaaaaaaatagtaataattatatcagtgaggacactagcttgtcttttttccgagtagtcgatgccggagaagtaatgtatccttcttcatagccatcggaatcgccgtagcagcaaaagtagccatcgacaaataaagaaggctgcgaaatcagaaagtaaattgactgttggagtagagtgaatcaaaccaaaataatcactttatttgggccgtgactgggcctttcaatgttagtgacacttagaaaaagtatgaggccgagatagcctcacattttaggcccaaggtttggtaagttaacccttaaatagtgtgactgtatgcaattaatagtgcaaggtaaattatctacatatacatttttcagccattttgtgaaataaatcctgtatttgagacttatttactattgctgccactggattttaatgtttgtttttgataattagaaaaaaaatcttcgaattaaatatttgacatttaacaatcttccctaaatctctccatattaactacacgattagttactaaaataaaacttccaaaatatttaatatcattaaattactacaaaattatcatttttgatattgcttttctccatgactataacaattcgattataatcatcaaaccgcagagatatttgatagcatttaattactacaaaattacaaaatatttagacaataattcataaacatatcataaataagatcaacattaataaaataaatagttttttacggacgggttggcgggacgagtttgacaggaagttacttaataaccattgtaaactatattttataaataaatacaatttacaaacttttatatatattaactttgaaaaataaattgttctcgcggtgtaccgcgggttaaaatctattttaactttgattagtggagcaaccacataaaagtatttgttgacctgattttaccaaggttaatttttcttaatttatttctcgaaattgagaaatttttagtattattttacaaaaatgttactttatttaacaaacgagaatacacaatatttttttgaaataagtagtctagtcttatcattaatgtgaatattaaaaagtcaattaatattgggagctggaagcttggggtcattcatgatggtcggtcggtccatatatcaaaatttaaatgagacagtttattgtatttcgctggaagaaataaatgatactactaacttgttgacactaaaaaaaataaaaatgaaaattaatgataactgttttaattttatcaatttctcttaattttatttatttgagaaagccaaaagccatcagccatgccgttcataattatattgtcggaaataaaaaatttagttaacaatttcaaagtaagaaaaccagctctcttcctaatcattaattttcttttttagagtcataaagaaaaaaatacagcatgattctaattttcatttacattctctctttttaagtccttacataagtttgtttgtttatcatttaaaattactgttataaatgtattatataacatatcaaaatatatatctttgtctaatattttttttttatgtccagtatatatattaattagagttagtgaaatagtattaacttcaaaaatattaataaaagctatttaaaaagagaagaaaatctattcatttaagaaaccgaattactagtagttcataatttatttaatttttttgacagttactattagttcataattattgtaaaatattatttagggtggaaaactaaattgggtaccattaggaaaataaaaacatttgaaaacagtagtaataatgttttctcttccatttacaaatatcttaccagaaaaacggcaaaacacgcgcctttcttcttctccctacaaaaatggcttcttctctttctctttctcttaccagggacaagttacaatgtaaataaaggtcaaaccttttttccaataaaacccttttaatggattgtgctaaaactctctctctctttggattttcaaaacaaaggtaaaacctttttgtcaatatccttataagctttctctctcttttagatttgtttctctgaggtttcgcattctaaatctggagccgtcctttttttgggggggtaagagagaaccaaagagaagtatatacacctctctttctcccttctttctcctttccttagcttttgatccttattaggtaaaaatcaagaaccttcttctctataactttttcttcttcatttgtttcctccaccaacctcaatcgctaaatgtttgaatattccgattgtttccaacctccctgattgattatttcaattttctgtttcttataacaaaaaatgtgggtttgattcttattcagatgatcttgaatctctgttttagtcctcaagatttctctgtttgatcaaatgtctaaatgggtgtctctagttcttgtttttatcgattgattgttttccaaggaaactctcttgtaaaactgaaaccttttgtttatttgcatctcttgatgaaattagattggattctgctgtataatctatggattttaacctgtatttatgtgtgtttatgtgacaacagaaatcttaaatccagactttaaccatgacggatacaatgtctgctcatatggatcgacataataagcttggtaaggaggaatctttctgcaatggaggagactctttttgtagcaaagattctgaaatctaagttttttttttgttttgcagattatgacggctcagaggatgaaaagaaaacaaagctttgttccctcaagaagaaagcaatcaatgcctccaacaaattcaaacactccttcaccaagagaactcgaaggaacagccgagtcatgtctgtctctattgttgacgatattgatcttgaagagcttcaagctgttgacgctttccgtcaagctcttatcctagacgagcttctcccttccaaacacgatgatcatcacatgatgctgaggtttctgagggcaaggaagtttgatcttgagaaagcaaagcaaatgtggactgatatgatccattggaggaaagagtttggtgttgacacaatcatggaggtcctaaacattttaagatcatcttctttttcttctcctttaattaaagtctgatcctttttacttcttctttcaaaaggactttgatttcaaggagattgatgaagtcctcaagtactaccctcaaggttaccatggtgttgacaaagatggaaggcctgtttacattgagaggctaggccaagttgatgccacaaagctgatgcaagtcactaccatcgataggtatgtcaagtaccatgtgagagagtttgagaagactttcaatatcaaattaccagcttgttccattgctgccaagaagcatattgatcagagcaccaccatcttggatgtgcaaggcgtggtatgcactctaatctctagccacatttgttttggttatacagatcaaagagaaagagagaatgagtgagtgattcttctggtattgttttggatttctaggggttgaagagcttcagtaaggctgcaagggatcttcttcagcgtatccagaagatcgatagcgataactaccctgaggttactatgttgttttcttaatggttttgaaatagtttgtaattatctctatcaagttaaaatggcactaagaattgtttttgtgtttatggatcatatagacattgaaccgtatgttcattatcaacgctggtagtggattcaggcttctgtggagcactgtgaaatctttccttgacccaaagaccaccgcaaagattcacgtaagctttttttctgttttgtgtcacttcaaagatccaaactttaaggtctacggttgtccgaaatctcatgtccctcatgtacaggttcttggcaacaaataccaaagcaagctgcttgagattatcgactccaagtaagagagtaacagagctccataactctgcattttagctgcaaattcgtaatctgaaaactatctgttctttatttgtgtttagtgaacttcctgagttcttgggtggtaactgcacttgtgcagacaaaggtggatgtatgcgttctgacaaaggtccatggaacgaccctgacatcttcaaggtaatttgtaggataagtagagaatcttcgaaaaccgtttaacgaaacgatgaactgagaagctgaatcttgaactatatacagatggttcagaacggagaaggaaagtgcccaaggaagactttgtcaaacattgaagagaagacaatctcagtggacgagaacacaacaatggtaaaagcaaaatacaaaaatatctttgatctttaaaatttacagtaatatctaacattctcatatttttgcttgaagaaatctgattcctttgcggtgagtttctctcttttgtcaataataaaggttacttctttagctctctctttctctgtatgactgattttgaaaatcctattggcagaagaacaaattcgatgcagagaacacaaaattcataccgatgattgacaaaactgtgaatgcttctacatggcctacaaatctccacaagtcaaactatcctgaacctgaaggtacactacattgaaacattgacactacactaaatttattcgtgttttcacgttttgaaaacatgattcttttttttattaccattccaaacattcatcatagtttcatgtctttgaaaagagattctgctattatactataccgctacactcttcaacaagaataccacttattacctaaatgtgtt
